United States Patent Application Publication US 2004/0123343 A1 - sequence listing, part 19

SEQ ID NO: 51974 - DNA, 3744 bp, Oryza sativa
  Clone ID: PAT_MRT4530_54315C.1
atggcagaacagtttcagagcttcgagggagatctctaccagaaatacatcctgaaggggcagacaacgaacttcaacatattcccgaagctaagggatcactgggacgagttcgttgcttacaagacagggcaacaagggcaggcgatgatggaaagaaacaaagaaaatgccgccaagaagaagtaccatcaccacttggggtcaggcggctatagcgtcgcgatgccgaagtgggaggagatggaggcaagcttgcttgagaggggtatcgaaccggccaccgctaaatggtcggatcgatcgaagttctggtactatgctcatggtggaacgcttaacccagttgatggctccctggtcttcagcgatcagatacgcgaggctgccagtcgactaacggacgcagtggaagcctcttctcagggcacgttccgacccgacagagagaaggacgagctgtcacttgccctacagactcccgagcatccaggacgaacacgagggaaaggggtgattccttggaagattggattcaaggaggacatccacacgtacaggagtcggatgaggagcaagagagataccgaggcgaagattgcagatcttaagtacagggtatcgagctatgagctcagcatgaaagaggaggtggcaaggaaggtggataaacgcatgtccgcacatcggtcccaagatccccagctgtacattcctcctgcaatggtcagcccatcaggcaatcgtagcagctgtgcctcaacgggacaggtggcgtcgggaatggccatcccaacggacccttcagggacttaccactgcaggccgattccagcaggatactcgaaggtcgaagttgagttggtggaagccgcgtacaaggacctcgagttggactaccctggaggagacggtgagacgcatctacgagacacaagccacgccattatactatggcgcaagcggtacatcatcctccctaggcgacaagcggcgtctcatgcaccatctcctctggctccgccatctcctcctcaggctccagcaccgtctccacctcaggctcctgcgtcaactcctcctcaagctcctcgtccggcaccttccaagtcaagggcgaagcattgtaggtcagaggcagatctgaacaaagaacctacaacgacagcaatgatcgtgacaagagctagagtagaagccgttctaagtcccgaagtaaaaagttctgtaagtattgcaaaaagaaaattcacttcattgaagaatgttggaagctgcagaataaggagaaaagaaaatctgatgatcaagacacatgatggcacgacacgcacgctgaaagatgtgagacacataccaggaatggcgagaaatctcatctcactcagcacacttgatgcagaaggatacaaatactccggttcaggtggagttgtaaaggtatcaaaaggttctctcgtttatatgattggtgatatgaattctgcaaacttatatgtccttagaggaagtacattacatggttctgttaccgctgctgccgtttctaaagatgaacctagtaagactaacctgtggtatatgcgtcttggacatatgagtgaacttggtatggcagaattgatgaagaggaacctgctggatggctgcactcagggtaacatgaatttctgtgaacactgtgtttttgagtggaaagttatgatagaaaggcaaactgaaaaggaggtaaaagtacttcgcactgacaatggcggtgaattttgttcagatgcttttgatgattactgcaggaaggaaggcatcgttcggcatcacaccatcccgtacactccacagcagaatggtgtggctgagcgcatgaacagaaccatcatctccaaggctcgttgtatgctgtccaatgctcgcatgaacaagcgtttttgggcagaggttgctaacaccgcctgctacttgattaacaggtcgccttctatcccacttaataagaaaactcccattgaggtatggtctggtatgcctgctggctattcacagttgagagtttttggatgcactgcttatgctcatgctgataatggaaaattagagcctagagctattaagtgtctgtttcttggttatggttcaggagtaaaaggatataagttatggaatcctgaaactaataagaccttcatgagtaggagtgttgtttttaatgaatctattatgtttaatgacagcttgcccacagatgtcataccaggtggttctgatgaggagcagcaatatgtcaacgtgcaggtggagcacgtgatgatcaggaaactgaaattgttgccacaagatgaacctattgcacatcgcagaacaaagaggagttgtggagctccagtccgccttattgaggaatgtgatatggtttattatgcttttagttgtgctgaacaggtggagaatactcttgagccagccacatacactgaagctgttgtttctggaaatcttgtaaaacatagttcaattcgtacattcttcagtattgttgctatgcatgatcttgagcttgagcagttagatgtgaagacagcattttttcatggagagcttaaggaggagatatacatggaccagccagaagggttcatagtagctggtaaggaggattatgtttgcatgttaaaaagatccttatatggtttgaaacagtccccccatcaatggtataaaaggtctgaatttgatagatgtgtgtatattaaatttgttaatggatcatctatatacttgctgttatatgttgatgatatgctgattgctgccaagagcaaggaacaaatcactacattgaagaaacagttgagtagtgagtttgatatgaaggatcttgatgctgctaagaaaattctaggtatggaaatcactagagatagaaattctggtttgttatttcttagtcagcaaagctacattaagaaggttcttcagcgttttaacatgcatgatgcaaagcctgttagtactcctattgcacctcattttaaattatcagctttacaatgtgctagtactgatgatgatgtagaatacatgtctagagttccatattctagtgctattggttctttgatgtatgtcatggtttgctcccgtccggatttatctcatgctatgagtttggttagtagatacatggctaatcctggtaaagaacactggaaagctgttcagtggattttcaggtacctcagaggcacaactgatgcttgcttgaagtttggcaggactgataaggggcttgttggatatctggattcagattttgctgccgatttggataagagaaggtcactcacaagttatgtgtttaccattggtagttgtgctgtgagttggaaggcaacattgcagcctgttgttgcccagtctaccactgaagcagaatacatggctattgctgaagtatgtaaagaatcagtttggctgataggattgtttgctgagctttgtggagttgattcttgcattaacttgttttgtgaaagtcaaagtgctatatacctcactaaggatcagatgtttcatgagaggacaaagcacattgatatcaagtaccattatgttcgcgatgtagtcgtgcaaggtaagctaaaggtatgcaagataagcactcatgataatcctgctgatatgatgacaaagcctgttcctgttgctaagtttgagctttgctcaagcttagtttgtatagtggtttag

SEQ ID NO: 51975 - DNA, 8583 bp, Oryza sativa
  Clone ID: PAT_MRT4530_54316C.1
aaggaggagtttaacctacgagcgctgctgttcataaccattaacgattggcctacacttagcaacctatccgggcagtccaacaaggggtacaaggcttgcacttactgtatggatgaaacaaaaagtacgtatcttaagcactgtatgaaggttgtgtacatgggtcatcgtcgattccttgcagcaaaccacctagtacggaagaaaggcaagcactttggaacatacggtggaccgccgtacgaagccaaaacatctgaacggtaaaacagtgtttgctatggtgaaagatcttaaagtagtgtatggaaaggggcctggcacccagcctatatagagcgaacatggtcacacggcgatgtggaaaaaaaactccatattttgggagttaccctattgagaattcttggacgtccgccacgcaatcgacatgatgcacgtcactaagaacctttgtgtaaaccttcttggcttcctaggtgtatatggaaagtccaaagatacactggaagcacgtaatgatctgaagcatatggaacaacgcggcgaccttcacccggaaccaaaggagaaaagaagccattacttgagtccagccagctacactcttagcaaggcaaagaaggaaagtatgtttgaatgcttggagagcatcaaggtaatgtcaggatactccacaaatataaagcgaataataagcacgaaggagaagaagttcgcaaacctaaagtctcatgattgtcatatgttgatgacatagctgttaccaattataataaggggtatcctcccagacaatgtccgggcaacaataacaaaactatgtgctttcatgaacgcaatttcgcagaaggtcatcgatccggatagattagaagcccttcagaatgatgtggtgcaatgtcttgtcacctttgagttgatatttccaccttcattttttaatataatgacgtatctgctttgtcaccttgtcaaagagatcggtattctcggccctgtgtacctacacaacatgtttcctttcgagaggtacatgggcgttctgaagaaatatgtttgtaaccgtgctcgtccagaggcaagcatcgccaaggggtatgaaacaaaggaggtcattgaattctgggtagaatttattgaagtccttcgcccaatcggggtacctgaatcacgccatgaagggagactacggggaaaggggactctcagaaggaaagcaataatgacggtagacaacaatttattccgtaaagcccatttcatgattctgcaacaatcttcattggtggctccttacatcgaggagcacttggctctagttcgtgctagaaacatcggtaagtccgatgcatggattacacggtatcacattgatactttctccgcgtggttgtgacaacatctcatgggtaatgagacgattaaccaacaactggccttcctggcgaggggaccatctggctcgatcgcgacattccagggatatgaaatcaatgggtacacattctacacgagagcccaagacatgaagagcacgagccagaacagtgttgttcgtatcgatgccatgggacacgatggtacaactagcacgtattacggtgccatcgaggacatatgggaacttgactatggacctctcaaggtccctctgttccggtgccaatgggttaggttgactggtggaggcgtaacgattgatgacagtgggatgacaacggttgaccttaacaaggttggatactcggacgaaccttttgtccttgccaatgatgtaacgcaagttttttacatcaaggacatgtctagcaaaggaaaaaagggcaaagagcctgacgagccgaagcgccacgtggttctcccagtgcgccctcgtcttctccaccaacacttagaagtttttcctctaatcgatctcagcttctccttcgccgccactgcctagggcaaccccacgccgacgccgccgtcgtctctcgccgtcgtcttgcggtcctcgccgcctccgccgctgaagccgccgccacatctcttgggtgtttcttgtacgaacagatggctgatcgcaatgaggaacagatactatatgatataatcgcagagggaagcagccagtattggatcgaagaagaggggaacgaggttccaaaccagtacttgaatgaggaggggaacggggagagggatgcggaggggaatgaggaggaggaggctagtggaagtcatccctccgctggacagaagagggcacgcggacaacgaggtgccgtgaagaagatagagggtcggcacatcataactgaggtggacgaagacggttgacctagtgccccggcagaagcagccaagaattttgtacgccacagcggttgggttgtgagggataacgtgcctgtcagcatggtgtactggcgtagaacaagggcacgcggggataatgacagctttgtcccggaatcagagaaagagatgatgtggaccacaatgctcgagacgttcacgctccctgcgggtacggagaacatagtgaaacagtggactcttaagaaaatggcagaatagttccagagcttcaagggatatctctacaagaaatacatcctgaagggactaacaccgaacttcgacgtattcccaaagctaagggatcattgggacgagttcgttgcttacaagacagagtaacaagggcaaccgatgatggttagaaacaaagaaaatgccgccaagaagaagtaccatcaccacttagggtcaggcggctatagcgtcgcaatgccgaagtgggaggagatggaggcaagattgattgagaggagtatcgaaccggccaccgctaaatggccgaatcgatcgatgttctggtactatgctcacggtggaacgcttaacccagttgatggctcccttgtctttagcgatctgatatgcgaggctaccagtcaactaacggacgcagtggaagcctcttctcagggcacattccgacacgacagagagaaggacgagctgtcactcgccctacagactcccgagcatccaggacgaacacgagggaaaggcgtgattccctggaagattagattcaaggaggacatccacacgtacaggagttggatgaggagtaagagagatatcgaggcgaagattgcaaatcttgagtacagggtatcgagctacgagctcagcatgcaagaggaggtggcaaggaaggtggatgaatgcatggccgcacatcggtcccagaatccccagccgtacattcctcctgcaatggttagcccatcaggcaatcgtagcagttgcgcctcaacggggcaggtaggatcacagagcatggacgccatgcaaacccaggatgaaaccacttgccccgttgatgacatcactcagcggacaccatgtgagctgcatattcccttcaagaacttatcaatcaaggtggcgtcggaaatagccatcccaacggacatttcagggacttaccactgcaggtcgattccagcaggatactcgagggtcgaggttgagctggtggaagccgcgtacgaggatctcgagttggactacccaggaggagacggagaagtaaagaggcaactcaagcctcggagtcctgaaaagaagataactattgacccgagcgtgaaaaacttcttcaagggaatgtccacaacaaacaaggaggccttaaagctatcggactatgaccgaacacttcagaaagcctatcacaagaagtccaaaccagtccctcagcttggagaacaaccaaaccaagaggtcgagcccttggtgacaggtgaagattttggcataacggatttcatttcagacaccggtctaactatggatcagctgattgggaatcgcaccaatcccgaaggcggaagtggcatacaactgcagtccctaccgacacagatgtacaaattccatgaatggtacatggaaatgaacgccaagggtaaagagatgttcggagcgaggatcagaaaccccgacttcttgcaaggagaagatgttctctggatccatttcaaggatgtcttcgatctgtaccatctggacgcccttgacgtctctcttctgagcgcatggattttaatggagattcacagggcccgatggcgggggttttacgatactgggttcatcgaccctcggaaaatcaacaccgaaatgatcgacaagtacgagaaagacacagaggacaatctcatccatctcctaacgcagcaggatggggatcctctagagtcgacctgcaggcatgcaagcttgcttgagaggggtatcgaaccagccaccgctaaatggttggatcgatcgaagttctggtactatgctcatggtggaacgcttaacccagttgatggctccctggtcttcagcgatcagatacgcgaggctaccagtcgactaacggacgcagtggaagcctcttctcagggcacgttccgacccgacagagagaaggacgagctgtcacttgccctacagactcccgagcatccaggacgaacacgagggaaaggggtgattccttggaagattggattcaaggaggacatccacacgtacaggagtcggatgaggagcaagagagataccgaggcgaaaattgcagatcttaagtacagggtatcgagctatgagctcagcatgcaagaggaggtggcaaggaaggtggatgaacgcatgtccgcatatcggtcccaggatccccagccgtacattcctcctgcaatggtcagcccatcaggcaatcatagcagctgcgccttaacggggcaggtaggatcacagagcatggaagccatgcaaactcaggacgaaaccacctgccccgttgatgagatcactcagcggacaccatgtgagctgcatattcccttcaagaacttatcaatcaaggtggcgtcgggaatggctattccaacggacccttcggggacttaccactgcaggccgattccagcaggatactcgaaggtcgaagttgagttggtggaagccgcgtacaaggacctcgagttggactaccctggaggagacggtgagacgcatctacgagacacaagccacgccattatactatggcgcaagcggtacatcatcctccctaggcgacaagcggcgtctcatgcaccatctcctccggctccgccatctcctcctcaggctccagcaccgtctccacctcaggctcctgcgtcgactcctcctcaagctcctcgtccagcaccttccaagtcaaggtcccaccaagctccaccgcctgcccgcacaagggcaacgaagaaggcgaaagttgacgccgccgaaatagtgaagatattttgctggctggcgcctgtgggtttcacgatggcgtcgatgaagtatgatctaccgctgctagactacaagacgagattcccgctgtggcaagttaagatgcgggcggttctggcgcaaacttcggatcttgatgaggcgctggaaagcttcgggaagaagaaaacgactgaatggaccgctgaggagaagcgaaaagatcgtaaggctctgtcgctgatccaacttcatctatctaatgatattttgcaagaagtgttgcaggaaaagactgttgcagaactttggctcaaactagaatcgatctgcatgtctaaagatctaaccagtaagatgcatatcaagatgaagttgttctcgcacaagttacaggagagtggttctgtgttgaaccacatatcggtcttcaaggagatcgttgccgacctagtgtcgatggaggtacattttgatgatgaagatttaggtcttctagtgttatgctcactgcttagttcatatgcaaattttcgtgacaccatacttttaagtcgtgatgaactaacccttgcggaagtttatgaggcactccaaaacaaggagaagatgaaagttatggttcagtctaatgcctcgtcctctaagggcgaagcattgcaggtcagaggcagatctgagcaaagaacctacaacgacagcaatgatcgtgacaagagccagagtagaggccgttctaagtcccgaagtaaaaagttctgtaagtattgcaaaaagaaaattcactcattgaagaatgttggaagctgcagaataaggagaaaagaaaatctgatgatcaagacacatgatggcacgacatgcacgctgaaagatgtgagacacataccaggaatggcgagaaatctcatctcactcagcacacttgatacagaaggatacaaatactccggttcaggtggagttgtaaaggtatcaaaaggttctctcgtttatatgattggtgatatgaattctgcaaacttatatgtccttagaggaagtacattacatggttctgttaccgctgctgccgtttctaaagatgaacctagtaagactaacctgtggcatatgcgtcttggacatatgagtgaacttggtatggcagaattgatgaagaggaacctgttggatggctgcactcagggtaacatgaagttctgtgagcactgtgtttttgagtggaatgttatgatagaaaggcaaactgaaaaggaggtaaaagtacttcgcactgacaatggcggtgaattttgttcggatgcttttgatgattactgcaggaaggaaggcatcgttcggcatcacaccatcccgtacactccacagcagaatggtgtggctgagcgcatgaacagaaccatcatctccaaggctcgttgtatgctgtccaacgctcgcatgaacaagcgtttttgggcagaggttgctaacaccgcctgctacttgattaacaggtcgccttctatcccacttaataagaaaactcccattgaggtatggtctggtatgcctgctggctattcacagttgagagtttttggatgcactgcttatgctcacgctgataatggaaaattagagcctagagctattaagtgtctgtttcttggttatggttcaggagtaaaaggatataagttatggaatcctgaaactaataagaccttcatgagcaggagtgttgtttttaatgaatctattatgtttaatgacagcttgcccacagatgtcataccaggtggttctgatgaggagcagcaatatgtcaacgtgcagcactcacctcctgttttgcagccacaagatgaacctattgcacatcgcagaacaaagaggagttgtggagctccagtccgccttattgaggaatgtgatatggtttattatgcttttagttgtgctgaacaggtggagaatactcttgagccagccacatacactgaagctgttgtttctggaaatcttgtaaagcatagttcaattcgtacattcttcagtattgttgctatgcatgatcttgagcttgagcaattagatgtgaagacaacatttttacatggagagcttgaggaggagatatacatggaccagccagaagggttcatagtagctggtaaggaggattatgtttgcaagttaaaaagatccttatatggtttgaaacagtccccccgtcaatggtataaaaggtctgaatttgatagatgtgtgtatattaaatttgttaatggatcacctatatacttgctgttatatgttgatgatatgctgattgctgccaagagcaaggaacaaatcgctacattgaagaaacagttgagtagtgagtttgatatgaaggatcttggtgctgctaagaaaattctagatatggaaatcactagagacagaaattctggtttgttatttcttagtcagcaaagctacattaagaaggttcttcagcgttttaacatgcatgatgcaaagcctgttagtactcctattgcacctcattttaaattatcagctttacaatgtgctagtactgatgatgatgtagaatacatgtctagagttccatattctagtgctgttggttctttgatgtatgtcatggtttgctcccgtctggatttatctcatgctatgagtttggttagtagatacatggctaatcctggtaaagaacactggaaagctgttcagtggattttcaggtacctcagaggcacaactgatgcttgcttgaagtttggcaggactgataaggggcttgttggatatgtggattcagattttgctgcagatttggataagagaaggtcactcacaagttatgtgtttaccattggtagttgtgctgtgagttggaaggcaacattgcagcctgttgttgcccagtctaccactgaagcagaatacatggctattgctgaagtatgtaaagaatcagtttggctgataggattgtttgctgagctttgtggagttgattcttgcattaacttgttttgtgacagtcaaagtgctatatacctcactaaggatcagatgtttcatgagaggacaaagcacattgatatcaagtaccattatgttcgcgatgtagtcgtgcaaggtaagctaaaggtatgcaagataagcactcatgataatcctactgatatgatgacaaagtctgttcctgttgctaagtttgagctttgctcaagcttagtttgtatagtggtttag

SEQ ID NO: 51976 - DNA, 504 bp, Oryza sativa
  Clone ID: PAT_MRT4530_54317C.1
tgttgcggctgggggtgctgactcagcagcataaggcttgtggagggttgctgctggtgcatgcgggcctccttcagccatggacacacccacaggctttaggccagctgcagtggcagcagcggcggttgatgctgcatgtgctgctgcgctgccagggggccctggggggccctgctgctgctgctgctggtggtggtgctgctgttggtgctgctggtaaccctgagacggcccctgttgctgctgcatggggtgctgtggtctctgctgctgctgcataggatgctgtggcctgccctgctgctgctgggggcctggcccaggtggcccaggagggcctggtgggccgggcctgctgcctagaggccctggtgggccaggcctgctgccaggtggcatcatgggcggtccgcctggcccaggcgccggtgggccaggaggtgggccgccggcaggtggcatcattggtggtccgcctggcccaggtgctggtgggccacc

SEQ ID NO: 51977 - DNA, 2082 bp, Oryza sativa
  Clone ID: PAT_MRT4530_54318C.1
atggggcatcctgtcgtcgccgtcgccatcgtcttcgtctccgccgccatcgccatggcggcgagctcccagtactcccaccacccgctcgacccgctcaccgccacggagatcaccgccatccgcgccgccgtgctcgcctccccgctcgtgccggcccgcccgcttttcttccactacgtcggcctcgacgagcctgacaagccggacgtcctctcctacgcctatggcgccgccgacgccgctgccacctcctcccaaatgaccctgccgcgccgcgcgttcgtcatcgcgcgggccggcggccagtcgcacgagttcaccgtcgacatcgccgccgacaacgcgtccgtgctctcgcacgccgtccaccgcgggcccggcttcccgatgttcacggacgaggaccagatcgcggccatggcgctgccgtacacgtacccaccgttcgtggagtccgtccggcggcgcgggctggacgtcggcgaggtcggctgcggggtgctctcgagggggtggttcggcgccgagcagccggcgtacggcggcgccagggtggcgaagatgaagtgcgtggtggtggactacaacgccacggcgaacatctacgcgcggccggtggaaggcgtggtgatggtggtggacctcgaccggatggccatcatcgggtacagggacagggcggtgttcacggtgcccaaggcggaagggacggactaccgggcggacaaggtcgggccgccgttcacgggaccggcggcgccgcccggcgtggtgatgcagccggagggcagggggttccacgtccacggccatcttgtcaaatgggccaactgggagttccatgtgggttttgacatgcgcgctggcacggtcatctctctggcctcggtgaacgacaccgatgccggtgggctgaagcggcgggtgctctaccgcggcttcgtttcggagatcttcgtaccgtacatggatccggaggaggagtggtacttccacacgttcacggacgccggcgagtacggcctcggagccttggcgtcgcagcttcagcgtggtgccgactgcccagccaacgctgtctacatggatggctactacgccggctccgacggcaagcccgtgaaagccgaggacgtgatctgtctgttcgagcgatacgctggtgatgtcgcatggcgccacaccaatggcattgggctgggcggattgttctcggaggtccggccggacgtgaccttggtggtgaggatggtggtgacggttgggaactatgactacacattggactgggagtttaagaccgttggctccattaagattgtggtgtctcttagcggtatcctggagatgaaggccataaactacacgcacgtcgaccaaatcagggaagacacacatggcacgctgatcaccgagaacaccatcggtgtctaccatgaccactttgttacctaccacctcgacctcgacattgatggcacccggaactctttcatcaaaaacaacatcgttcctaagtgcaacactggcgttcgtgcaaccggcggtgctcccacaccgaggaggagctactggacagtactatatgaggttgccgagactgaggcggaaggccaggtgaacattaatagcgctcctgctgacctcctcttcgtcaacccgagcaagaagatgaagattggcaatgaggtaggttaccggctcattccaactggtgcgacagcaacgtcattgttggccgacgatgactacccggagcgccgtgcaagctacaccaagaagcaggtctgggttacgccgtataacaagtcggagaagtgggcatccggattatacgccgagcaaagcacgggagatgacaacttggccgcctggagcaagaggaacagaagtataaaggatgaagacattgtactgtggtatacggttggtctgcaccatgttccgtaccaggaggacttcccagtgatgccaactatcagcggtgcattagaggtccgtccatccaacttcttcgagaggaacccgcttatcagaacaaagccacccgaaaactccccaaactgctcgtgcagcatt

SEQ ID NO: 51978 - DNA, 3594 bp, Oryza sativa
  Clone ID: PAT_MRT4530_54319C.1
gagctaaagctactgctagacaattgggatgtatctggggtttccccttgggtttcatgtcaacctccaaatgagctccctaaatgcatatggggggaggaacgaacaataatcagatcaccctcgccttctccttcccgagcctgcattggcttcagtgtaggactggcgcctcctcttcgaagagctttgtggaggggtatcgagcgaccttgatgaagaacgctttgctggcgacatattcttcttatctttcctggccaatctctcacgctcatcatattcttggttctccttctccactagacgaatgagggtctcgcacctcctagctagctcttgggttgttctagacttcacaaaccaatcaaatcggaacaagggcgacatgcgaaaggctgctttcagttcatcccagtttccgtatccgagtttgtgcaccatgcataacataaaacgatcacattcttcgttgtataacttccctttattctggccatactgaattttcaactctaaccaagggttcttatagcggtctagctttttcccaatagctttcataatctcatccttccggtatatccttgcttctcctttctcaatgttcttaataactcggtcataatcatttaattccttgtatctttcctggaaaactttagcgtaccgctgcacctcctcttctgttttcccctccatttcagaggatatgttctttatgtcattacgaccgtacttctcacaagcacggatgaatgtattgaagtccctccttgtccatgtcgaaaagccctcttccaatagctgctctttctcttcttgctcctccacagtcaacggttccagttgatcttcgtcatcaccctcaccaaccgtatcctttttctgatttgcttgcacaaggtatttgacttccttctcatataattcattgagtctctgagtgttgaagaactggaaatcatgcaagtgtggcattcgaggaattctcggttccctaggttttgctggtgcaccttggcgaagtgcttgcttgaaataatcagactcagagtagtttcgcttcctttctcttctgctggttggctctatccagttgtcagtgaccaacttcttaaaatcaagtttgttttcatccttatcatcatcaaaatcatacagttcagcagtgtcatccattttgaacttaatagcatcttctgtgaacttcttcatttttgcatcaagttgtgctgttgcttcttctcccttagcgatgatgcggtcaatatcttcatctgttattgtgctatccttggagctgaataccatttcagcaccaaatctgaccatctgcaatagctcatccttattgacagctttctgctctgccaatcgaccctgttgtatgaccaaagcatccagggcaagcttcttataagctctctcaatcaccttttcctcaattgtatactcagtgcagaaacgaaaaacttgaacttctttcttttgaccaattctatgtgcacgatcttgcgcttgcagatccacttgaggattccagtcactgtcataaagaataacaacatcagcagtagcaagatttatcccaagaccacctgccctagtcgaaagcaagaaaacaaatttttcactccctggcttgttgaaagcttcaatcgaagcatcacgatcttcaccaccagtattcccatcaattcggcaatattgataccccttgtacatcagataatcttccaagatgtccaagagcctagtcatctgtgagaaaataagtactctggaatcacgttcctttagcttgggaagtaatttatctaacagaaccatttttcctgcattctcaattagatggtctccagtggtatagggtggaccaggctcagcaccttggaataaatatggatggttgcagcacttccgcaattgcatggctatgttaagaaggcgtttgcgttcaccaccggcattgacaacctccagatctttctgaagcagagcacgataatattgtttttgcatctcagacattccaactttaagtatagtttccttttttggtggtaaacctttctcaacatcagatttaagcctccgaagcagaaatggacgaagaaccttatgaagctgctgaacaacttcatgttgatcattttcccctgagatttggaaccaatcatcaaaagtctcagcagagctaaatatttcaggcaacaagaagttgagaagagaccaaagttcatgaagattattctgtagtggagtgcccgtaatgaggagacgataattagtattgtaaatcctcatagtcttagagagaagggaattttcattttttatccggtgggcttcatcaataataatataacgccagctgaaacgcttcaatgcagttttttctttaattgccatttcaaaactagtaacacagacgtcaaacttccctgggactaacaaattttcccggatatggttcctttcttcggggtttcctaagaacttgatagcacgcagaacaggacaaaaccgttgtatttccttcatccagttcccaagagtggactttggtgcaacaaccatgtggggaccggttattcctctaaactcatgcaaatatccaagcagtgatatagtttgaagggtttttccaagacccatctcatcagccaatattccattgatgccattctcatacaagcgtatgagccaattaagtccagctagttggtaatctctcatctttccttttatgcatgatggttgtgaaaccagacgggtccctcctgcaccatcaagggcatcttcctcctccttgagatactcctcatcttcttcctcctctgtcatctttgatgcatgacgtccccttccacgtgatttcttctctgtcgattggtttcctttcgcaaaatgagcaaatatttcagtttgctgcaggagatacttcagacgtcccttccccttgttgttcatgtcagcatcaatggccttattttgggcatccagtatttcctggattttgtgcttcttcagcttttgcatctccctgagctttgctcgctcccgcttcccgatctctgcgtttccagtagcatcttccaacttgtcgccatcttcaccgccgccatccttcccggcggcgacctcgtcgtcctccgtggactgcgactcctcctccgcgcccccgtcatcgcccacttcttcgtcgtcgtcgtcccctccggcgccggtggtgaccgcctcgatctcctcctcatcaacctcctcctcttcctcttccccagccccctgctcctcctccacctcctcttcctcctcctcaccctccgcctctgcttcctcctccccgacactagactcctcctcttcctcctcctccacttgctccccatccgcctcaccctccacctcctgctcctcctcgtccccgctaaacccctcctcctcctccccctgctcctcctgctgctcctccccctcttcctcttctacctcctcctcctcctcctcgccggcggaagacgaaggggagagctgctcctcctccgagtcgtcgtcgtcgccgtcgccatacttccccggcttccccat

SEQ ID NO: 51979 - DNA, 1690 bp, Oryza sativa
  Clone ID: PAT_MRT4530_5431C.1
gtggagaaagatctactgctgcaacaaagaacagccatggagcttctctggctgctgctgttgctgctcatggcttcctcaacatcgtcgcggtccgaaatgaaggcgggagaggtgatcaggagaagccaattccctgaggacttcttcttcggcacagcttcttcggcataccagtatgaaggtgctgtgagggaaggtggcagagggcccagcatctgggacaccttcacccacaatcatccagagaagatagcaaatggaagcaatggtgatatagcaatagattcctaccaccggtacaaggaggatgttggaatcatgaagggtttgggcttgaacgcgtatagattttcagtttcctggccgagaattcttcctagtgttgaaccgtttgtgaccctttttcactgggactctccacaagctttagaacaacagtacggtggattcttgagtaacctcattgtggaagacttcagggactatgcagacatctgctttagggagtttggtgacagggtaaaatactggattacattcaatgagccttggagtttcagtattggtggctattccaacggcatattagcacctggaagatgctcctctcagggaaagtcaggttgcagcaagggagactctgggagggagccttatattgtagctcacaatcaacttttggctcatgcagcagtagttcagatttacagagagaaataccaagggggacaaaaagggaaaatcgggattgctattgttagcaattggatgattccctatgaagattctaaggaagacaagcatgctaccaaacgtgcattggatttcatgtatggatggttcatggatcctttaaccaagggagattatccagtcagcatgagaacattggttggtaacagattaccaagattcacaaaggagcagtcaaaagctataaatggatcattcgacttcatcggtctcaattactatacagcaagatatattcagggtactaaacaagatagtaacagtcacaaaagttacagcactgattcactgactaatgagagagtggaaagaaatggaacagatattggtccaaaggctggttcatcttggctctacatctatccaaaaggaatagaggaactattgctatacaccaagaggacatacaacaaccctactatctacatcacagaaaatggtgttgatgaggttaacaatgaaaatttatctcttaaggaggccttaattgacactaccagaatagagttctaccggcaacacctattccatgttcagagagccctaaggcaaggagttgatgtacgaggatactttgcatggtcactgttcgacaatttcgagtggatggatggttacagcgttcgattcggcattaactacatcgactacaaggatggactgaagagatatccaaagcgatccagccaatggctacagaatttccttcataactgaagtgtgcgttgttaacagtatgaatctatacagcttttgagggagaaatattcctagtgtaatgtataaattggagtaaatttatggtactaaaaagttaccggaaaatatcacagattgtagtgttaaactgttaatatgtggtagtaccttgacaccgtagaggtgccagaaggtatcaaaatttacactatatatatatagatagtgttgtgtt

SEQ ID NO: 51980 - DNA, 1786 bp, Oryza sativa
  unsure (1)..(1786): unsure at all n locations
  Clone ID: PAT_MRT4530_54320C.1
cccgggctgcaggaatacggtcggcccacgcaccgcaccgcaccggccaaccagtccacggactcgcgagcccaaaccgctcagccgccgatggcgacgccgccgccgccgccggcgccgacgccggaggtgttcgacgtcgtcatcttcggggcttcggggttcaccggaaggtacgtcatccgcgaggcgctcaagttcctgcccccgtcgtcgtccccgctccgctcgctcgcgctcgccggccgcagccgcgaccgtgtcgccgccgcgctccgctgggcggcggggcccgggggggcggcgcccgacctgccgatcctcgtcgcggacgcctccgacccggcgtccctcgccgcgctcgcggcgcgggcgcgcgtcgtgctgtcctgcgcgggccccttccgcctccacggcaggcaggtcgcggcggcctgcgccgccgcgggggccgactgcctcgacatctccggggagcccgagttcatggagcgcgtcgaggcggagttccacgaggccgccgccaagaacgggtcgctgatcatctcggcctgcgggtttgactccatccccgcggagctcgggttcttgttccactccaggcagtgggcgccgccgtccgtgccggtgactgtgcaggcgtacctgagcctggagtcggacaagaggatcgtcgggaacttcgggacgtacgagtcggccgtgctcggtgtggccaacgccggtgaacttcaggcgctgcgccggtcgcggccaaggcgacccaggcccaatattccaggccctccacctcccaaaggatctctggttgaacatgacaaggcactgggattgtggactataaagttaccttctgcagacacagtggttgtgaagagaaccctatcaacagtgacacagcatcctgagggccttcctggggtggaagaatccacggatttcgctgagcataggaagagcttctggtcttctgttaaaccagcgcatttcggagtgaagctcacctccaaatccttgctgggcattgcgcagttcatcttcactggactctgcatcggcctgctgggaggtttctcctttggcaggtccctcctactaaaattcccctcattcttctccgctggttggttcaggaagagcggaccgacggaggaacaggtgagcagcgcctcgttcaagatgtggttcgtcgggcgtggctacagcgacgcggctcgtgcatcggaccgcgggagcaagcctgacaaggagatcatcacgagggtttcgggaccagagatcggctacatcacaaccccgatcgtcctggtccaatgcgccctcgtcctgctgagccagcgagggaacctacctaagggcggggtgtacacaccgggtgccgttttcggccctaccgatatccagcagcgcctccaggagaatggcctgtcgttcgaccttgtctcaactaggacactgtgatcagaacttcagaagctgagcatctaccggtttgttcctgaacctgttgcccttttcctggaacctgcctcttgttgctaccttacactgaagaaacgtactgtagtagtctcttgctacgtgtgttgtgtttgtgtgaagtaacagtgtgtttctacatgtcgaaactcgaaactatgtgttgtccttgtgtgtagtacaagttgttatactgttccatctgaaatgaaaatgacgttcctgtgtaatgagaaaaaaaaaaaaaaaaaaaaaaaaaaaaaaaaaaaaaaaaaaaaaaaaaaaaaaaanaaaaaaaaaaaaaaaa

SEQ ID NO: 51981 - DNA, 321 bp, Oryza sativa
  Clone ID: PAT_MRT4530_54321C.1
atgccggacggccacaaggacggcggcggcggcggggcgttctccccacaaggatgcccagcggcggggaacaccgggggcttctccacggtggcgggtcacaggaggtggtggctggacggtcggcgcggcggattaggccacgccggttgcgaatccaccttcctcgacgccggatctagcctcgccacggccagatcgggtctaggcgaccccgacgatggcggccggaggaggcgcgacgtctcggctatgctgggggtggtcttcgagcggtggcaggcggcgaggctagccccagctcgtctcttccccctctag

SEQ ID NO: 51982 - DNA, 1287 bp, Oryza sativa
  Clone ID: PAT_MRT4530_54322C.1
atgatgtgtgaaatgacaaaattacccctagttcctttctcacatgtccagagtagaggaggggccgatgtctgtggggactccttccccggtggcaacaatggtttgcgtgggcggcaacgctgtagtgggggcgaccacgacgccctctccacaagcgccaaggccacctccgaccacctcgctgcatctggttgcggcgacgtccatggccactccctcttcttcttcgctccaccctcgcttctacctctccgccatcgacgaggaccgtccctggtaccaggccgacaacgatgcggcggggctcgaggagctcctcaccgcatgcccctcctcgctaacgggcccacgctgtggtaccagctcgacgacgacgtggcagggctcagggagctcctcgccgcgtgcccctccctcgccgacgagcccgcgccatggtactccttggctcgcggcacggaaccgctaaccccgctcatggtcgccaccgcgtacggctcagtggcttgcctcgacgtgctcctctcgccgccctacctcgtggaccccaaccgcgcctcggcctcatcgctctccaccccactccacctcgccgccgcgggaggggctacctctacccccacatcggtttcccgcctcctcgccgctggcaccgacaatgacaacgacgaggtcgaagagcgacaaggtgaggaagggagagctcgaaatctgcaaaaattatcggataattcgggtgaatttgagaggggcagtgtggatttacaaatgatccgatttgaagagctacttgttttttttttctcctttggatttatgggctatttcagtttgttgctacttaaaccttaccaaattttgggaaataaaccgaaattttcaactctgaagggaggtgatgggatgcgcgacccttctctcatgcacatgggtggccctcactgcacgagctcaatttcagatgatcatgaggagctaagctcgatttctggcgttttcagcatgcctagctcaagaccatacaacgtccctcccctgcacgcgggggcgtctcaaatacacctgatcaaagaaaaacaacaagaacaacaaatcaggagagcccaaactccaatccggaagacgctagcgtgcgcggaaacatcgcgtgagacgccaagcttttgcctaattgcctcccaggggaggcatccaacgctgtccgtccattctcccctccgcgtttctgatgacgaactgactagcgacaatgatcgccctctgctacaggctacagcagcttaa

SEQ ID NO: 51983 - DNA, 598 bp, Oryza sativa
  Clone ID: PAT_MRT4530_54323C.1
ggatccccgggctgcaggaatcggcacgaggctcctgcttaaatagtcctaccttacttgcgttttccagcgattccgggtggaaattttcaattttcttggctaccttttgtgtcattctgtgcaaatcgatttgttgagattttctttttccacctagtaataatagatagagaagcttatgtttgtggggggagaataatcttgtctgcctgtcaggttctgcaaagcaaatacaaataagggttggaggatgcagttttaattactctattactgaagtatgattgttctcactttcattactctattgctgaagtatgattactctattgctgaagtatgatggttctcactagtgttagctcacaccctttatgatttagtatgcactctctgaagaaaaaagagggggtgggcgtcggtcatatccaatgcatgaccagattaatagagctctatgtggatgtttgagcatataaccatgtctgggatttcgcatatcctcttttattttgttttctatttaaaatggttgcaaagttcggtttaaaaaaaaatggttgcaaagttcaaaatttacacatgacagaatggg

SEQ ID NO: 51984 - DNA, 366 bp, Oryza sativa
  Clone ID: PAT_MRT4530_54324C.1
gcggcatcgcagagagagagagagagattttgaagagaagaccatatgacaggtgggtgccacaattgtttatatatatagaatgctgactgggctgccacgcgtacgctacatggactaaaactactgcggattgggtcgaggggggtaaatggagaaagctacgcatcggacgtgtggagatttgcaaatcttcggacgatgttccactgtatgtagaatgaatgttgcaatgatccatcgctcgaaaaaaacaatgtttcaacatataatctgcagacgatgtttcacatcatgttgaatgaatgttgcgctgcttcaccgatcgaagctgaagcacgcttcttcaccgcacatgatgcaacc

SEQ ID NO: 51985 - DNA, 320 bp, Oryza sativa
  Clone ID: PAT_MRT4530_54325C.1
tttttttttttataacaatgtaataggaaatccttgcatgagactaatcgatagatgtccagtacaatcaccggaaacacaccaaaactgcaaacaaaaataccagcacagtaaattgtttactgatacagaaatattatgaaaatatagaataaaccatgagagtggaaatcatcatatatgattaaagacgaagagagacaatcattttgacaaataataaaatgtaggaatgtaactatgaaagattaagatcaattacatattttaaaaagtagaataaaaaatataaaagataaaataatattaatcttttatat

SEQ ID NO: 51986 - DNA, 2011 bp, Oryza sativa
  Clone ID: PAT_MRT4530_54326C.1
ccaagggaagcataataatcttagttagctgcgtgatgtgcatgctacaaaaactcgctagtcattacaatgacaagcattctcgcctgtatgcacaaaacagtatgcaacaacaaatgtaccgaacatataaaaatggccatggcaatggcatattggcatcagggatactctgtttgaattctgaagctagctttgtatgtttaaggctagaaccaaaaaacagcaaaattacatacgccgaatctgtaatcctatacaactcagcagcatttcttttcctctcaagtccaatgccgctatggctcagggcaaaaataatcaagaacagcctgaaattacctgcaatgtcacagctctcgtactactaagtggcggcggctgtggctagatcagcacttataaacagctctagccaaagaaagattttgcagccaggatagaaacagcatctagtgatctcttcctatgtctcatcataccctaacacggatgcgaaagaaggcgtccgatctggcatcaaggtcagccgactctcgctgagctgaatcttcggtatacaatgatcaccaggtctcatatctgtaactttgtgctggggggctcctggctgctgaagctgatgttccttggctgacctaagcacagtgagtcctcgcagttgttggtcgaaggggtgatgtccgtgcacgatgatttgctcggtgtgctgggactgccaatggtgtcactgctctctagtggactctttgaggatgggtatggcgcaacacttgacactctttcctttcgcttctccaagaatcgggcgagagatgcttttcgagcttgaggcacagctcttggcatgatagccgaagcatttgtggttgctactggaatcggctgggacggggatgcctggctcaaaggagtaacagccaacggtaggcctccagatttcggccccgcagagtcgttggagctagaaaagctcttggggagagtcacagcttgcgacacgatggtgatcggattcgaaacccctgatacaagaggcacagaagcctctggtttctgaactacaatctgccttgcaggcaaagcctcgggcactgtaagtttcgcagcagcggaaataggcgaatctgatttacgagctgcactcggtggactcggaatggatgccctgcttgccaaaagcataagttcttgagccttctccaccggaatgttgtcgaacacattcaccaatccatcgtagaatatggtcatctgtgtcaccttcggattttgaaggtcccttgggccgccgtagacgccgacggtggagccggccaccgagttgccgacggagaaggattggttcctgtaggggctcccgccggcgacgttggggaggctatgaacccggagcatggggttcgcgtggccgaacggcacggggtggcgcggcgacggcgacggcgacgggaaatggtgcggcgccgcgacgccgtaggagtccacgccctgctcccggtggccgtgctgcgccgcggcggcgtactgctgccggccgttgaatccaaactgccgctgcttcatggcggcagcgccgtcgaaggcgtcaccgggggacgggcgcggcggcgggcggaacccggagagggagaagcggtcgaacaccgccgcctccttggggtcctcctccctcgccgccgccgccgacgacctgaaggacatgaacgccgacgacgcggcgccgaccttggtcgccggaaactgccactgcatcgccgccgacgcgcctcctcctcctcctcgataatctaccccacgataaactgaatgctcctccggcttgccggccgcctcctccttcctccaaatcgcgccaagaaaatccctctccatcccacgcgaaaaaacgcctcaagaacaagaaccaatccaagcaaaacttttatcccctcttcctcttcctctccttcttctccacgatgccttgacctttcttcgcgctgctgtgcttcctttcgttccctctctc

SEQ ID NO: 51987 - DNA, 243 bp, Oryza sativa
  Clone ID: PAT_MRT4530_54327C.1
atggcgacagggcggcgcggggctcgagacgacggcgacacgacgcacgtgacagcggcgaatgttacagcgcggagcggcggggccgaggcgatgacgacggcgatgacgatggggcggtgtggagcggagcggcgacacgggcgacaggcgcgggcaggcgctgacgatggcggcgaccaggggaagatagattctatccatacctacattgatcggttgtcggatactcggatgggctga

SEQ ID NO: 51988 - DNA, 534 bp, Oryza sativa
  Clone ID: PAT_MRT4530_54328C.1
atggagtctctggagatctcatccaacgattaccagctacaagtcggcaccaccaccatcggacaagagggtggggattacgaggctaaacctagggcgcactcaggcccaaggttccccatccttatcttcgcccctatcatcagggcaccacatagaccgcgcttaaaatccgagcgtccacagcttgttgcgacgagaatccaagccgccgccgcgctgcccgccgcgtcgccgccgccagccgccagcgcgcccgcacgccgccgcaccgcctcgcccggccctccgtgcgccgcgccgccgcgccggccggccgccgccgcccgccacgtccccggctgctgccgcaaggccgctagccgccagcatgccgcctcgcccggccctccacgcgccgcgccgccgcgcgggccggccctccgcgccccgccgttgcagagggaggccccgtttaaggtggtgtttgaatctcctgaagatgaagatgaagataaagtatttcacgtaaaacgaggtggtaataacgtgtga

SEQ ID NO: 51989 - DNA, 870 bp, Oryza sativa
  Clone ID: PAT_MRT4530_54329C.1
atggcccatatggtggccagccaggggcgtaatcatgactgctaccacgaagagggcaccggtggcctcgtcctagcatcgctgcagctgtgggagagggagcggttcgtcatgatggcagatgacgtggtcgaccctaacagccataatcatactgtcgagaagaaaaccctaaagccgcccaacttcctcaagctcgtcgtcaactggcttgaggccgtcgtagattttgtcgtgggcaagggagcaaatccaacaaggctgtcctcgtcgtggctgatagatacaccaaccaggagacatcacgacacgtcatcgctgttccgccacctctgcagcgtccccatcgcgagctcgacgtcgccggtggcggggaagaaggagaagacggcgacgaagccagctggtggtggtgctcgcgatccgcccaagggaaggtcgtcgtcgttcgcgtgcagggtgtgcggcaagaggttcccgtcgcagcaagccatggccggccacgaggatcactgccgccgccacgaggatcacgtccgcgaggcagctgctgccaccgccgccgcagtcgtcgttgtcgccaccgccaccgcttccggtggttgctctaaccgtgcaacttgcggtgctcttctggcgtcttacacctgtgcgactcagcttcttgccgctgccgccgtcgcagattggtcacaggtggccgccgggatccctctttccaaagagcagcttgttgtcgccgtcgccatcgtcctcgccgacgacggccagggccaggcagcagaggtgtttctgttggatctcgccgctgaagagttgaatcttggaccatcaatgaacaacgaggccacatcgatccccaaggcctaa

SEQ ID NO: 51990 - DNA, 537 bp, Oryza sativa
  Clone ID: PAT_MRT4530_5432C.1
attcggcacgaggggggagtttagcctgaaagtgagctctctagggagatagagagagaagagggccaaagaagaagaagaaatcaaagctaggagaggtccaagattcccactaggaccctttcttggttctcttctttttctttggctgattggaaggtctagaatcaatcacttggtttcttttgtttcttttctttggctccattggttcttcttgccttccaatcgttctaaggggtggatagaatttttggagtatcacctatcaggcactctgttcatggcccaatgattttgattggtgggcagattttcacagaccccccattccagttttttttttcccaaggggatgcgcgaatcttgctgctaatgttcttgtgaatcaaagccaggagatttctggaaagtgaggaattcttttcttagattgcaatatcaatcacagcgctttctccacaagttgcaatctctgagcgcttttgatctctccacaccaaccaaaagcaacagaaatttaccttggattccgcg

SEQ ID NO: 51991 - DNA, 882 bp, Oryza sativa
  Clone ID: PAT_MRT4530_54330C.1
atgaggaaaaagagaaaaaagagcgggaatatcatcaatgtcttggagattggtcaggcagtgaaggagttcatgttccagagacacgaaatgggtgacggggcatggaaaattgaagttcataccgttggcgtttggcctaggccatccacgtcaaagatttgctgccacatcttccccgcgtgtggtcccgtgaaagaatgtggagcccaaactggtcacgtgttctccaggtctatcgaggtcgtgcggcgcggggggagagtgttggccccgcaccgtctacgtcggagtccagcgctaggacctaaaaggcaaaagcggcggagggggaagggagagtcccttgccgcccctgcgacgtcatcgacgagatgccgctttgccgtagccaacaagaggcgccaaatcagagctaggaggtcctcgtcaccaacgtggggaagcacagggtggccaccaacgccattgcggttggccgagcacgtcactgccgccggggcaccatccactgccacagaccttgttgagccgagccgccgccagagagaaggtgagaggcatggaccggtgctgccaaggtgggcggagaactctagatctggcactaggagtcctccttgtcgtcgtcaccttcttgcgttggggtcctctgtcgccatgcccgccgccgaggcccgtcttcgggtagccgctggccagctgccagatccggtggtcaaggaaggagatgagcagtaccgccgattggtggaggagacgaagagtgccgccggtcgagagagaagaagggagtcggcagtcgctgactatggaaggagaagagggagctgtagccgctgttggctcactgtcgtgtgcggaggagtgagggagaggtga

SEQ ID NO: 51992 - DNA, 132 bp, Oryza sativa
  Clone ID: PAT_MRT4530_54331C.1
atgtggaagtggcaaggtaagacgacatctctagggcaaatgctaacctccatgttcaatgacctcccaagtcctcaccccaagcgcccggttgccaggcgaagaaaacggcgaaccaatcgttttaagtga

SEQ ID NO: 51993 - DNA, 1794 bp, Oryza sativa
  Clone ID: PAT_MRT4530_54332C.1
ctcttctttttgtgctttgtaaggatcagcaccaattagttgtgagttccactgctatcaacctttgtcatctgtattgccgtgccggttaatctagagcactctttggttaaggaccaaaacatgggcgagaatataaaacgggttcttcgtctcttccgcctagttgagcttctcgaccatgtccagttgcgctagcgcgctgcctacccgctgactgccacaactttttcagtactaataacgaaaaaaggctagagcttactatttatcgaaggccattgacaaaagccccactaacgctttatctctgacagccccactttgctcaagtgcgggctccttagggacgcttgagctgctgacatctgcagcatcagccgcgatcgctctagcagcgacaccaacgatcattccttatttcgggtttcaaggatcagatccagatcgaggaacagcgcactcgatatttctgttaatttttgcatacagagagtcatgactggcgcggccgagcctctgccctgacacatcttcagctagactccagtcctctatacacgaacatcagaagatcgcaaagaactcaaaatgccagtactgcacgatctccaccaatttctaaacactacctaacaatgtcttccaacatcttggtcccacaaagatcttttcctcaagctttccacgtagctccattgcctctccaactccattctcacgacctcctgatattctcctggtagattatcaatttcccttgaccgtccctttgccgcgataatcttgctcaaatctatccaacgcatgcagctcgtgatacaaatcagttgtacgatgaacaagatccatcaacttttgcatctctgcaactgctgtttcttttagctgcttctgtggtggattttccgattctagcttgacaaaatagcggtccaggttatgccattggggatctttacaacggttgccaaatctgacaatctcttgtgaaaatattttcagctcttcccttttgtcattggctacaatccgcatcaacacactcatgtcactggaaattaaattctgcacgccttcagaaggaagcaccacttgtttgaagtatgtaacagtgtcttccgaaagagattgcataatagtagcacctttcaatatcgtgtttgcaacctcaaaagcaagaattgatatcggacatcctttggttttagccctggaaataaagccgccatctgtgctaaggcttgttgttaccaagcagcctatagtgtctaaaatatcaactgccttcccaaatccagccatgccggctgttccaagcactcttagtctgggaaccctgcttgatccattgcttccaggcctgtctgttgtcgactcgggcaatccctgtttcccaggcaaatctatatcttctgatgcggaaattcccagcttactgctcccggaaagaagaaaatcatcactattggagaagagattggattgactatccaattccagcttccccagcatggcttcctcggcaccagtgaccatctgtttgtgtgcagcggcgctcatcgcgtcggggaatccgctgatgccatccgcaccatcatccacggaccacgcatcggcgacaccaacgagccttcttgatttcagcactgccaaacagaaaccaaaccaaccgtgagcacagagcggaatcctccacctccaatccctgtcttttgcgggggtttttttccagggggttgtcgtttggttgccggcgccaggattcgttctctgcgattggccggccgtcat

SEQ ID NO: 51994 - DNA, 210 bp, Oryza sativa
  Clone ID: PAT_MRT4530_54333C.1
atgacggtggggccagatccacagtgggtgccgtcggatctggaggtggtggcgaaggtggaggcaggggaggaagcggtgacagacagcgggattgtagtagcggtcaggatgggaatggttaggttctggattgaacctaaaccattttacatgaccccgctgatccatggttcaacagggacaacccttaatgattccattaaataa

SEQ ID NO: 51995 - DNA, 426 bp, Oryza sativa
  Clone ID: PAT_MRT4530_54334C.1
atggggaggggcggctgctgcgcggtacgtggcgggctcggcaacagcggtggcctcccttcaccgacctcccatgcgcggcagcgacctcccttccacgacggcggtgggcaatgcgacaacgacagcggtgagcggcgggtctggacgacgggcatgcagcgggctcagcacaggcagcggcggcctctcttccccgacctcccatccggcgcggcagcggcgggctcagcaacggcggcgacctcccttcaccgacctcccatgcgcgacggcggcgcggcggcggatctggacggcagtggcgcctcccccccccccctcaacgccgccgtggcggcctcctcgggcggcgctgccccgcgccgatttgaagagctcgcccatgcggttgcaccaaccaaccgcatgaaaagatccttctag

SEQ ID NO: 51996 - DNA, 798 bp, Oryza sativa
  Clone ID: PAT_MRT4530_54335C.1
agggataattttaacatttatctttttgttaataatcgtacaatcactactaaaaaagtgtttttgcatgcgagctaaaaggatcttttcatgcggttggttggtgcaaccgcatgggcgagctcttctgcaaaaatcgctctttggcgtaaccgcatgcgaaaatccatgcaatcgcatataccggccgcatgcaaaaataaattcggcaacaaaaaaataaaatccaaaaaacccccaaaccctagcccgtcgccggatccgtcgcccccgccgcccgctgtcgtcggcagcaccaaatcggcgcggggcagcgccgcccgaggaggccgccacggcggcgttgaggggggggggggaggcgccactgccgtccagatccgccgccgcgccgccgtcgcgcatgggaggtcggtgaagggaggtcgccgccgttgctgagcccgccgctgccgcgccggatgggaggtcggggaagagaggccgccgctgcctgtgctgagcccgctgcatgcccgtcgtccagacccgccgctcaccgctgtcgttgtcgcattgcccaccgccgtcgtggaagggaggtcgctgccgcgcatgggaggtcggtgaagggaggccaccgctgttgccgagcccgccactgccggaccggatgggaggtcggggaagggaggccgctgccgccggtgccgagcccaccgctgacgcgccgctcccgctcaccgtaccgcgcagcagccgcccctccccatccgtgcctcgccgtcggtaagagagagagaggagagaaggaaagag

SEQ ID NO: 51997 - DNA, 268 bp, Oryza sativa
  unsure (1)..(268): unsure at all n locations
  Clone ID: PAT_MRT4530_54336C.1
gtttggtaattggaggaggtggagtaatggagctcgggttggggatggggatggggctgggcgacccgnctgcggactacggctcgatcgcggcggtggggatgttcgtggcgctcatctgcgtctgcatcgtcgtcggccacctcctcgaggagagccgatggatgaacgagtccatcaccgcgctaatcatcgggttgggtacttggaggagtgnttttgnatggtgtcgagctggaagcactcggnatactggtgttcagcgagg

SEQ ID NO: 51998 - DNA, 1047 bp, Oryza sativa
  Clone ID: PAT_MRT4530_54337C.1
atgccacattgccttacttctacatttgaatcttcattttatatactatttaaattatcaaggaaaaagtacgaattaccacccccgaactatcgcggtcgaccgaattaccccataaactacgaaaccggacattcctcaccccaactatgcaaaccgaatgaattaccccctggacccaatccgcggtggttttggtttacgtggtgtacgcgtggcagtccagtcagcattctattcattaaaaatgtgggacccactctcttctatgtcttctctctctcactccctctctctctcttcctccctatctcacgcgcacagcggcgaggatggcggtacgcacggtgcggcggcgtacatgcacgcggccgggggcgggggtggttgcgaggacggcggcgtggctaagatgcgcacggcggcgaggatagcagcacgcacgcacgcgtctcccaatatgcatcgcgttgcccaacaacatgtaaaaacgatcatgcaagcagtcaggccacctcactgagacattacatcgaacactaggcgtgcgtcaccagtaaaacgagccagcgacaccgagccgagcagaccaacttgtggggagcacggttgagaggacatcgccttcccagatgatccgatggaggggaaggtgaaagggaaggaagggaaagcgcggcctggaggtcgatggagccagagaggtcgacggagcgcgcggggcgtgccgccgtcctcgccaccgcgtacgtgccgctgtcctcgccgccgcgccgtgtgtgccgccgtcctcgccgctgtgcgcaatgctgactggactaccacgcgtacgccacgtagatcaaaaccaccgtggattggggtccaggggtaattcgtccggtttgcatagttgggggtgagtaatgtccggttttgtggtttggggaggtaattcagtcgaccgcgatagttcggggaagggtaattcgtattttagaaaattgttgcattttttttaaacttagtataaaaaaacgcgaatgttagggaattacctaatatcaa

SEQ ID NO: 51999 - DNA, 336 bp, Oryza sativa
  Clone ID: PAT_MRT4530_54338C.1
ggggcacaaaccaagagaaaaaaaaatgggaaccccaaatttttaaaaaaacacaaaagggaacggaaatccaaaccccccaaagggtgaaaaaaccgaaccggcgtttaaaaaaaaaaaaaaccgcctcccccacagggtaaaggtccaaaaaaccccagggcccaaccacaaaacttggaggctcaaaaataaaaggcccacccaggaaaaaaaccccccccccttttagggggggagcacctagccgacccggggggggatttgcccggggggggtgagcaaaacgggaaaattccatagcctaagggaccttggcctaaaaagcataagggg

SEQ ID NO: 52000 - DNA, 297 bp, Oryza sativa
  Clone ID: PAT_MRT4530_54339C.1
atggcgtttgggccgtgcatagcgcccgaggcgtacgtacgatcgcgggcgcggacgaagcgaagcgacgagaagggcagatcatcatcaccgattcaccggccggccgcgacatgcagcagcaacaatcctcgcatccgtccgatcacatcacatcaggcagagcaggcaggcaggcaggcacaggccggccgtcactctcccgacctggacctgaatcatcataaagtgccggcgctgttcacgccaccggcgacggagacgatcagatatgcttgccttgccagcctggtgtag

SEQ ID NO: 52001 - DNA, 334 bp, Oryza sativa
  unsure (1)..(334): unsure at all n locations
  Clone ID: PAT_MRT4530_5433C.1
agccagctcaatcaatcatcgagcnagctgagctagtatagtgccatattgcacgtactcgttgtctgtccgatcatccttttttttttcttgtgggggtctgtccgatcatccttgcgtggctaggcaggtagagtagctacctgctcggctgctcgcgttccagccagggtccgggcttcggatatcctcggagtccgacaccaaatcaatggcgtaccagggcatcgaccttctcttcgacgaaagccccangnttgaccacggcgagaattcatcgtacttcgacgggtggaaggcctacgacacgaacccgttngacctgcggcacaat

SEQ ID NO: 52002 - DNA, 1573 bp, Oryza sativa
  Clone ID: PAT_MRT4530_54340C.1
gagagcatactacactgtttctgttattattgtgtgaagtgaaacaatggaggcagtaggaggaagaagaagaaggccaagaacaatgctgttcttggtgctagtagcgttgatggtgatcatggccatggcgaagacggcgagcggcggcggcggcgatgacggcggcgccggaggtgaccatgaccatgatcatgagcaattcttgaagctttggaacggaagaggcggagcagatgctaaggaagattacctgaattgggacgacgacgacgatgatgatgaagatgaagatgaagaagaggaggaggcggagcaggtgatggcgtgggcggccaagtgccggccgccggcggggaggaacgtggtgaacgtcgacagcttcggcgcggcgggggacggctgctccgacgacacggaggcgttcttgaatgcttggaagaaggcatgctcgctgaacaacgcggtgttcttggtccccggcggccgccgctacaaggtcggcgctgccaggttcatcgggccctgcaagaacaggatgatcatccagatccagggcactatcgtggcgccagatgagccgtcggagtgggatccggcgagcccccggctgtggctcctcttctccggtctcgccggcgcccgcatccagggcggcggtctcatcgacggctccggctccaaatggtgggccaactcctgcaagattgaccgctccaagccatgcaaaggagcacctacggctttgaccatcgactcgtgcaggggggtgagcgtgcggaacctgcgcctgcagaacgcgcagcagatgcacctgacggtgtcgcgctcccgcgacgtgcgcctcgccagcgtccgcgtcgactcgccggaggacagcccgaacaccgacggcatccacgtcgccgactccaccgccgtcaccatccagtcctgccgcatcgccaccggcgacgactgcatctccatctccaacggcagcttcgccgtccgcatgcgggacatcgactgcggccccggccacggcatcagcatcggcagcctcggccagggcggcgcgttcgccgccgtcgacggcgtgtccctcgacggcgcccgcgtcgcgcgcgcccagaacggcgtccgcatcaagacgtggcagggcggcgccggctacgtccggaacgtgcggttcgccggcgtgcgcgtcgacggcgtcgaccaccccatcgtcatcgaccagttctactgcgacgcgacgcggccgtgccggaaccggacgtcgaacgtgcgggtgagcggcgtggtgttccggaacatcaccgggacggcgaggcgcgcggaggcgatcaggctggcgtgcagcgacgccgtgccttgcgtcggcatcgtgctcagcgacatcgacctgcgccgcgaggacggcggcggcgaggtgcagaccgtctgcaactgcgccatgggcttcgacgacggccgcgtcagccccgccgccgactgcctcaggaccagcccctgcggcggcatgtcgccggacgactaccaccccgacgacaaagacgacgacgacgaggtccggcataccgagctgtga

SEQ ID NO: 52003 - DNA, 1486 bp, Oryza sativa
  unsure (1)..(1486): unsure at all n locations
  Clone ID: PAT_MRT4530_54341C.1
atggccggcgaccgccgcggcggcggcggcgtcgtctcggccgacggggagcgacggcgggggatccggcgcctgctgctgccccgcggcgaggggtcgtcgtcgtcctcgccgccgcagccgccgccgctgcaggcggaggaggggaggcggaaggggttcgcgtcggcggcgctgcgcgggctgggttgcacgtcggccgcggcctcgcaggcgtacgcgcccggggccggggcggccgcggcggcggccgtgcggtcgtcggcggactggcacgggcggaggcggaggagggggaaggagaagaggaaggagaggggaggaggaggagggggcggtggaggcggccacctcgtgggtggagggatcggcgccgacgtgtggtgcgcgcctgggataccgttcgccgcggaggcgtcgtccgtggactgcgtggtggcgcggcaccagatggtggggagaggccgtggcggcgacgcggagaggccgcacagagagagaccgtgcctgtccaggagggtgaccgtgcaggagcagatatcgtcgtcgttcatggactcgccgccgccgccgcacctcgacgctcgtcgcgccctacgggcgccgacctcctcccatccggccgcctccgccggatgcgcgggtaccgccactcccccgtcggcctcgaggaagagatcatgatgtttcagacaagagttctgttgggaggaatgagcatgtatgatcggtaccaggattggcgccttgatgttgataacatgacatacgaggagttgcttgagcttggagataaaataggttatgtcaacactggattgcgtgaggatgagatagttcgcaaccttaggaaggtcaaacacccagcctttgactcctcgttccggtattcaacagaaatggaaaagaaatgcagtatttgtcaagaagagtttgaagccaatgaagagatggggaggctggattgcggtcacagctaccatgtttactgcattaagcaatggctttctcagaagaacgtttgcccagtttgcaagactgccgttaccaagacttgaagtccggactccgggcaacgacgattgtatacctgggtcaaactttcaaaacatgtttgtttgtgctctgtacagtcaattacatatgttattgtataaacacatcatccattcttttgcatttgcagatagaaatgccatattgaggcatcctttatcaaatatatgttactcttaaaaaaaaaaaaaaaagcggcgccgtccgcgtcggcggctagtgtctcgggctgcctcagtcgatccttctcgggtttgttgcttgntttttanannttantannnggatgtntannnttntctttnanggtnnnnaagnantaattnatannnagnaatttantgtttnatnntntnttgtnntatattgntnttnngnnngantanttatntttttnannnttnnatntttttttttnattnntntgttg

SEQ ID NO: 52004 - DNA, 867 bp, Oryza sativa
  Clone ID: PAT_MRT4530_54342C.1
atgggaggaggtggaagaagaagaaacgctgcgatccgcacggacgcaacaaaaactgtcccagttatcattcatttcctgcagctgcaggggccactgccaatgatcaccatccccgctcccttgcaagctgtcctcaacaacctccaggttggcacgatcgcctcctcctcctcctctcgacactacccgacgcgacgcgtcctcctccccctcgcgtatatatacgcgcgaccgcacgccgcgctccacgcccaaccccgaccacgagtccccgaccgcggcgcgcgctcggctcggctcacccaccgccgcgccgcgtccgacgacgacgacgagcattcaaactgtgagatgggggcgtgcaactcctgcgaggcgacggcggtggcggcggtgaacgggaggtcggcgtcgggggaggcgacggcggcgagggtggtgctggcggacggcgcgctgcggcggttcccgggtggcaccagggcgtcgcaggcggtgaaggcggcgggcggaggcggcggcgggtcgtcgtggttcctgtgcagcgccgacgggctggagctcggggccgcggtggcggcggtgggcggcggcgacgacgaggagctccagcccgggcagctctacttcgtgctccccgccgctatgcggcggcggccgctccaggcggaggagatggcggcgctcgctgtccgcgccagcgccgcgctggtgggcgaccacgacgggcccctcgtgttcccggaggccgccgcctccgccgccgatccccgcgccgccgggaaggggtgccgccggtcgaggacgaggcggcacagccgtggccgcgacttcgtgcccgatctcggcgccattgccgagtag

SEQ ID NO: 52005 - DNA, 771 bp, Oryza sativa
  Clone ID: PAT_MRT4530_54343C.1
attctgtcctctcctgcgaaccaaagagagcttggcaacatggtggttggggcaggaggaggagacgagctcaagttgctgggcgtgtgggatagcccgtacgtgaacagggtgcagatcgtgctcaacctcaagggcctgagctacgagtacgtcgaggaggatctcatgaacaagagcgacctcctcctcggctccaacccggtgcacaagaaggtccccgtgctcatccacaacggcaagcccatcgccgagtcgcgggtcatcgtggagtacctcgacgaggccttcgccgccggcgccggcggcagcacgggcgcctccgtcctcccctccgacccctacgagcgcgccgtcgcccgcttctgggccgcctacgtcgacgacaaggtggggtcaccgtggtacacgatcctgttcgcccgggagaggggggagaaggtggaggcggcggcgcgggccatctcggcgctggagacggtagaggcaggcgcgttcagggatcgctcctccgaggggaagacgacaaacgcagcggcggcgccgttcttcggcggcgacagcatcgggttcgtcgacgtggtgctcggcagctacctggggtggttcagggtgatcgagaagatgatcggcgtcaggatcatggacgcggcgaggacgccgcggctggcagcgtgggcggagcggttcgaggcggcggacgccgtgaggggcgtcctccccgacgacgtcgacaaggtgatcgacttcttgcaggcgttcctccattag

SEQ ID NO: 52006 - DNA, 870 bp, Oryza sativa
  Clone ID: PAT_MRT4530_54344C.1
atgaaggtcggcatctggcggacggcgagggccggagcagcggcgggcggagacggcggcgagcggcggaggcgcgggcgtggcgcggcggcctgcgactgcgagcggcggagatgcgggaatggcggcggcggcgcccggccctcgccgcccgcgcgggcggcgagggccggagcggcggcgggcggagatggcggcggaggcgcgggcgtgacgcggcggcctgcgactgtgagcggcggagacacgggagtggaggcggcaggcactgaacgacgggcgtcagcggcgcctaggcggagcttcaccgcctcctcgccgacggcgaccaggcgttcgagcaggaggacgacggtgggaggcacacgcggcctccctatatacatggcctaccgtccagatacgcgacaagaacgccgcaccggaagacgtcgagagcggcgagcacgagcggaaaggcacggtatggacggagacggcacacattgttacggcggtgatcggctccggcgtgctggcactggcgtggagcgtggcagctgggttgggtggccgggccgctcgccctcgccggcttcgcctgcgggcaccggcatcgacttggaccgcgtcgacatgagcggcggcggtgacggtggaggacgtcgtcgtcgtcgacccagccacgtgtgccttccgccgccgtcctcctgctcgaacgactggtcgccgtcggtgaggaggcggtggagctcgggccgggcgccaccgccgccactcccgcatctctgtcgctcgcagtcgcaggccgccgcgtcacgcccgcgcctccgccgctcgccaccgtctccgcccgccgctccggccctcgccgtccgccgcaggagatag

SEQ ID NO: 52007 - DNA, 146 bp, Oryza sativa
  Clone ID: PAT_MRT4530_54345C.1
ggtgggccaatggatagcataacaaatgaaagcaagctgatgaacacatttattttttcatccatccatatttactttgttttcccaattggcaacctaggattacatttatttcgcaatactatttagtctgctggcgattgaca

SEQ ID NO: 52008 - DNA, 193 bp, Oryza sativa
  Clone ID: PAT_MRT4530_54346C.1
tttacccggagcatgaaggtgccaaaggattacatgatagtttatttttttgggtgcttgtttcattggttctgaacagaattacattatgcagtacagtctcaatggtagcgtacataatttacatacaggtttcttagggggtagtacaaagtacgtgatactagtgcatgtagataaccctaacacactg

SEQ ID NO: 52009 - DNA, 231 bp, Oryza sativa
  Clone ID: PAT_MRT4530_54347C.1
attcaattagccgcacaccgatcccctcctgtgtgttcccccccttctcctctctactctatttttcctcatccgtgcgcgatactgcgcttagattgtgggtggggggagtgatcatcaccaaacccacaaagggggcgcggagagacactatatcatctttgggaaagcgctggatgagaactactcgcttagggcgtcccacccagagtaggacagaacatgcgccaa

SEQ ID NO: 52010 - DNA, 840 bp, Oryza sativa
  Clone ID: PAT_MRT4530_54348C.1
agtctagtagtacttctgtaccatatatgtggttcaatttgaaacaaaagttgtaccagtccatagaaaaggaaccaaatgtatatcctactatacacatcaaaccttggagaatagcaattaaatccaaccttgcatgaattctcccttattacacaagatatgtggtagaattaaataaagcttctctcttgacaccatcagtaattaactaagacaaacttaagcgtgcatcaagatcaatggaagacatagacgttgtactccacgatggcgtcaagtccatttgagtcaagaaagtaggtgcgggcttgggcatagccacgagcgaagcggaaagcactggtgccaccgacaaccggcatctcacggatactgtcggatatgtggttgctgccgagcacggttatcacgctgccattgtacggcccagcagtgagcacgatgttcatagcctgtaggaagcctatccggacttggtctgatgagaggtacatgccctgggctcgacccacgggcttggaccttgggtcaggcccctcggtcaatgggtcatccatgacatacaccgtcccgaaagaggttggtgatgttttgttcggtgggctgaccacctgcacagcggatggcgaggggccggtaatcttgtcatggaagtagaagtgtatgtgtgtcggcgctgaactattgcataaggagctacacccatgcccatacccgctttgcgtgtcggccttagtagtggcggccagcacaaaaaggagcacactcatcactactatttcctttgccattttttgcggacgcgtgggccgacgcgtgggacgcgtgggcggacgc

SEQ ID NO: 52011 - DNA, 246 bp, Oryza sativa
  unsure (1)..(246): unsure at all n locations
  Clone ID: PAT_MRT4530_54349C.1
aaagatccttaacacgaacaagcacccaaacgaggggggggcttttttatccangtgggctcattttccacacgcacaaaaaggacactgtaggacaccaaggattgatccatgctagtgaacatctggtggtgaacaaagcaatagacaagatgacacccgagcattcgatccggaggaacgtaagcattcttctagcaaatggggtgaaacaagccctctacatatactgcagacagctatgga

SEQ ID NO: 52012 - DNA, 622 bp, Oryza sativa
  Clone ID: PAT_MRT4530_5434C.1
tcatctccctctgggcaggccggccggcggtggggaggaggtcggacggccggccggcgatgcggcggcggcgacacgggagaaggggagggaggcggcggctggagcacgggggagatcaaacgtcgacgaataacgtcgtcgtagcgaggaaggaggaggcggggggaagcgggcggcggtggaggagctctggcatcgcgttgaccgcgggcgcgacaagatgcgtcggcggtagtcggaggtcgccgcggcgagggaggagagatgagcggtggagaagcgggagaagaggagggaggcggcggcgggagcacgagggagatcgagcacgacggcgggcggagtggcactatgcgaagccggctcaggtctgccattgcgtcgaagaacggcgccatcgtcgcgaggaaggaggaggcggggggaagtgggcgacggtggaggagctccggcatcgtgttgagctccggcgtcgcgttgaccgcgggcgcgatgagctgcgtcggtggcggtcggaggtcgccgtggcgagggaggagctatgtgtgtcctcaaaatactcaaaggggattctttaggagttttactgcagcccaaaaaagggttttcattgccccaa

SEQ ID NO: 52013 - DNA, 283 bp, Oryza sativa
  unsure (1)..(283): unsure at all n locations
  Clone ID: PAT_MRT4530_54350C.1
tccaaaattcttaaagcctgattccccgctttcctggtcttttgatggagagaagtgctacttctatacgcgcaattaataaaagctccactttttctcccgtgccctccctatccccgagggttcgcttaaccttgctgccctgagaagggccagtcaaacccaacctgtggtgccctctgtatgtttcttcctccntttcgttctcttnccaaattgaagttgtacttgtgttcccaggaaagatcttgcccaaagcttttccctggctccccaaaaaaaa

SEQ ID NO: 52014 - DNA, 539 bp, Oryza sativa
  unsure (1)..(539): unsure at all n locations
  Clone ID: PAT_MRT4530_54351C.1
tcgtaaaattggaggaacaacgtactgaaatattgtcattgctccagaactctggacacgagttggccaattttaaagaacagaacaaggatcttactcaaaaacttgctgaacaaactctgaaggcagaagagttcaagaatttgtctatccatttgagagagctaaaagagaaggctgaagctggaaggaaggagaaagagggatcattgtttgccatgcaagaatccctcagaattgcattcattaaagagcagtacgaaacaaaggttcaagaactgaaaggtcaggtgtttgtttccaaaaagtatgctgaagagatgttactgaagctacaaagtgctttggatgaggttgaaactgggcggaaaaatgagattgctcttgctaaaagaattgaagagctatcaatgagaatttctgaaatggagttagagaatgcaggatgcatcagttgataaaagagacctgtctaatgcatatgacagcatagtaacagaactggaatgcacaanactaaactttgattgctgcatgga

SEQ ID NO: 52015 - DNA, 1026 bp, Oryza sativa
  unsure (1)..(1026): unsure at all n locations
  Clone ID: PAT_MRT4530_54352C.1
atggaagagcttcagtctaccctcgcaagtctgacgtcacaacttggtcacaaggatcaggccctgctttcctttgatgagcacaaaacggagttaaatcgtctgagggaccaagttttggacatggaaagggcaaacagtttgatgcaagatgctctttcacaaagtgaacaaatccagatggatctcaattgtaaaaatatctcactccagtcccagctttccaatgttgaagaccggttagcaacagttatgaaggatacagtcgccactgaaactgaagctagttatatgagaaatctggttgaggagcttactgggcaacttgattccttgagaaatgaccatgaaaaactccagcttaagaacaaagatgctgatgatttactaagggtacacatgtcaactgaagcagaattagctgatagagttgctgcactcgaagcagctatccattctttagaaattgaccttgctagggtcaatgaagagaaggaagaaactgagngagctataaaaagtaacgaagaacaatttgttcaagttggtcccgacaagtctcgatatatagtagaatcaattgatagcagtgagagagttttgaagtatcaagatgacattttgcagcttaaagtcttactgacaaatcttgaagagcaagttgatgatctgaggttcacaaaagatgaggttgaaattctaaacatggttctagaatcaaaattggaggcacaacgtactgaaatattgtcattgctccagaactctggacacgaaagagtgtcatttgggccccaaacttttttaaaagacactagaaccaaggatcttactcaaaaacttgctgaacaaactctgaaggcagaagagttcaagaatttgtctatccatttgagagagctaaaagagaaggctgaagctggaaggaaggagaaagagggatcattgtttgccatgcaagaatccctcagaattgcattcattaaagagcagtacgaaacaaaggttcaagaactgaaaggtcag

SEQ ID NO: 52016 - DNA, 347 bp, Oryza sativa
  Clone ID: PAT_MRT4530_54353C.1
taggcgggccgccttcctctggaggcccttggctgccatagatgcgaccctgattccccccccctggctggaccatgtatccccaccagtactgggaattgccgtgtaccccgagggcctaggcctgggtatcccctctccgtatgtagaatgtatggcgggacgggcttctggtggtgcttctgctcccacacccacacgcactgtgtgttctgagttgctcacctgagttggagaaatttgtattctacccgtgagtcccctcggaagaagtggagaggttgatatattgagtctatttttattcttgtgagatgtaattgcccttgcttgtgccctccacgaga

SEQ ID NO: 52017 - DNA, 2421 bp, Oryza sativa
  Clone ID: PAT_MRT4530_54354C.1
atggttgcaagctctgcctctctgctccttctcctgattcatcctcttttgtgcatatcagcacatgatttcctctcgccaggcgcatctctatctgaagacgatgtgctctattcgccgaatggcgatttcgcctgcggcctctacaagatctcccccaattcctgcaccttctctatctggttcaccaactcggctgacaaaacagttgtctggagcgcaaatcctctccaccctgtctacactcagggatccaaaatggagttgaaatccgatggcagcatggttttgacagataatagtggccagattgtttggaccaacaacgtgagctcttcaaatggtgaacaagttcaagctcagctcttgaatactggaaacctcattgtgaagggcaaaggtgacaccattttatggcaaagttttgattctcctaccgataccttgttacccactcaaaacattactgttcgaattaagctcacatctactaacagattacttgttcccggtcgctatagtttccactttaatgatcaattccagctttcactgttttatgaagagaatgatatcccttttatttactggccaaatccgactcggactatctcggggagggaaaggatgttgtataatatcataccgaccggtactcttaatagctcggggcattttcttgaaagtgaaaatttaactttcatggctgctgattggggtcttgggattatgaggagattaacactagattatgacggcaatctcaggttatacagtctgaacaattcaagcggaacatggtcagtcacatggatggcatttcctcagctctgcaatgtacgtggtgtgtgtggtataaatggcatatgtgtgtacacacctgtgcctgcctgtgcgtgtcctcccggttatgacttcattgatccaagtgatcagagcaaaggctgcagcccaagagtcaatatcacttgtgatgtacaacagaaggtaatgtttgttagccttccaaacactcaattcctagattctgatttaagtcctcttcgttatgtttctcttggagcttgcgagaacatatgcttgaaggactgcaattgtatggggtttgtatattggcaaggaattggtaagtgctatccaaagtccgttcttcttagtggtgtaagcttacctcacattggtagtactggcaccatgtatctcaagctccctatggaagaagtgttggaggaattacaactgtcggagcattcaatgacttcaatcccacagtcacagccttttggtccaaaatacggtcctgactgcaatgctaacaaaaatttggacgagcataagagtggtcaaaatgaatcgaagtatttgtacttctatggtttcttatcagcaatatttcttgcagaggtaacatttattgtattcggatggtttattttgcgaagggagggcaaactagcaagaggaatatctgaggttggctatgaaatggtaacaaaccatttccgtaggtacacctacagagagctgatgatagccaccagaaagtttcaggatgagattggacgaggagcatcaggcattgtatacaaggggatcttaaaggacatgagagcagtagccgtgaaaaagttgttagacataaaccagggcgaggaagaattcaagcatgaactgagtgtgattggcaggatctaccacatgaatctagtgagggtttggggattctgttctgatgatccacacaggatgttgatttcagagtatgtcgagaatggatcattggataaaatattatttggtgctaagggctcacaggccttacttggatggaagcaaagatttaacattgctctaggagtcgctaagggattggcatatcttcatcatgagtgcttggagtgggtcatccactgtgacgtgaaacctgaaaatatactgctggatgaaaacatggagccaaagattgccgattttggccttgcgaagctgctaaatagaggaggatccaaattaaatgtgtcacggatccaaggaactagaggctatttagcacctgagtgggtttcaagtctcccgataacagcaaaggttgatgtgtacagcttcggagtagtgcttctagaattactcaagggagctcgtgtttcggatcttgaaacaaatgaggatgaagaggtggaaatggtcctcgggaggataattaggacactcgcggaaagtttgaagtcaggtggggatggacaatcgtggattgttgagttcattgacaccagattaaatggccgattcaatgacttgcaagcaagagcaatgatgaagcttgctgtttcatgcctagaggaagacagaggtagaagacccaccatggaaagtgtggtggaggtgcttgtttcagttgatgaagccagttctacaatttag

SEQ ID NO: 52018 - DNA, 506 bp, Oryza sativa
  Clone ID: PAT_MRT4530_54355C.1
atcaacactagaaccggaacatgacaaatcagctgtgacacaaggacaatgtgatgactcttctttagaagaaatcactcagaacgggaaaaagtggatgagtgaggaggcgatggtagcatttgaaaagtatattacaagaagagatgatcttaaggaatatgattaccaatttgatgagctgctacatcagtgctttaacgtggaacattattacaagatttttcatcacttcaacttcactgtcaagatgaaggcgccctgttcaactgattggacatcggtgttatattttgccgaagtgaaggaattattgggccataaaatttacttctgctctcctttagagcccaatgaagatggtaattgctatgcatgtaagaaccaagggatggagaatttgaagcatcaatagttggcgtgtttgatcgaggctttccactcaagtgttcccctacacatactcgagtggctctgaagcatggctctgatcatcgatggagctg

SEQ ID NO: 52019 - DNA, 520 bp, Oryza sativa
  Clone ID: PAT_MRT4530_54356C.1
aaacacacggcacttggggagcagcagggactttatttattttaaagggggccccccggacatggccgggccaacaaacgggggaggcaggggggggcccccttaacggaaaacgggcccattattagaacaaaatgaacatgcccccgggcccccaccctggtatttacccacccctaaggccggggggggaagccccccgtcccccctggggccggaaaaacggggggggggggcgggggcccccaacttgggggaaaaaaagggaaactcctgccccctcccaaacttgaacatgggcgccttctcccttaacacgccaaacgggttgtccaaaacgtccgcgggtatcccgcgcagggccgacaatttgccaaccaccggggcgttaatggggccgtcgtttgttgggaacgacacccacggaaaccccttggggccggggccccccgcccccgaaaaattttgggggaccaccaccatttgcccccgccggaatttgccggaaaaacccgccgcc

SEQ ID NO: 52020 - DNA, 288 bp, Oryza sativa
  Clone ID: PAT_MRT4530_54357C.1
ccggccgggaaaccaacacccccactcatctaacttcactctctttcacacgccttcacttcaccaccggcaccatgtctgatcggcatccctgcggagcgaggagaggggagagaaggttaaaggagacatggcctcgctgccctctctcgccgccgcctcggcgtatatgtccctcctggcgcggggccactgcgccgtcgccgacttcaacgccaccgacgccgacgtcgaccttcgacgcagcgccgtcggactcgaaactacagcgacgccgggcgtctactg

SEQ ID NO: 52021 - DNA, 937 bp, Oryza sativa
  unsure (1)..(937): unsure at all n locations
  Clone ID: PAT_MRT4530_54358C.1
tcacccgcttgcgaaaatcctcaccgtgtcgccgaaagggcggggcacgccggcatggccgctgctaaggaacgcgtcccagaggttgtcggcgacgtcggcagccgaggcgttggtgtggagggagtagtcggnttctgcagggccnncaccgacggtggggtgggggatgccgccgccccccgcctctccctccttcgggacggatctaggagggaggagaaccaccggcgcccttccccggcctcccctccggccgggatttggaggggaggggagccacgccgggtgccgctgccgccgccccgtgcgtcgtcgttgccgccccactccgtggccgtccccgcgcctcgccgccgctgccctctcccggcctccccaacgtcggcgaaaatgctttttgtagtagtgatggcagcatatcttgagattgacgaagtcaccacgggcgcctcgctggaaacgggtacattgcttgatatggagcctgcgggaggcgacagtggctggcgacggggagtccaggaggtagaggcgctggccgctggagggtggcgacggtggatggcacacggcaggcgggaggatggggatgacggggactggatctggaggagaggtggcatcgcaggaggcgctggccgctggcgagtggcactggtcgctggatgtgctggcgctggccattagagagacggcgtcacaggaggcactggccgctggaggagaggcagcgtcgcggcactgtggcggtggcgtcgcgcgtgtgcggcgccgggatggggactggcctgtgcggcacgcgtgtacgtcaggactgtggcgcagtggtggcgccgacgcgcgtgagagtgggagaagagccggcatccggcagtgggggattaggattaggtcaacactaaacataaatgggctagatgggctggcctattaa

SEQ ID NO: 52022 - DNA, 395 bp, Oryza sativa
  Clone ID: PAT_MRT4530_54359C.1
gacgtctgagtagggcaccttctttagggcttactatcgtaccatgcttatacacatatttaaccccgtgctccaattgccctgtgtgtgacagtgccatcacccacttgctggccacgctgtgagcaccttgcttagtccttaccgaaccatgtggttgcctaccgaggacacttgccgctcatcatgtacatgttggtacctagggtagcccacataaccatatactaaggggtgagcaccataattgatgccaggcttgatcctgcaaagccggtgtgggcactatacgcttgctggcttaatcgctggtgctctggcaccgggttgtgcttgtgcaccagaccgggcatttttttcactctgagacgagtggagtggtatccacaggagga

SEQ ID NO: 52023 - DNA, 2079 bp, Oryza sativa
  Clone ID: PAT_MRT4530_5435C.1
gctggcgcagccttttcttggttctgttctgtcggcacatgacacattaattttacatcaagttttttttttctctattccagaacgtatggtaaaccctctttgcttgctataaattcccgtcatcgcgtccctgaatcctcgcattcaacgaacaacgactactcttgactccactcaggagcagagcatggcagtcaatcacaaactcagcgccctcctcgtggccacggcgttgccgctgctccttctctccactgcagatgcgggcgagattggggtgtgctacgggagggatgcgagcaatctgatcgatccgccggaagtggtgaagcttctgaacgcgaacagcatcacgatggtgaggatctatgacactgacccgacggtgctcaacgctctcgctaacacaggcatcaaggtgatggtgatgctacctaacaaggatcttgcttccgctggtgcggatgtggggagcgcaaccaactgggtgaagaacaacgtggtgccgtacctcaaccagggcacgctgatcaatggcgtggccgtgggaaacgaggtgttcaaacaacaacctgaactgactggtatgcttgtctcggccatgcaaaatgtgcaaatggcgttagcgaacctgaacctggcggatggcataaaggtgtcgacgccgattgcattcgatgcactcgatgtgtcgttcccgccatcagatgggaggttcaaggacagcatcgcgcagtcggtgatgaagcccatgatcgacttcttggtacggaccggctcatacctcttggtaaatctttaccctatgtacgctgcggcggatccgtcgacccacatctctatcgagtacgcaacgttccgtcctaatagtggtgtgctcgacgaaaaaaccggcatcatgtatttcagcctctttgatgctgagctcgatgctgtttacgccgcaataagtaaagtttcccggggtagcttgagggcatcattggcccaaggagatcaaatgttagttcaagttgcagaaacagggtattcctctggaaatacatttggtgggccagtggtcgttgaagctgacgcggatttgaatgcaatagctacaatacccaatgccaaagcgtacaacaatggtcttatcagacgtgtgctctccggatccccaggtaagcacgacgtctctgcctacatcttctctcttttcaacgagaacttgaagcctgggccagccacggagggacactttggcctattctacccaaacggccagcaggtgtatgaggtcaactttcaaggtggtagaagtccctgtccaacgaatgcaagctggtgtgtggcgaacccgaatgttgataatgcggcattacagagagcgttggactgggcgtgcaataatggcgcagactgcagcgctatccagctgggcaaagcatgctatgagccgaacaccttagttgcacatgcatcttacgcattcaatgattactaccaacgcaagggccaggctagcggcacgtgcaacttcaatggtgtcgctttcatcgtctacaagccatcaccaagcatctgcgatccgaacccaagttggtgcgttgcgaaagatagtgtcggggaagcacaactacagaatgcactagactacgcgtgcggtagttgtgccgactgcagcgccatacagcgcggtgcacagtgctttaatccggacaccaaagtggctcacgcaacctatgcattcaacgactattaccagacagccggtcgggccagtggctcgtgtgactttgccggtgccgcaaccattgtcacacaacaaccaaagattggaaactgcctactcccaccaaacaacgcttgatcagaacaaactgtctaggaagaccaaaagctagcctagctagctaccaaaggcagtgaggatgggattaaagaataattccatattcttctacagagaaaataaggattaaactttttgtatttcccgttggaaattttaaataaataaatgtactgtttgctcctgttgaatgaaattccgcagttacttgtttcagaaaaaaaaaaagtaaaaaaaaaaagctt

SEQ ID NO: 52024 - DNA, 1226 bp, Oryza sativa
  Clone ID: PAT_MRT4530_54360C.1
gggttcttcgatttctccctcgcgccgccgcctcctcctcaccctccccgccccaggcgcaccctacgcttggagctcgtccgatccgctcggcgcccgccatgatcatcccgaagaagagccgcaatgtcttctgcaagtacctcctccaagaggtcgttctgcgcgcctcgccgcactcgtaccgcgcgctggaagggcagactgctcgacacttgtcagcatgatcatccccaagaagaaccgcaatgagatctgcaagtacctcttccaagagggagtgttgtacgccaagaaggactacaacctggccaagcacccgcagatcgatgtgcccaacctgcaggtgatcaagctcatgcagagcttcaagtccaaggagtatgtcagggagaccttctcctggcagtactactactggtacctcaccaacgatggcattgagcacctgcgcaactaccttaacctgccatctgagattgtgcctgccacactcaagaagtctgccaggccacctggccgcccatttggttctggcccccctggcgatccgcccaaggggcccgcctcgctttgaaggggacaggccaaggtttggtgacagggatgggtaccgtggtggtcctcgtggtgctcctggtgactttggtggtgagaagggtggagctcctgctgagttccagccatcctttaggagctctggtggcagacctggctttggccgtggtggtggcggaggctttggcgctggcccgacctcttcctcgatggagtgaacttcccgtagtttggatatgatgttttccttcgcatgaggcgtttaattttgaaggacagttaaattatgtagcagtgatgtttgcaggatcgaccgctgttgacatatgctaaaaatatgctatcttgataccttccagtataatagtttttgcgaacgcttaagttcaatgttaatgcttttgacatattggcggaaattatcttttgcttctgaaaaaaaaaaaaaaaaaaggggcggctaaagcttgatcgggacggagcatattgttttgcccaatggcatatgagatgcaatgcgcgggccccctcttcactattggtctttgaattgtgggaacaatgagaatttttgtttatgaaattgtacctgaggttgttttatacatggtctgtgttatgcattttgttgtgttaaatatcactctagaaataaatatgttggtttg

SEQ ID NO: 52025 - DNA, 441 bp, Oryza sativa
  Clone ID: PAT_MRT4530_54361C.1
agccacccaatcccgcgccattgacgccattgtcgccgccatgccatcgctgacgcgatgtccctatcggcattgcgtcgtcgccactggagtcgcgtgctgcagctagctggtcctcgcgaaagcgacgccctggggaatccctggaatggaggagaagaagaagaagaaacccaaagcgacatcgacatctccgatgcttctgctgctcctgctcccgctgcccctgcgaattaatggcgggatttcttggtgagatcaatcttctccatctccatgatcaccgatgggattgcagactcgttaacgacttcacagcgacatggcaccgaatcatccgaatgaatcggttgaatggaacccccaaagccctcgcacgattggggcccaaaaaaaaaaaataaaaaaaaaaactcgagactagttctctctctctctctc

SEQ ID NO: 52026 - DNA, 726 bp, Oryza sativa
  Clone ID: PAT_MRT4530_54362C.1
tgacagaagagagtgagcacgcataaatcatagtagaagagagcaccaccaccaccacgacgctttgtgatttgagtctcctctcgctcgcgtcgtgctacgtgctacgtttttcttcttcttcttcgtcgggtttacgatggctccccgcgtggcggtgctgctgatggccgtggcctcatcgctcctcgtgatggcgtcggcgcaggaattcaacgcgccggcctcctcgccggcgccgtcgccgatggccggggcggcgcccgggagcgcgtccccgctcgccgtcgcgtcctccgcgctcgtcaccctgctcgcggcggcgctcatgcagtagacgacgacgcgacgactccggcttctcccgcgcgcgtggctccggatttggttgcgtcgatcgagctgcgatcaaatcatgcatagttggtttctttcttctttattataattccttcttctttgggggagagagagagagattattgagtgagggtagtttgatgttgagtggttcttgtgctcttgatctcgctgatggacattcttttctgtgtaccatttctgtacctcattaattactactactactatgtgccttcattcgtatgaataaatccggatcatttcatcttctgaaatgatccttttgcaccagcaaaaaaaaaaaaaaaaaaaaaaaaaaaaaaaaaaaaagaacctctcaacataaaactaccctcactaaaa

SEQ ID NO: 52027 - DNA, 108 bp, Oryza sativa
  Clone ID: PAT_MRT4530_54363C.1
gcacgaggaagtaggaaaatatgctgacatggatctcttgtagagagcttatagataaccattaggggtgctctaatggatacatgcaatgtatttattaggcatgca

SEQ ID NO: 52028 - DNA, 1634 bp, Oryza sativa
  Clone ID: PAT_MRT4530_54364C.1
gtagaatatactttctccttccttgtgcgtgagcgtgaatgatgatgatgaactacagggcgttgtggttgtggctctccgtcgcaatcgtcttctccgtgcaatcatgccgggctctcgccgccggcgagggctccaaggaagcggacaagatcgccgcgctgccgggccagccaccggacgtgaagctacagcaatattcaggctacatcaacgtcaatgagacttccgggaagtcgctcttctactactttgtggaagcctccgttgatgctgcccacaaaccgcttcttttgtggctcaacggagggcctggctgctcatccatgggcatcggagcgttccaggagatcgggcccttccgcgtggacacggacggcaagacgctctgccggaacccgcactcctggattactgcggcgaacctgctgttcctggagagccccgtgggcgtgggcttctcgtacgcggcggtgaagccgcaggaggtgtacagcaccataggggacaacatgacggcgcacgactcgcacaccttcctgctccggtggctcgaccggttcccggaatacaagacccgggacctcttcatcgtcggcgagagctacgccggccactacgtcccggagctcgccgtcaccatcctcgacaacaacttgctcccgcacgcgacccccatcaagctcaaaggaatcgccatcgggaacggcatactggagttcgcggctgagcaaacgcagctgtacgagtacctgtggcagcacgcgttcatatcggactcggcgcacgcgctcatcacgcagagctgcaagtaccccgacgaccacccgtcggcgctctgcgagtcggcgaggaaagcggcgtatagccggattggcaacatcgacatctacaacatatactcgtccacctgccacgaacagaaagtcaggccctcagcctccaagtgcatggatttggctgatccgtgctcccaatacttcgtggaggcgtacatgaaccagccccaggtacagaagacgatccatgcgaacacggagttgaagtatccctggactagatgcagggtttacaacctagaccacttcggcgactcgccaaagtcaatgctgccatacatcaaggcagtgataaccggccgcatccgcatctggatattcagcggcgacttggatgcgatggtgccggtgacggcgacgaggcagtcgatggagaggctccagctgcgggtggcggcggactggcggccgtggtcggcggacggcaaggacgttgccgggtacgtgatcgcgtacgacgggctggtgttcgcgacgccatatgcccatacgagcgctgggcgatacacaatcaggcaaaagctaggacgcgcctgcaacacagtcagaggctcagagtcagagctcatcaactcaggacgatggagcacgaatttatggagcggatgcaatgcatcggggcctattcattgccatcctttacgcagtggacccaagagcgtcacacaccgccccatactaccatctgttaccaagcacatctggcatcagcatgctgacctcgttcatcatattttcaccgagaaaggaaaccaaacaagcagaatcaatcccctactctactctctgaactga

SEQ ID NO: 52029 - DNA, 670 bp, Oryza sativa
  Clone ID: PAT_MRT4530_54365C.1
ctagatacagacgtaaaaaaccaacctctgcttatccacgcgtccgatcttaagcaccgcaccggctgcgtcgtggggtgcttgaggaagcttcagaaatggtgcttgtcttcagtgttcgacgagtaccagcgcttcgccgctgcgaaggcgaggagcaccgatcagagattcatggagctgttcgacatctcaagcttgaagcacctgacagcttcacattgttaaccaagagcgtgcgattcgcgctgtctcctcctctttaagtcctagcaaatctcccaaacctatgatcttctccctgcagctactgaatttgattcagcagtgaataattttggaacccgtagaatgaaccccgtaaaaaaagaaaatgtttgtaattgagttgagagttctagttttctcctgcttagctccctgcagatcctatgaaccagacagttgtgggtaggattgcaagaggttttttccccatttttttttctggtaactcttgcgaggaattcaccaattgttttcgggtactgaaagctgtactcgagcagcattgctcggcgggaatgaactttctcttgatgcaaaaaaagcttgactagctcttcttgcatggatatatacatgatcatgtgcattaaccgcaaaaaaaaaaaaaaaaaaacctcgtgca

SEQ ID NO: 52030 - DNA, 2508 bp, Oryza sativa
  Clone ID: PAT_MRT4530_54366C.1
atgccggagcagacgctggagatggacatcggcgaggaggccgcgccgattgacaacgaggaggctacgctgcaacatcactggggcggtggtgcttgcttagctcgtgtcctactctcatgcctccccaccggcggcgaccgcctccggcgtttgaacccggccatccatgcccgtgccaccgtcgcaggaagactcgacgacctcttcctcaccaacctgctcctgcgtggctactccaatcttggccgcctccgtgacgcccgccacctgttcgatcgaatgccccaccggaaccttgtctcctggggctcggtcatctccatgtacacacagcacggccgcgacgattgtgcaatttccctcttcgtggccttccagaaggcctcttgtgaggtgcccaatgagttcttgcttgccagtgtcctacgtgcgtgtacacaatctaaggctgtttcgcttggcgagcaagtgcatgggattgccgtcaagttggacctggatgctaatgtttatgttgggactgcgcttatcaacttatatgcaaagcttggctgcatggatgaggcaatgttggtgtttcatgcactccctgtaagaaccccagttacttggaacacagttatcacaggatacgctcagattgggtgtgggggagtagccctagagttgtttgacaggatggggattgagggtgtccgtcctgataggtttgtactagcaagtgctgtcagtgcttgctctgcacttggctttctagagggtggtaggcaaatacatggttacgcgtatcgtagtgccacagagacagatacatcagtgatcaatgtgttgattgatctatattgcaagtgctccagactgtcagcagctcggaaactgtttgattgcatggagtaccgtaatcttgtgtcttggacaaccatgatttctggttatatgcagaactcattcaatgctgaagcgataaccatgttctggaatatgactcaggctggctggcagccagatggttttgcttgtacaagtatcttgaactcatgtggctctttggcagcaatatggcaaggaaggcagatacatgcgcatgtcataaaggctgatctggaggctgatgagtatgtcaagaatgctctcatcgacatgtatgctaaatgtgagcatctaactgaagcaagagcagtatttgatgccttggctgaagatgatgcaatttcatacaatgctatgattgaaggatactcaaaaaatcgtgatcttgcagaagcagtgaacatattccaaagaatgagatttttctcactaagaccaagtctattgacctttgtttcactccttggggtgtcatcatctcagttagccattgaattgagcaagcagattcatggccttattataaaatcaggaacttcattggacctttatgctgcgagtgctctaattgatgtgtactcaaagtgttcccttgtgaatgatgccaagactgtattcaatatgttgcactacaaggacatggtcatctggaattcaatgatttttggccatgcacagaatgagcaaggggaagaggccataaaactcttcaaccagcttcttttatcgggtatggcacctaatgagttcacgtttgtcgcactagtaactgtggcaagtacactagcaagcatgttccacggccagcagtttcatgcttggatcatcaaagcaggtgttgacaatgatccgcatgtttcaaatgctcttattgacatgtatgctaagtgtggcttcattaaggaagggaggatgctgtttgaatcaacatgtggggaggatgtcatttgttggaactcaatgattacgacttatgcacagcacggtcatgctgaagaagctcttcaggttttccggctgatgggagaagctgaggtagaacctaactatgtgacctttgtcggtgtgttatcagcatgtgcgcatgcaggttttgtgggtgaaggattaaaccattttaactctatgaaatcaaattatgatattgaaccaggcattgagcattacgcttctgtagtcaatctttttggtcgttctgggaaactgcatgctgccaaggagtttattgaaaggatgccaatcaaaccagctgcagctgtttggagaagtttgctgagcgcttgccatctttttggcaacgctgaaattgggaggtatgccgctgaaatggcactcttggcagatccaacagacagtggcccttatgttttactgtcaaatatttatgcctctaaaggactctgggctgatgtgcacaacttaagacagcagatggatagttctggcacagtgaaggaaacaggatgtagctggattgaagtgacaaaggaagttcacacgttcattgtgagagggagagaacacccagaggcagaactgatatattcagtactggatgagctgacgagtctaattaaaaatttgggttatgttcctgatacttctgaccatactctgttgtgtgagactggttaa

SEQ ID NO: 52031 - DNA, 515 bp, Oryza sativa
  Clone ID: PAT_MRT4530_54367C.1
atgaggactgagtttgcccaccacccgtacaggggagaggactacactttctgctccgtccaggcctcaccgtgctgctacaacccgatgcaccacgcgtggggcaacgagattgacttgctgctggcccagcttcaggctcgtgatgtgcagtacgcacagctctcaggacagtacgacacccgtggtgataggatcgccacacttgaggcgcagctgcagagtagtcagcagcaggtcagggagttggaggagcagctcgagagcgcggagatactgggcactgagcctgcaccctgcttggtggaccccagtggggagcagtctacagtcaccgtggccgagcctatccaggcggtcgcagcacccccgtctcagctgggttctagcgaggagactccgatccagatcgactcagagttagaggaggatactgatcttggagctgagacagagccagaggaggttgagagggagcccggtatcacagactcgtcagaggacccgggtcccgg

SEQ ID NO: 52032 - DNA, 579 bp, Oryza sativa
  Clone ID: PAT_MRT4530_54368C.1
agtggatcccgggctgaggaatcggcacgaggcgttgacaaccgctttaatagaatcatgatcgcgatgccaactaccaggacttcttgcccctgtgcccccttctctactgcgacaccacaaagtgatctccggaaccctctccactgcacgacagagaaggtaatactattcaagtacaaatgtagatttgctggtaaatagtggatgtgattgtgaactatagtgtcacatatctattacgtgtatatgtgcatatccacatattaaggagctgcttataagtcatggtatgcaagttttttctgtaatttgaatgcatggatgctatttaaaatctcaatttgatgtgacaaaatatcaccgcctctccctgttatccaaacagtcacaatccctttgaataatatacttcaatatcatgaaacaaatcaataattgatggaatatctccttagaattggatcaataattgaacatagggctcaatctgatacatgattttcggaatatctccttagaattggaaatggcactgaaaacactatcagaaatgataacgttcgtttgcctgatgaa

SEQ ID NO: 52033 - DNA, 392 bp, Oryza sativa
  Clone ID: PAT_MRT4530_54369C.1
aactgaaacgagcagatatgataagaattacattttaaacggctgactcataagcatctcacagacaacacactagaacgatattactgagaacaataaagctatggagtgggaataagatattagcaatggacaactgcagctagaggaaacagggcttctagttcctatatctactgcagggctgcacagaggcttattgcgaagctacacggaaaaacaagctgcaggggacgaggggaacaatgcattattgggagatagctagactgggcagtgtaagaatagatccagtccactgagcgacaagatggctatggagtgcgcgagagctcacaggaacatggcacccaatcagttggcgattgcaatgaactttgagaccttgagtt

SEQ ID NO: 52034 - DNA, 1085 bp, Oryza sativa
  Clone ID: PAT_MRT4530_5436C.1
gtttccctttttccccgagcccggggaaaagggccggagaggaagcctccttgggttgccttaactcggtcaagggggccaagggttgagtgggctccccgtggaatcccacgtcaaatggaagccaaaggaggccaggcgggtttatccccgcccgggtggcgagtgacgcaaaccggcgaacggcggcgagatgaatcggggggttagcaccggaaaaaagaggaggccaaggggaatcgattcaacggaacggattagccggggaaagaacgacggcagctggcggcggcggccaatctcgccggcacgccgacgtggccgcgcgcgaaaagagcgaaggaagcacgggctcgggctcagctattgcggaaaggggttgcgacgcgcacgcggtgacgcgggacccgaaggtcaccggcgacgcacgcgccgcggcgctatgcggcggcggaaggggcgacacggcgcgagagcgagaagggaggccggcggccatggggcagcaagggggaggtcaaggggatccccgggagcgtggtggcgagagggattgacgagaggggagccgacggcggcggatttcgacggcgattgtcggcggcgagcaaaaggggaaatcacggcagggcgacgagaggtcgattcaaggtggcgagagcatctccgtggctcaagggtttcatttctggagtcggatggggtggggaggcgccgtggaggtccggcgacgagaggcggcctccgggagcaggcgccgacggcggcaaggccatggcgagcggcggccgggcttggggcggcgcctacgaaccaccggaaggctaaccgagctaccaagcgagttaaaggagggggagggcgagcgaggaagaggaacggagggctaccgcatcgggacagggcgccgtgacgagcggcggcggcgcgggagcaagctctctgggagcggccagggaaggggaagaagaggtgcccggagctcctcgtcacacgtccacgcacgcaccggcctccccagttgtagcgcccgttccgtcgtggcgcctagcgggaaaattatctcctaaaaaccctaattgcga

SEQ ID NO: 52035 - DNA, 2380 bp, Oryza sativa
  Clone ID: PAT_MRT4530_54370C.1
ggcgtacacattttcaccacattaatctccttccttctcatgctcaccactgctcttgcagaagataagaaaagctaccttgctagaggttcatctgtctccacagaggatgataccaagaccatcctagtgtcgcctaatggcgacttcgcctgtggcttctacaaggtggccaccaacgccttcaccttctccatctggttctccagatcgtcggagaagacggtggcgtggacggccaaacgtgatgctccggtgaacggcaagggctccaagctcaccttccggaaggacgggggcttggcccttgttgattacaacggcacggttgtatggagcaccaacaccacggccactggtgctagccgtgcagagcttcagaacagtggcaacctgatcgtcatggattcagaaggtcagtgcctctgggaaagcttcgactcgccaaccgacacacttctgccattgcagccgatgactcgagatacaaagctggtgtctggtttatacacctttttctttgacagtaacaatttgctgagtcttatatacaatggccctgagactagtagcatatattggcctaatcctgccttcttatcatgggacaatggtaggaccacttattacagtagccgacatggggttctagactctgatggttggttcatagctactgaccagctcaactttgaagcatctgatcatggtcagaaggatgtcatgaggaggttgacactggattatgatggaaaccttaggttgtatagtctaaacatgaccactggaaaatggtctgtcacttggatggcattctgtcaagtatgtgaaatacatggagtgtgtggtaaaaacagtttgtgcatttacaaaccagaccctcgctgttcttgtctcgaaggctttgagatggttaaaccaggtgactggagccaagggtgcagttacaaggcaaacgccacactcatttggaacaacaacgcaaacagcaagtctaaccacggattcatattcaagaagataccccacaccgacttctatggctatgacttgaactactccaagccagtgacactctggcagtgcaaaaggatgtgcttggacaatgctgattgtcaagcctttgaataccacaagggtatagggaaatgttttttgaaggccttgctttttaatggcaggaagtcccaagaccactataatgatttctatctaaaacttcccaagcaactattggcttctaaaccatcccatatctgcaaggtaacagaaaaagacgcctatccttcatcgcaaatgttcgagggtagcaattcgaaattcaagtttggatacttcctttcttcagcattgacattgcttgtagttgaagtgattttagttacagttggatgttgggctacatacaaatggggaagaagaccagagattcgagacgaaggctgcaccataatttccagtcaattccgaaggttcagttacaaggagttagagaaggcaaccggattttttcaagaagaactaggaagtggaggatcaggagcagtttacaagggaatcctcgatgataataggaaggtcgcggtgaagaaactaaatgatgtgatccacggagaacaggagttcaggtcagagctgagtatcataggacgagtttatcatatgaaccttgtcagaatttgggggttttgtgccgaaaagacgcacaagctcttggtttctgagtttgttgagaatggctctttagacagagttttatccaaccatcagagcgtgtttcctgtgctaccgtggagccaaaggtacaatatcgcacttggggtagcaaaaggattggcttatctacaccatgaatgtctggaatggatcgtgcattgcgatgttaaaccagagaacatattgttagataaagattttgagccaaagattgcggattttggattggtgaaattactgaatcgaggaccaagcacaaatatcctatcacgagtgcatgggacaagagggtacattgcgccagagtgggctctaaatcttccgatcacaggcaaggctgatgtttacagctatggagtagtgcttcttgagttagtgaaagggaatagggtttctagatgggtggttgatggtgaggaggaggtggaactggctgttaaacgaactgttgatattctcaaagagaaattagctagtggggatcaatcatggctgctggattttgttgactgcaggctgaatggagaattcaattattcacaggcagccttagtgctaaatacagcagtgtcatgtctggatgaagataggcgcaaaagaccaagcatgaacagtgtggtcgaaatcctactttcacttatggaataatggtcagtacggctat

SEQ ID NO: 52036 - DNA, 474 bp, Oryza sativa
  Clone ID: PAT_MRT4530_54371C.1
atgccgcgccgacgacgaggacccgcggtggagaggaaccggagggaggtagtggtggtggccggtgccggcggggtcgagccccatccctccggcggcgacgttcagatcgggagccgggaagcgacgccgaccgtgaaccctggcacggtgaagaggcgggcgatgaggtcacgagcgtcagcgtcggtggggccgcacaagccgtcggcgccgccgcagcgggaaccgaggcgggcggcgaggtccttggcgaggaggcgggcgacgggtggggtcccagatcccgacggcgtcggcgaggccggggctgaggacaacggcagcctaggtctctgcgtggcggggggtcctgggtggcggggcaatgccgacgaagagccggagcaggccgggggttggccgtggggcgccgctggcctcgacgaggtgcttgtggcggcggccaccgagtgcaaaccgatttgctactga

SEQ ID NO: 52037 - DNA, 393 bp, Oryza sativa
  Clone ID: PAT_MRT4530_54372C.1
ggggggtaaaaaggacggacaaagggcccaaagggggcaaattttaacgggcaaggcaacaccggaaagggccggggccaaaattttttttgtcccaaaaaagccaaaattcccaaaggccaaaggggaaagccccccttgaccccggcccattttttttgggggggagcctgggccccctgggccccgggggggccctttttccccacgtttttgaggaccccaacaccccccggtggcccaagggcccccccgggaaaaccaccaaaagggggggccccaaaaaagggccccccaaccaggggctgggggggaataatttaaaccaaaccagcatccccggttttgaggaactggggccccttttccagctccttaccaaaaagggggggg

SEQ ID NO: 52038 - DNA, 673 bp, Oryza sativa
  Clone ID: PAT_MRT4530_54373C.1
ccccgggctgcaggaattcggacaggcgcaacaacccctctatttttcttaggtacaatagtgtaagggttggtgtgccctccgtacaagtacaatacatcgccgaaaaaatcacgccacacttttgccgccttaccgatcgcacatactctgctcctgtgttggctgatattgaatacacagttggaaagcagtatgagctgaaaaggaagcctaatttcatcattgggtacttgccaattatgcttagaagtcatgcatgcgttctgaatggaaaggatgaagctgaattagcaagatatggtgagtgccctcttgatcctggtggttacttcattgttaagggaaccgagaaggtcattcttatacaagaacagctatcaaagaatcgtattattatcgacaccgatagtaaaggaagggtgattgcatctgttacgagcagcacacatgaaataaaaagcaaaactgtgatttttatggagaaggagaaaatttatctacagttgaatcaattcactaagccgatacctataattgtggttatgaaagcgatggggatggaaagtgaccaagaggttgcacgaatggtcggaagagatccaagatatggagatctcctatatccatctattcaggaatgtgcctttgagagaatctatacacagaagca

SEQ ID NO: 52039 - DNA, 624 bp, Oryza sativa
  Clone ID: PAT_MRT4530_54374C.1
ggagtaaatacaaggtttgtctaggagattgtctatctgtgtgaaatcatgaaagagtgagtgctattcttctgtcagtatcttgaaccactatctttgatcatggaccagcttagtacaatgttctactgggctgaaggtaaggggatcctgctgatgaggtgagatgtcctagtaaaaaattgagaagttgtgatggaggccttcaatgacatgaaaagtgatgccaaggtaatgtttccatcgatgaaagagtgttgtggacttagtgaatgcattacatgtgtcacgtatagttctcttgtatgttgtatggaacccgtatgttggaaggtaagggatctgccgagcttatagaattggtcaagacaagattgtgtacacatacaatctaatcatagaaggaagaaaggagagaaacaaatacgacagacaagccaagaaggatcatatgtatcaagcttgttacaaagaagtgatgttcaatgacaagatagaagcaatggcatcacataggagctcaaaggcatgtttgtgttgattcttcattttcaatgcctgtaaacttagagctaaatcttataatttgattattatcagattaaaatgtcatttcgattcatc

SEQ ID NO: 52040 - DNA, 2453 bp, Oryza sativa
  Clone ID: PAT_MRT4530_54375C.1
tcagatcccgatctccctcctcgatcccgtccatggcgtcgccgtcgcggccgccgccgccctccacgtctcccgcgcgcccccgcccttcgcgccgcccggggggaatggccccgtgccctcgtcgatccgcgcgccgcaggcaccgccccccggtgcgagaccgttccccgggagcccgcctcccccgtcgcagccgccgccgccgttcgcgcggcccgcggcgccggtgcagcagcaacctcctccttcggtggcccgcccggagtgatgccttcgcagccgctgcagcagcagcagcagcagcagcggcctgcttcggtggtccgccgtccggtgccccgcctgcgcaggcgcagcggacgcccttcggagggccgccctcggcgatgtcgcagggtccgctgccattcggtggcccgcccgcggcggtggcgtcgcagcctcctcctttcggtggaccgcctgtggcggcggcgcagcctcccccatttggcaggcctccgtctgcagcagcagcaggtcaatcggctccgctgggtggggctctgtttgcagcggcacagccacctccattcggcgggccacctggggcagcgccgcagccggcgcccactggtgggttgaggacgccgtatggagggccaccggcgccatcgcagcaggttccgtttggtggagcaccacagtggccaggaacacagcctccgccttttggggctcaggctgcgccgtcgtcccagccacctccgttcatgggggtgccagggaatgctccgccattcaggcctccgggttggcaagggcaagcacgaccaggagctatgtctgctggtatgcagctaatgcctggcggcatgctgcccaatgctctaggacaagggatgccgtccacaccctcaatgccatattctccacatgctggagcccaggtctctaccccatccaaaattgatcctaatcaaataccacgtccaatgcctgagacgtcagttgtcatttttgagacccggcaaggtggccaagcagctgttccaccggctgcgtccagtgaatttattgtcaaggatacaggtaactgcaatccacgtttgatgcggtgcaccttaaatcagataccatgtacaggagatatcttgacaacatcagcaatgccattggccttgatggtgcaaccttttgcacttcctcatccttccgaggagcctatccagcttgtggacttcggagggatgggacctattaggtgttcacgctgcaaagcatacataaatcctttcatgcgattcattgatcaagggaagcattttgtctgtaacttatgtgggtttagcaatgatactccaagggagtacttgtgcaacttaggtcctgatggtaggcgacgcgatgctgatgacaggcctgaattatgtaggggaacagttgaattcattgcctccaaggaatttctggttcgtgatccaatgccagctgtgtattttttcctcattgatgtctccatgaatgccatacagactggtgcaacagctgcagcttgcagtgcaatttcccaggctctttcggaccttcctgttatgaaaaggggctggcaggtttggttaataactcagtccctcattgccaccgccacctgggatgtcagcctccttaatgacaatgcagcacggtgggaaggtcctcgaacaatggttgggattgccacatttgattccgctattcatttctacagtcttaaacgtgatcagcaacagcctttgatgcttattgttccagacatccaagatgtgtacactccacttcagactgacctgattctcctgatttctgagtgccgtgagaatttggagcaattactggagagcatccctaacatgttcgagaacaatagggtcgctgattcagcatttggggcagctatgaaggccagtttccttgctatgaagtctactggtggaaaactactcgtgttccagtcagaaaagaaaaggcaatttatgtgcattttggcacttgcagtactaccatcagttggaattggttcattatctgccagggaagctgaaggtagatcaaatatttccactggagataaggaagcacataagctcctgcagcctgttgataagactctgaagacgatggcactagaatttgcagagtatcaagtttgtgtggatgtgttccttactacacaatcatatgtagatatttcttctatatcagttgttcctagtaccactggtggccgggtgtaccattattatccattttctgccctttctgatccagccaagctgttcaatgatctcagatggaatatcagtagaccccagggatttgaggctgtcatgcgtgtgaggtgcagtcaaggacttcaagttcaagactattctggcaacttctgccggcgtgttcctactgatattgatctccctgcggtcagtaactaa

SEQ ID NO: 52041 - DNA, 375 bp, Oryza sativa
  Clone ID: PAT_MRT4530_54376C.1
atggagaccggtcccacctgtcaccaggctttaggagtggcgtcacgcccgaccgcttcccttgagaagggcgatcgccctggcataacgccgggggctactgtcgtcacagaccggtcagatcacgggttaggtggcgactggcgcggcgccgcggcggggaggcccagggcgcagcaaagggcgcgggcggcagcaactgacggcgccgtggaggagggcgtcggcggcagcgcagaggagatgggcatcggcaccggcaaagaggagatggtcgtcatcgccggcgaggtgggggaggcggaggaggggaagggaaagggtggcagcggcggcatggcacgaggcggcgacaaaagaggttgggccccatag

SEQ ID NO: 52042 - DNA, 954 bp, Oryza sativa
  Clone ID: PAT_MRT4530_54377C.1
atgtctgtcaagaaattccacggtgaatgggaggagctcaagcgcaaattctgccatgctttatttccattaacccgtgtaattaattttcgattagacatcctctctttccgacggaatgagaaggactctctcggtgtagcctgggccagattctcattgttaactcaatctggcccagacttgtctttaccccaccatgtgttgttccaacattttcggtacggcttagacaaggactctgccgcaaatctcgatatttccgccggaggatcgttcgggcacaagacgactgccgaaggaagagagctcttagatttgatcttagagaacgattctttcggccgaagcgaagctatcccggaggtcgagattatctatgaggatcctttgcacgtggagtcagaacccaactcaactgccgaatccttattccagttgctggagccagaagaagaagaaattcatccttcggaaattccattccaattcagggttggtctttatgaagattatggaaacaccctaaattattccagcaaaacaaaggctcatcccaagcatgagccgttcgaggaggtgatgtttgtatcttcgttcgtttcttctgaacctatttcccatcttcatgaaactaaacaaccctcatcaccctcgatcaagcctaagccttgtccctctggccctcaaaacactgttcttgtttatcatcatgaaacaacccgattcttgcacgatgtatctcttgagaacgaaaatcttcaggccacggacaagcttaagacattgactctcgaggacgagagaaaacattccacatatgagcatgaaagtttctttttcaaaatcccccaggattcatgctcacataaggaattagtgtcacgtcgctttgcgaggaccacaaccatcttccggttttcatttctaacatatttagaagaatggttgtag

SEQ ID NO: 52043 - DNA, 510 bp, Oryza sativa
  Clone ID: PAT_MRT4530_54378C.1
atgaacaagagaacagataagaggaacataagagtacatattaagggagaagcaagtgtggttgcacaattaattgcacaggacacccatatcaagtttgatattgcgacctctgcaattgtctatgagggctccaggccaaccatgaagtttcttagagcaggcatcattatcgaagtacataaacacctcttgcttctccaaaagaaggcatctcagccctacagaaggaatgtcttaaaacactttggggaaccagatgaatccttgaagctgtcagctgacatgtctttgttcactatttctgaattgttgccacttcgatatcatctgcagatggaatggaccaatgacacgccgagaatcagcgtcgaatccacagaacgcaacgaaccaacggtggaaacccacatgaaaaaagaaaaatcccgaggtagaggagggatatccgtagaggagtatacggcccgtcccggagaggtagtctttgaatgtcatgaagatgaagat

SEQ ID NO: 52044 - DNA, 279 bp, Oryza sativa
  Clone ID: PAT_MRT4530_54379C.1
gcagatgccccgacgcttacctgttccccagcgacaacagcaagacgcacgcgtgcaggggaaacagcaactaccaagtcgtcttctgcccatagatcttctcacctaattaaattaacttgatcatggtcatggatgatctatggctaatattgcagcatgcgtgcacgcattagctggctgctatagatattgatatatatgtccgtgacgtatgcatgcatgtgtaatatatacttgttacgtggaaataataagataataatcttccatggatct

SEQ ID NO: 52045 - DNA, 234 bp, Oryza sativa
  Clone ID: PAT_MRT4530_5437C.1
ttttgtttaggacgaacagggcgactgtgtctcgggtactggtttgtgactgggaaggaccttttagatcttcaggtggttggcttcttttttgtagaataggtttttgtttttttactttatttcgtgcttttttagttattccgttcttttatgttcaggagttttggagggtttttgactttttgttctaatatcttgagagcctttacactttttttttttttttttgac

SEQ ID NO: 52046 - DNA, 935 bp, Oryza sativa
  Clone ID: PAT_MRT4530_54380C.1
ccggccgcggtcgaacggctgtcggccagccgccgccgcgtcggacgccgacggcaccactcgaatccttcttcgtccaatggctcccggccactcttactcctgaacctcccatttcaactcccgactcccgtcctatgaaagctccaaactcccgtctcctcctctacacgactacgtaggccatcggaacagacctgcgggacgggccgtatactcctctacggatatccctcctctacctcgggatttttcttttttcatgtgggtttccaccgttggttcgttgcgttctgtggattcgacgctgattctcggcgtgtctggatcacggactcggtttacaggagaggagaggaacgcggcctattcgtcggcagcgtctgctgcgggcagaggtctctgcagatgatatcgaagtggcaacaattcagaaatagtgaacaaagacatgtcagctgacagcttcaaggattcatctggttccccaaagtctgattcagaaagagtgacagcaagagcgaaagtgaaaaatgaaccatggacacaaaagggcagttactgccaatgctgatattggatttatggactatgttagttccaaatgtctgagtgctgctgaagtatcatctgatggcccatgcaaaacgcctttgctgaagataatgaaaacttgtgcatttacgagtgccttgcgatctaagcctagagtgaacaaaagtgcatctgtaaaatgtgctgctgatatggtagagaattcatctgagttctcaaatgggtcagggctgagatgccttcttttggagaagcaagaggtgtttatgtacttcgataatgatgcctgctctaagaaacttcatggttggcctggagccctcatagacaattgcagaggtcgcaatatcaaacttgatatgggtgtcctgtgcaattaa

SEQ ID NO: 52047 - DNA, 641 bp, Oryza sativa
  Clone ID: PAT_MRT4530_54381C.1
agccaagcaaggttactaggtagatacatcagaaccaacacatagtcaatctacagaagtacagctaggtgaagacttagatggatattgagagtggctgtgggtttgaatcgttttcctcttcattgagatccatatatgaggcgtgtctgtgttgaaattctaactgtgacagagaatgtctgatttaatcgttcgcttttgttattatacatgactaagaaaaacaaatatacaactcgaagagctgcaaggagaaagacattatggggtgaatgacagaaaaccattacaatagcaaattcttctccctacccctccacaaatctcccatgccaccatttgaaaaccaagtcttagtaacttttatagatttaaattatcttgaagccccaaagtccaaaatactaaaatctaccaatttatttcagaattttgcttttaacacaatgtctcaaatttacctgtattttaaaatgtgttgaggaaaaatgctcaatttcattcagttgtattcaacacatatggcttatggggctgctgtgtattaggcactgtaatgaaaacgagggattcttcaaagatcaaaactaacaccatccttaactctcatggagattatggtccagtctgtaagagag

SEQ ID NO: 52048 - DNA, 309 bp, Oryza sativa
  Clone ID: PAT_MRT4530_54382C.1
atggcggcgaggccatgccaagcggcggcggcgcttggggcggcttctacgaactaccggaaggctagccgagctaccacggaaggcggtttgggggaggaaccgaccttggacgaggcggtcaaggggctagctggcgggtggtcacgggcgcagaggagagtgggcacgggtggctgctcggcgcaggtgggccagggcggacggcgaccgaggacggtcggccaccacggcgggagcgcgcgcgggaacgagcgaaggcggtggcggtttgagcgatgccggcgggaaatcggcgtcggcgcgtga

SEQ ID NO: 52049 - DNA, 185 bp, Oryza sativa
  Clone ID: PAT_MRT4530_54383C.1
ctccgagcctggggggctttgggggcccaatactcatcttcctccggggggagtaaggacacaatcctatgttttcccgccggttgcagtcaaatcaaggcaatggtttccggttagcctgcggaagcggtaacgcctgtcacgcagttgtggtggcggagcaaaaaaactggtaaagaattggt

SEQ ID NO: 52050 - DNA, 603 bp, Oryza sativa
  Clone ID: PAT_MRT4530_54384C.1
gcacgcgcctcgcttcaaccatcaccaaatcccacacgcttcccaaaaatccaaacccaaattgcaacccccccatctccattgccgtcgccgccatgatcatcaagacgctcaaggcgcggatcctgtgcgcgctcaagtcctcgcttccggccgccgcgtccccgccgccgtcgccgaccaagccggggcgagccgccgcggcggtggtggtggtcgcgggtgacgcgttctccgacgacgcgtccttctttgacgcccacgagaccccgaccaagaacggggcggagccgatcgatgattgggagctcgtcgacgaggagggtcgggttggggttgccgcggcggcggcggaggaggaggaggaacagctcagggagttcccggcgaggtgcccgccgggaggggagggggcggtggtgctctacaccaccacgctccgcggcatccgcaagacgttcgaggactgcaacggcgtgcgcgcgctgctggagaacctcgacgtcgcgttccaggagcgggacgtgtccatggacaggggcctccgggacgagctctggtccgtcacgggggagaaggccgtgcccccgcgcctgttcgtcc

SEQ ID NO: 52051 - DNA, 1893 bp, Oryza sativa
  Clone ID: PAT_MRT4530_54385C.1
atgccgcccggcgcgcgagcaagacgcatcgccgcactcgacctgatcttcctcgtgtttctccggctcgccagcgcgtatcaacgaccatccgacgcgcatatcaactgcatcgacagcttctgtctcggcggctacacctgcagcgaaaccaccgccaccacgtcctgcaccgcctacctcaccttccgctccgaccccccgctctccgtcgcctacctcctcaacgcgacgccctccgccgtcgccgccgccaactctgtccccctcgccgtctcccccgtcgacggcacgcagctcctcctcgtccctgtcccctgctcctgcaaccgggccaccggctactaccaacacaacaccacctacgccattcaggaacttgataccttcttcctcatcgccaataacacgttccaggggctcacgacgtaccaaagcatcatcgccaataaccctgcaagcgaagctatgtctccagtgatcaacggccccctcgccgtgccgctccgctgcgcgtgcccctctgcgactacgggacgaataaacaatctgctgacgtacgtggtccaggagggggacaacgtgaccagcatcgcgcgcagattcaactctacgcacggcgacgtgcttgccgccaacacgttgttggtcccgctcgtccacccgccgcattcgcgagtggtgctcgcgaatactactattacttccacgactccgccggaatctcagaaattttacgtgtcgagtccctgcagcaatggcttgctggctggcttgggtatcggcgtcggatgcggcgtctctgcgtgggctgccgttcttgctgtgttcttgctatggcgtcgaaggcggcggcgccccgtcggcgacagctcaggcatggccagggagacccccctggtagcggctgtgcgtggcgcggtggagactctggctgcctacagctacgcggacatcgagacggcgacggcggggttcgcggaggagcggagagtggccgccggatcgtcggtgtaccgcgcggtgatcaacggcgaggctttcgcggtgaaacgcgtggccgccggcggcgacgacgtgcgcggtgaggtcgacgtcctcggccgcgtcaaccactccggcctcgtccggctccggggcctgtgcgcgaacggagacgacacctacctggtgctcgagttcgccgagaacggcgcgctcagcgagtggcttcaccccggcagcgcagccgcgtgtctccgccgtgtcctcggctggaagcagcgcgttctggtggcgctcgacgtcgcgggtgggctcaactacctgcaccacttcaccaaccctccctacgtgcacaagaatctcaacagcggcaacgtcctcctcgacgcgaacctccgcgcgaaggtctcgagcctcgggttcgcgcgcgccgtggccgtcgccgtcgcagccggagacgacagcatcgccctgatgacacaccacgtcgtgggcacccacggttacctggcgccggagtacctggagcacggcctgatcagtcccaagctcgacgtgttcagcttcggtgtcatccagctcgagctcttgtccgggaagacggcggcgtttgtcaccgacgatgacgggcagaacatgctgctgtggcaggcggcggacgggctcgtcgacggcgatggcgcatggttcaagctgagggcgttcatggaccctcagctgcaaggccactacccgatcggtgtcgcgtccgcggtggccgcgctggccgttcggtgcgtggcgcgggagccacgggcgcggccttccatggaggaggtgttcgtcacgctctcagcggtgtacaacctcacggttgattgggatcctcagaattacagcgcatcagcttctatggtcctcggtaggtag

SEQ ID NO: 52052 - DNA, 427 bp, Oryza sativa
  unsure (1)..(427): unsure at all n locations
  Clone ID: PAT_MRT4530_54386C.1
ggcgttcgtcaaagcaagaaacagtagtttgtgtgtgtggcgcgnatggcagcaggnaaagcgctgagggctggtgtnncgcacccgatcgcggncgcacgaggggggcggctngccgcggcacttaccacgctggnnaggggcagnnggcgcgaagnaaggacatnnctcgccgccggtgngagtggtaccggggtgtcccgggtggttgttgcgggcggctggctgcttggtgtgttgcacgtactgtctgacgtcccctggtacctcggtacgtgccctcatctgtgtccgtggtacgctacttgggtcgtctgccaacatctccgctcctccgtcaatgtgccttcctgagggcttctttctgcaaggagggcgccttcgcccgtgagtacggtggcattcaggagggcgttaacgactggaa

SEQ ID NO: 52053 - DNA, 1725 bp, Oryza sativa
  Clone ID: PAT_MRT4530_54387C.1
atgacggcccgtctgctggagagagttcatgcgaggccgctcgggtgcaccgacagcgacaagctggagatgtctctgcagctgacgagcgtgcgcgagcagtgcgcccgtctcctggaggcggtggaggcaggggagatcgccggccacgccgccgcggcccgcctcttcggcagctaccactccaagctgcgcgtgcttctcgccgtccacggcggcggccacctcgacgccgccgccgctcgccgtcccgccgcccgttcgaccgtaatgagggcgtgctgctactatcaacctctccggccaccgtgcccttccattcctcttggccataagccccagcagcatcatctctttctcagcagcagatcaaaagatgtcaagttgaggtctatcttagatgaggacaggcttactggtgctagaccatgctctaaagatcaggagcataaggggtggatgcaacttcggaacgcaatgaacaacagatacatcagagccttggacacaaattttgacgagagctttgttgattccattgtgtttgacaaaacactatacaagtatgcaattttgggttgcaaggtcaatgcagatggaattatgaacgagggtattatatcttccagtgaaagaaataaaattatccatgctcttgaaaggatagaagatgacattgagattggaaagttcaagtggagagatggtgcagatgttcatacaagtattgtggaagcacttgctgatatgattggggaccaagcaaagggtcttgccgtagaaagcaaatgtgacagttgcctcatgatactggaaacatggtccaagaactccattgatcatattatgactcaattgaaacaacttcaggctgctctcgttttgttagcaataaaaaatgatgggtttgttcttcctggtgagaaagaaattgagggcaccagtcttcttatgcgcattgtcaaagcgctagacagtgatgcttcaaaacttcgtaactgtcttggaggcatttgctctaccgatggtgtcatatttatgaggctcagttctcctgaagattacacactttccaagctttcttacattgcctggtttgcaaattcaatcaattatcgtattcccaaccttctaaggcaactgcttgagaaggttttgtccctgagaaacgctgaaacagccatatatgagacaaccctaggaaagttgagttctatcgaacagatgaggcgtcatggagatgttgctatctcaaaatgtctaaatcttagatttggaaaagcatgcggatcagtgcagacttgtgaaatcgaggatgctaagcaccatttattttctagcactaaatcagtggttgaaattctcgacctatctatacaacttgttaaaagcatctcgtttgatatggaaaaggcccaaaattgcctccccagaggctatgatgatattatgaggtttgcgcatttcctgacaacaaagggaatcgattcggtaacagcttatgccttggtccatctgtgcttggataaacagctccaaccttcggagctcactctagaaaaacgcgagctaaagcagatcgattttcactgtgagcgtgctcattatctcctggaatacaaagggggcatctttggtgattccactgatctggatgcctgcaagcagatgctgaaatggtgtagcaaacttcggattgatcctgctgcaaccatctgttcttga

SEQ ID NO: 52054 - DNA, 283 bp, Oryza sativa
  unsure (1)..(283): unsure at all n locations
  Clone ID: PAT_MRT4530_54388C.1
gcacgcaagcaactccttcctcctcttaaccacgccctctctcaccgtcgtcttcctcaattccctctacccctgaccgcccgcacgcgcgcgctgcctagctaacacaaaccgccattgcttcccctnctnctccttgccgccgtgcttagcttgctgtttgtagcttgttggctagagaggtcgtcgtacgccggtngctggcgatcgccggccggccggtggtccatgactaacggtgccgcgagctgccagcctgcaagcgcgggtggacatgagccgg

SEQ ID NO: 52055 - DNA, 630 bp, Oryza sativa
  Clone ID: PAT_MRT4530_54389C.1
gttttaagtatactacctgaacaaacccccctgcctaccgttgaagacaccataagatggcgatggacaaatagtggcatatacaacacacaatcggcatacatggcacaattcaattggaggattgactcagcagtggcaaagctaatatagaaaggatgggcaccgtcaaaatgcaaatatttcacatgactccttcaaaacaaaatctggatggcggatcggctgcaaatccgtcaatggccgaacaactatttatgtcagctttgctatgaaaaccttgaaacggcacaacaccttttcaaggactgcaccttcgcacaccaaatctgggagaagatctttcaacagctgggacatgagacactaaacacatacgatggcgatgagccactgcttgactgatggatcaagtggacatcccaaggggaaaaacacaaaatgaaagcaatgaaatcaattcatatgatggtggcttggaaaatctggtgtgaacgaaacaaatgactgttccgcaatcaggagactgaattgcctcaactagtgaccaaaatcacatatgagatcaaggtgtggattatgtgcggcaccaaagatattgcgagaatgtcccaataaaacacatgcgag

SEQ ID NO: 52056 - DNA, 330 bp, Oryza sativa
  Clone ID: PAT_MRT4530_5438C.1
atatatatgaaaaaataaatggagagattacgaattcaagaatcaagctgaacctcaacacattacgggaactataccgctaatacagaatatgctaatctatcctgactaacgacgatgtcgaaccgtggttacaagggccataatgccatgcgaagggacatacacacagcctactcacattgagatttaatttgtacgacgcagaagcgtaagaagcccttactccgttatatattacaggacgatttagcatcgtccataggtatgtatatgttgacgaatgtacagatatatatatatgtgtgcgcgcgcgcgcgcctagactca

SEQ ID NO: 52057 - DNA, 441 bp, Oryza sativa
  Clone ID: PAT_MRT4530_54390C.1
atgaggtccgagctgggggagggcagtgacaccctgccagagctcatcgtggagccaatggcggcgtggtcgatgtccttcatggggtcacacgagtatctggcactggaggtcatcaagagggaaggccatggcagcgccgtcgactggtggatgtttagcttcttcctgcacgagctcctctgcggcaagacaccgttcaaggggtcaggcgaccgcgccgctgttcaacatgaccagccagcagctgcgcttcccggagaccgccgccggtgcaccctcaacccagtgcctacagcgccggccaagtcacaggtcaccgcaacgcagggatacaactcttcgatagccatgcggtacgcactccgactccggctccggctcacgctagtgaagcatcgcgtgtacgacaagttgaatccactttcacccatgggttga

SEQ ID NO: 52058 - DNA, 288 bp, Oryza sativa
  Clone ID: PAT_MRT4530_54391C.1
atggcgaccgaccacatcggcggggaagaaagggtggaggcgctggcggccgggaggtgggggaggcgtcgatggccagatccgtgtcccagaggccagatccgtgtcccggaggcagactcggcggttgtcgtcggtggtcatcgtcgtcgtcgctcgagcttagcgtcggtgaccccgagctcctggaggccggcagtcggggatggaggccgcggcgccaccgcccacctcctcctcgcctccgcacgctgtcgagccctcctcaccgctgccatgcatcgctga

SEQ ID NO: 52059 - DNA, 323 bp, Oryza sativa
  Clone ID: PAT_MRT4530_54392C.1
gatctctgttcagggtgtactacgaaacagagaacaaaaaaaaattttacccaccacagaggcataccactttattttgaccacccccagggccaaaacttaataatttttacagaggctaccgcaaccaccttactcaaccacggacaaattgctccgacggccaccgagaaggacgagaaaaaccacaaggggacattctaaccagaacaggaaaaacacgggaggaacccccagggggaagcgcttgggataaaagcaaactgggcagaacatggactttggctgagcccaccgcaacagctgcaaaaccacccaggatt

SEQ ID NO: 52060 - DNA, 1321 bp, Oryza sativa
  Clone ID: PAT_MRT4530_54393C.1
atgagagctctccccatggccgccggccgcgccgccgccgtcgccgcctgcgcctcgccggccgtcccgcggaggtcgctgctcctctccaccgccgccgcagcgctgcagccggagccggtgaggctgacccggggcgcgagcgccgcgcccaagctccgggcctcgccgccggacgccgcgcaggcggcggcggccttcggcagcaaggaggaggccttcgcctgggccaagagcgacaaccggcggctgctccacgtcgtctaccgcgtcggcgacatcgacagaacaatcaagttctacacggagtgccttgggatgaagctgctgaggaagcgcgacatcccggaggagaagtacaccaacgccttcctcggctatggcgcggaggacaaccacttcgtcgtcgagctcacctacaactatggcgtcgacaagtatgacatcggggcaggtttcggtcactttggcatcgccgtcgacgatgtggcgaagacggtggagctgataagggcgaaaggagggaaggtgaccagggagcccggccctgtcaagggcggcaagacggtgatcgccttcgtcgaggacccagatggctacaagtttgagatccttgagaggccagggactccagagcccctgtgccaggtgatgctccgtgtcggtgatcttgatcgggccataagcttctatgagaaggcctgtggcatggagctgctaaggaagagagataaccctgaatacaagtacacagtggcaatgatggggtatggtcctgaagacaagaatgctgtgctggagctgacatacaactatggtgtcactgaatatgacaaggggaatgcatatgcccagatcgcgatcggaaccgacgacgtctacaagacggcggaggtggtgaagctgttcggagggcaggtggtgcgggagccagggccattgccggggatcaacaccaagatcacgtccatcctggaccctgatggctggaaatcggtgtttgtcgacaacatcgactttgcaaaggaactggagtaaacctgttcagaaaccgggtgccagttctgtttgttgaatgactagtgaccagagataaatcttgcttggttgcaatcactgtaaatgagctcgaactccatgaccaagaaattttggtgtctgaataaataacagagcatgaggtttcgtcccaaaaaaaaaaaaaaaaagcacaaaacataacttataggaatagaagaaaagacctagctacctgatcttttgtactagcttgactaattaataatgaaatatattgtttgaagcaatcaaccagttgttt

SEQ ID NO: 52061 - DNA, 494 bp, Oryza sativa
  Clone ID: PAT_MRT4530_54394C.1
cccacgcgtccgggccgcgccgccgacgacgccgcctgcgcctcgccggccgtcccgcggaggtcgctgctcctctccaccgccgccgcaggtgagcccccctgtcgacccccggctgattcctcctctccaagcaaattcagtcagatcgatcggtcagctgtacgtcttcttggatggactgcagcgctgcagccggagccggtgaggctgacccggggcgcgagcgccgcgcccaagctccgggcctcgccgtcggacgccgcgcaggcggcggcggccttcggcagcaaggaggaggccttcgcctgggccaagagcgacaaccggcggctgctccacgtcgtctaccgcgtcggcgacatcgacagaacaatcaagttctacacggagtgccttgggatgaagctgctgaggaagcgcgacatcccggaggagaagtacaccaacgccttcctcggctatggcgcggaggacaaccacttcgtcgtcga

SEQ ID NO: 52062 - DNA, 2248 bp, Oryza sativa
  Clone ID: PAT_MRT4530_54395C.1
ggggggatcagaggaagcaaggagatcgagagacgcacccaatctcccaatcgcctcctcctcctcctccgccctccgtcgccgaagatttgccttgcctccgtctctctctttctctcccgatggaccagctcgtcaatttcatcatccgcccgcccagagctgagtacagtccaaatgatgatctattggagcaggaattcatgttgaaaggaagatggtttcagaggaaggatttggaggttgtaaatggccagggcaagaaattgcaatgtagccactacatgcctgttgtgattcctgaaggaaaagctcttccttgtgttatatactgtcatggaaacagtggatgcagagccgatgctagtgaagccgcaattattcttctaccatcaaatattacagtctttacactggacttttcagggtctggactctctgaaggagaacatgttacattaggctggaatgaaagagaagatctgaaagctgttgtcaatcatttgcggacagatgggaacatatcttgtattggtctgtggggccgctcaatgggtgcagtaacaagtctgatgtatggagcagaggatccatcaattgctggaatggttcttgacagtccattttctaacctggttgacttgatgatggaactagtggatacatataaatatccactaccaaaattcacggtgaaactagcaatacaacatatgcgaaaggttgtcaagagaaaagccagctttgacatcatggaacttgataccattcaggtagcaaagcggtgctttgttcctgctttgtttggacatgcgactgaagatgattttatactgccccatcattcagacaaaatctatgaatcctatgttggagacaaaaacattattaaattcgatggggatcacaattcaccccgtccacaattttactttgattccataacaatatttttccataatgtgctaaaccctcctgatgttcctgatgaccattatttcctgacacctcatggaagccttggtcagggtcattgggatacagaacatgacatagagtataggttcgctcaatcaccaacagcccgcacagctaccacagaagatgccattgcgcagttacgttctagaaggctcatgagtagaatggaggtcccaactggtgccactgcagaagacagggctgacagaaatgaggtaatggacagtgataatggtccttcctcttctagtgtatctactgcaactcctcctaatggccgcaatggaaggctcctgactccaacctctgatgatggcgagtatgtggagtactcatttgatagtctatcagatatgccctacactgaggaagatgaggatagaatgctaatgcaagcaattatggagtccttgaaggatcttgaactgtcaaatacaaaagctgcgcaatctgccgcatctgatgctgcatccaaagaaaataaagaaaatggttgcaatggtgcaaccgtgacagtattggagccagatgcatcttccacctcggcgcgtcccactcccacagatgctcctggcaaggatgtaacaacctgcagtactaaagcaaagtcacctgaagtgcaaagtgcaagcaaccacaccacaaacaacgccgcttctgtgaacacctctagttccttagagtccaatgcatcaacccatgttacgaacggaaaatccacctcgtcggaatctcagaaaccaacacagaacgccaatggggaggatggtacaagagcaaccctggtggtacagaagagccggacaggcagcctaatggatggactgacgcacaaatggggttccttgttcaagaacaatgactaagacaagcaaaagatatacgatgacgcccgttgacgatttatgttattgtgtgttaatatagccatagagctgccgcctctggccgcacatgtccagcttgattggtttaatttacgtgtaaaatgagaaaggaaaaagggatatactgtacaagtggtgtatatatacagctaggatggtagtgatcccattgattgtgtaccatgtgtctctcactcagcactgcgttgcatttggtgaattggcaggcttttgttacttgcaaatatggtgtgaagtgggtgtgcgtgtgccaactcgttgtttcttgcagctgtaaatttttgacggaaagatcattttttgctccagctgtgacaatttgggccattacgtttacacctatataaaagactggagcc

SEQ ID NO: 52063 - DNA, 1611 bp, Oryza sativa
  Clone ID: PAT_MRT4530_54396C.1
atggcgcccctcccggtcgtgggaccatggagagagaagaaggagtccaacagggtatctggatgcgtcggattccgactccgggatggcctgaagtcgcgttatatccccttccagtgcccttcctctcatagcaaatggcggacgaggtggttctatcttcagatagaaaattcggatcctgtctttgttgttcctgaggaacaaccagacaagatttcgtcttggaccgcaaagcccaccttgaccccttcccttcagtccttcatcgatgttatcgacgatctccgagtacgaggtttgtcggggtatgaagtcgctgctgacttcgttggtagacggatccagtcgctccaggctcgagcccatctagcctttgactattctggaccggaggacacgacccaggtttctcctcggggtctgagcagcgaagccgtgggacgtcgtgtcggccaggtgatgatcagtggcccaacgatggcgagcaatgtccccgttctcctttgcgagaagggggcggccgaacgcgacgctgccatcaatgtggcggtgtcactaaaagagaaggtcgccaaggaggcgtccgatgctgctgctgtcgctgccacaacaagtggtggcgacgttccaaaaaaggggaggaaattctcctctgtaatcggacatcgtcgaaaggcacctaccccctcgccttcttgtagggcggcgcgggcgaaggcggcgcaggacgggtctggagggacttccagcgcgtctcctgctgtagcctcgacggatgtcgtggtcgtgcccgggagccacgaggcgacaccaagcggcccagccagcgatctcgtggctggtcatggttcgccggctgccgtcctcacctgggaggagctccaggttgagatgtggcgcctcctcgaggctggtgctcgcggcattggccgcgagatcatggaggtgagagcggcggcggcgtcgtcgtcggcgaacgagcgcgccgaccggctggcacacgacttggcggaggctcgtgaggacctcaagaagatgaggaaactggtggccgggaatgagcgacaacggcaggggctcgagcaccgtatgtcggagctcgagaacaacttatcggaaatccgtggctcgttgcgggtcacctatactggtctgcaccagctcgccggggaatgcggtatcaagtctaccatccccgcgaatcccaatgagttctcgctgacgtcttctcttgcggagctggcggcggcgatggaggagattccctccaagcatgcggccaggatcggagaggagacgtccaacgggaactacaccggggcatgccacgtccttgcagatgttgatgtcgaggatgtccagcagcgtgggcagcctgagtcgccagcgatcattccggctcttgcgtttgagccacacgcgtcgccggacgatgtagatcagattttacccgcgagaatggggatggcgatgacttccttagatctcgagagtgcgcttgctggccaagatcgtcgtatccaatattggaagatgaaatttgaagtagcggagctcgagagaactatgctggaagtaaagaaagagcaagctgtggaaacgctctga

SEQ ID NO: 52064 - DNA, 1341 bp, Oryza sativa
  Clone ID: PAT_MRT4530_54397C.1
atggatcttggaaaatcttcctccaccagcgcgtcgctgaagaagcttcaggaggacggtgcccttcccggtcgtgggaccatggagagggaagcaggatgtactgaaccccagcctgtcctaggtcgcatggttgcgattgaggactacattctttgcggttttctccctccaccttccgaaattcttctcttgattttgaacttctatggtctttctttgctccatctgaaccccaattctattgcctttcttagtattttttcgcatctttgtgaggcccacattggggaacaaccggacaagatttcgtcttggaccgcaaaacccctcttgaccccttctcttcagtccttcatcgatgttgtcgacgatctccgagtacgaggtctgagcagtgaagccgtgggacatcgtgtcggccaagtgatgatcagtggtccgacgacgacgagcaatgtccccgttcccctttgtgagaagggggcggccgaacgcgacgatgccatcaatgtggcagtgtcactgaaagagaaggtcgccaaggaggcgtccgatgctgccgctgtcgctgccacaacaagtggtggcgacgttccaacaaaggggaggaaattctcctctgtaaccggacatcgtcgaaaggcatctactccctcgccttctcgtagggcggcgcgggcgaaggcggcgcaggacgagtctggagggacttccggcgcgtctcccgctgtagcctcgacgagtgttgtggtcgtgcccgggagccgtgaggtgacaccaagcggcccggctagcgatcccgtggctggtcgtggtccgccggctgccgtcctcacctgggaagagctccaggttgaaatggggcgcctcctcgaggctggtggccgcggcattggtcgtgaaattgcggaggcgagagatgttgatgacgagaatgtccagcagcgtgggcagcctgagtcgctggcgatcatcccgacccttgcgtttgagccacacgcgtcgccggacgatgtagatcagagtttagccacgaggacggggacggcgacgacttccttagatctcgagagtgctcttgctggcaaagatcatcgtatccaatattggaagacgaaatttgaagtagcggaactcgagagaactatgttggaagtaaagaaagagcaagctgtggaaacgctccgaggtcgtgaggtgtggttcaactcgtacttaaagagttgctgcacgtccatggccaaggatctgacaaggccttatcggctctgggcgtccccagccgaagatcccttaggttcctcggaggccttgtcaagacggcgtaaagggacatga

SEQ ID NO: 52065 - DNA, 1086 bp, Oryza sativa
  Clone ID: PAT_MRT4530_54398C.1
atgtccccattcccctttgcgagaagggggcggccgaacgcgacgccgccatcaataaagatctttcccagtcccacaacgagtggtggcgatattccaaaaaaggggaggaaattctccgctgtaatcggacatcgtcggaaggcgcctaccccattgccttttcgtagggcggtgcgggcgaaggcggcgcaagacgggtctggggggacctccagcgcgtctcctgccgtagcctcgactgatgtcgtggtcgtgcccgggagccgcgaggcgacaccaagcggtcctgccagcgatcccgtggctggtcgtggttcaccagctgccgtcctcagctgggaagagctccaggttgaaatggggcgcctcctcgaggctggcgctcgcgtcattggtcgtgagatcgcggaggcgagggggctcgagcaccgcatgtcggagctcgggaacaacttgtcggaaatccgtggctcgttgcgggtcacctatactggtctgcaccagctcgccgggaagtgcggtatcaagtctaccatcccggcgaatcctgacgagttctcgctgacgtcttctcttgcagaactggcggcggcgatggaggagattccctctaagcatgcggccaggatcggagaggagatgtccaacaggatctatatcggggcgtgtcacatccttgcgtgtgtgaggttggcgcaccctgaactcgatctgcgggagatcttggaccagggggaagctagcgacgcgcgtaaggatgtgatggaagaagtcggcgatctggggaaatctgttctcccactttttgaagaagatgttgatgtcgaggatgtacagcagcgtgggcagcctgagtcgccagcgattattccggctcttgcatttgagccacatacgtcgccggatgatgtagatcagattttacccgctagaacggggatggcgacgaattccttagatctcgagagtgagcttgctagccaagatcgtcgtatccaatattggaagacgaaatgtgaagtagcggagctcgagagaactatgctggaagtaaagaaagagcaagctgtggaaacgctctaa

SEQ ID NO: 52066 - DNA, 378 bp, Oryza sativa
  unsure (1)..(378): unsure at all n locations
  Clone ID: PAT_MRT4530_54399C.1
cggacgcgtgggcggacgcgtgggggggtgtgtgtgctcggctactccggtgggtcgggtctgggcggggtgcgcgtggggatggggtgcttccagtcgacggcgaggcgtccgcgcccggggtacgaggaccccgtcggcctcgcctccgagaccgcctttagcgtaagtgaggtggaggctttgttcgagctgttcaagagcattagtggttctgtgatcgacgatgggctcatcaataaggtgaacatctaacttgccttgtttattttcctaaggaaggaaaatcttttcgctaatcggatatttgacctttttgntgtgatgatttggggggtcatcgnctctggtgactttgctcgagctgtatatgttttt

SEQ ID NO: 52067 - DNA, 346 bp, Oryza sativa
  Clone ID: PAT_MRT4530_5439C.1
tttgttcacctcccccatcgccggcttcccctgggcgcacggtgccactacccgagccctgccccgaccgtcgtggtcatgctccttttcggaaaatgcaataggcaaattaagctatctggtcacatggcagcctcctcaagtctgctgttctgcgacacatcagtgctgcctaactacttatattccctgccgataaattaacctccatgccagtattatctgcttaaatagaggagagtggatatgagactgccactgtggcaggcttcatttacatcattggcatcaaatactcttagaacttgcctttggtgcactactgaagacctctgtcctatgatgc

SEQ ID NO: 52068 - DNA, 607 bp, Oryza sativa
  unsure (1)..(607): unsure at all n locations
  Clone ID: PAT_MRT4530_543C.1
gcccgccgccgcctctnctcgtccggaggcccggagcccgttcggtgccgttgccttcctccacgcgcgggacggtgctacctacctgcccgccggccgcttctctccgtcgaaccgcaccaccgctttacgaacgcctccagccggatagcccacggcgattgccatcttcctccctcgtgcaggaggccgctgctgtcattcctcgtgaaggtggctgcttgacatccccaggtgagatatgtggggtgcagcattgctggtgattcaagattagaaagactaaaatgaaccaagaggccgcttaagaaataccatagaacaaccaaagacagaacaatagagtgaagacatgctgctttctgaagggaatttaattctgggggccgatgtgtgtggaagtagttagttttgcctgatgtatgtagtctttctttgtaatatgtactatgtatagcctgtacatggttaagagtttgcaaggattgtagtccagatgctataaatttgaaacccatttttttggttcaaattgcaaatatctgtacaatgcagtttttttttttatctgaaataagtatgacgtgtaaaaaaaaaaaaaaaaaaa

SEQ ID NO: 52069 - DNA, 300 bp, Oryza sativa
  Clone ID: PAT_MRT4530_54400C.1
gatcaacatttggtggcatcactacaaagataagcaatgttagtagccggcttcctacgatcaatcatatcctcgcgtcaattagaagaaagaagtcgatggacacaatcattctttcacttgtcgcgtctgtctgcgcctttcttattctcgtctactggttgtcaaagtaggggctgtcaacttgtcatagcaaaggcattagggtgttgtaagtttggatcacactgtcagtgcagataatcgagattggtgtttgtacaatattgattcaatgttatcctgttttgatggttcttc

SEQ ID NO: 52070 - DNA, 1268 bp, Oryza sativa
  Clone ID: PAT_MRT4530_54401C.1
ttttgagggagggaagagattattacatatgtgttaagagcagaggccattgagatggttcttttcttttttgtttttcaaatacgacgattcttctaaccagtttttttttttttttttttgacactggataacaacattatggcaccaaaagtattatatctacaatacacacagtaatctatctaaacaaactgtagcaggtgataatggaagcctggcgaaccttgggcataataatataatcagtagaattgcatactgaataaaatataaatatttacattattcatactgcaaataaggagaagtgcacctgtgccaatcaaagttcccacgcaaacaccaagaaatatagccttgaaggcgtgcccaagcgcattgagcagtgctccagtgctagagagacatcaatccgtggtgtttgtcgaaggcgttcattggcaaagcaaatcccaggagaatgatagatacatccaacccctgaagtataatcttgaagtaaacttgacagatcaagtaacaccatgaggaaataaacgagcatcgctcctctagaaccgccatcagattttggtgatcttgtcagctttcacaagaggattctgtttggcaatctgctccctcccgacctgcttgtaatcaaatgtgcatttgtgtgaatcggcatagcggtgcattgaacagaaggtgcctccgcagcggcacttgaatcctgtcaacccaaccttcttccggcatgataagcaacggttactgggtggctttggtgtatcctcctccattacttgtttcccatctgcaactgaaccagaccctccatctgtgacttctgtcaccaaaggtgtggaagacaatgaagcaagaggtttcttctccacaacagtggccactgtcttggccttaacggtgtccctataacactttgagcacatgttttctgtcatccggctgccaaagaagccacagttgttaacgcacaatataggggcctcaggtgtgtggactccagtctcctctgcctcctttttccagctctcttgtgccattgtaaggaacaccaactgcaccgcgaggaggacgaggggttcgccggagaggcccgatcgatcggatctgcggggggcagcctacgcggattctcctctcctctcctctcctctcctctccttccccaacctgttcttccaggagagaacggagttttttttttttcctttctgcttttcgcgtcgccttctctttttttttttccttccttttttttt

SEQ ID NO: 52071 - DNA, 234 bp, Oryza sativa
  Clone ID: PAT_MRT4530_54402C.1
atggctggtcccccaaaggagacggtgcagggcactgagaggctgattcggatccatgagatgaggcggacccgacaacttgatttggtgagtgcatccaactttcttggggacgaaaaccttgaaagcttattggtgcagattgtaaccagcttgcttgctgctgaaaaccttgaaagtttggaggagaactaccatataggtgatagttggctggaggaccaaaagggttga

SEQ ID NO: 52072 - DNA, 387 bp, Oryza sativa
  Clone ID: PAT_MRT4530_54403C.1
agggggctcttatttggacgcttttttttttaaatgggtcatgggttttccacacacatttccctttacattcccccggtaaccttgacccgccaaaaaaacaagggcaaaaattaatcttccggccgccttcatattttaactccacccttttttcagtgagacttactttcttaacccccagggcccgtttcaacactggttttacccccggcccccctttttaggggccccggggaaatgggccccttcttcccgtttcccacaattggaaagggggggcccaaaagaaaagggaaaatggatttgggtaggaaattgccaattatactttacacaattttcgaaccccaaatggggatttcaaagggaaaaaacccccgggga

SEQ ID NO: 52073 - DNA, 1817 bp, Oryza sativa
  Clone ID: PAT_MRT4530_54404C.1
gctaatcaaccgacggcatcattcactcctagctcttactcttttatatccatacaattaaaagaatatgtttgatattttttctaaatgataacgtcacgccattgttcatatctaaaataagaagatacaaaatcagaaaagaatacgatcgatcatggcttggatttgttcttgtagtcgtatcgctgcgcaaggtagacgaacacggccacctccagagcggcgagcgcggcgagcaaccagtagaagtagtccaggtgcgcgcggttgaggtcgtcggcgaaccagctctctccgccgccgctcctcgccgccgtcgcccagtcgatcgccgccacgagcgcgccgctggcgtagctcccgacgcccatcacgccctgggacacggcgagccccacgctgtggagctcgccggccacctggtcgtagaagaactcctccagcccgatcacggcgagcacctccgcgacgccgatcagcacgtgctgcggcaccagccaccacacccccatcggcaccgtcgcgcccggccggttgaccaggccggcgtcgcgggccacgcggagccgcctcgcctcgacgagcgccgccacggccatggcgaggcagcccgtcgccatgccggcgccgatgcgctggagcattgtgatgccgccgccgccgccggtgaggcgcctcgcgagcggcaccaccatgcggtcgtacaccggcagcaccgcgatgtaggtgaagctgacgaggcactgcagccccgccgacggcaagacgaggccgccgccgccgccgctgccgacgcgccgatccattgtgctgctctgcttggtgaacagggtggacacctgcgagacgacgacggcgaacactatgctgctcagccagatcggaagaagcttcacaaggaagaatcccctgccgccatcgccatggccatccaccaccaccaccacctcctcttgtggttctagaagctgttcggcggcatcctttcggtttcgggagaagaagaagaagaacctcgccgtccacgcacgacgcgccgcggcggcgccgtcgatggcaggtcgctcggcgcggcggtacgtccccgtgccgagcaagaagacggcgaggtagagcaccatggtggcccagcacgcggcgaacccgacggtccagccgacgttctcgtcgacgtagctgagcaaggtggtggagatgacgtagccccaggatatggagaagtggtaccagttgaagtatgagctccgcgacgcaggccgccgcgcgccgccgccgccgccgccatcgtcgtcaccctctctctcgaactggtcggcgccgaacgcctcggcgcacggcgtgtggaagccctgcgccagagctagcaggtagagcgcggcgtagaagacgacgacgacggcgccgccggcggacgacgacggcggcgacgtggctcgctgcgccgccatggacgacgacgacgccgtgagcatccccaagctgagcaggtagagcgcgctggcgacgatgacggcgcggtaccggccgaggccggaggagtcggcggcgaggccgccggcgagcgtgagcaccagcaccgtcccgccccaggcgttcgccgcggtggccgccgccgccgtggacatggccatcgggccggtgaggtacagcatcaggttgccttgcacgccgaagaacccaatccgctccaagaacccgacgacgacgaggaagaaggcggcgcgccaaccgccgcggcgggcgtcgccgtcgtcggggtcggcggcggcggcgcatggctcgggacgacgtgcaaggaagccgccggactccat

SEQ ID NO: 52074 - DNA, 1063 bp, Oryza sativa
  Clone ID: PAT_MRT4530_54405C.1
caacttgaatctatggagagttcgatcctggctcaggatgaacgctggcggcatgcttaacacatgcaagtcgaacgggaagtggtgtttccagtggcgaacgggtgagtaacgcgtaagaacctgcccttgggaggggaacaacaactggaaacggttgctaataccccgtaggctgaggagcaaaaggagaaatccgcccaaggaggggctcgcgtctgattagctagttggtgaggcaatagcttaccaaggcgatgatcagtagctggtccgagaggatgatcagccacactgggactgagacacggcccagactcctacgggaggcagcagtggggaattttccgcaatgggcgaaagcctgacggagcaatgccgcgtggaggtggaaggcccacgggtcgtcaacttcttttctcggagaagaaacaatgacggtatctgaggaataagcatcggctaactctgtgccagcagccgcggtaagacagaggatgcaagcgttatccggaatgattgggcgtaaagcgtctgtaggtggcttttcaagtccgccgtcaaatcccagggctcaaccctggacaggcggtggaaactaccaagctggagtacggtaggggcagagggaatttccggtggaccggtgaaatgcattgagatcggaaagaacaccaacggcgaaagcactctgctgtcgcgatctcgcgaggataacaaggacaaggagcagcaagcacaaggaggaataggggcaaccgtcggaaggtggaggtcatggaggagttcgctgggcaccaatggagacactcctctcgattcggctgctggcggtagatgggggttgcgggctcgcgaccacgatggtctagctcctggcagcaatggactgggagcgcgtgaggccaacaaggcgtacgacgccttcttcgtgcttccgtgtgaaaagtcatttgctgaccatgtgggaatgcggggatcccgtcccgtcccgactcccgacgggatcccagtggatagaaatccaaaaattataatattgcttgaattcattggaacttga

SEQ ID NO: 52075 - DNA, 1716 bp, Oryza sativa
  Clone ID: PAT_MRT4530_54406C.1
atggccatgggtggcatccggtgtcccgtctgcttcgccgccatggccgccggccaagccatcttcaccgccgagtgctcccacaccttccacctccgctgcgtccccggcggcgccgccgcctgccccgtctgcgccacgccatggcgcgacgccccgtcgccgctcacgacctcctccatccccgccgcgtacgacgacgacgacccggtggagccggtggcgacggcggcgcgcaacagcagcggcggcggcggcggcgtgctggtgctcaagacgcactgcgagtacccggcgctctcgcgcggcgccgcgcgcgacggcttcgccgtgctggtgcacgccaaggcgcccgcggcggcggccgaggcggcggggcgcgcgccgctggacctggtcacggtgctcgacgtcagcacgagcatgaccggggacaagctggcgctggtgaagcgcgccatggggttcgtcatcgacagcctcggcgccgccgacccgcctcagcgtcgtcgccttcgccacgccgacgcgcgccgggtgctcccgcggctccgcctgacgcgcatgtcggaggacgggaaggcgacggccaagcgcgcggtggacgccctcgtcgcgaacgggaacaccaacatccgcgacggcctcgacgtggacgccaaggtgctcgacggccgccgccacaccgacgccgtcgccagcgtcatcctcctctccgacggccaagacaaccagaccatgggttaccgtggccgcttccacatgacggatttcaaggcagcggcgaccagctacgacgtcctcgtgccgccgtctttcacgcgcgccggcggcggcgagcggtgcgcgccggtgcacgcgttcgggttcggcaccgaccacgacgcggcggccatgcacagcatctcggagatcacgggtggcaccttctccttcatcgagaacctcgccgtcatccaggacacgttcgcgcggtgcatcggcgggctcctctccgtcgccgcgcagaatgcgcgcatctccgtcgagtgcctggaccccggcgtgcgcgtccgggcggtcaagtccggccgctacgagagccgcatcgacgcggagggccgcgccgccacggtggacgtcggcgagctctacgccgacgaggagcgccgcttcctgctcctccttgacgtgcctcgagccgacggcgacgccgccgtcgccacgcgcctcgccagcgtgcgctgcacgtaccgggacacggcgacggagcagtcggtggacgtggccggcgaggaagacgccgtggtcctccgccccgccgtcgcgacgggcgtggcgccgtccatggaggttgagcttgagcgcgagcgcgtccgcctcgaggcggcggacgacatcgcgctggcgcgcgcggcggccgagcggggcgcctacggcgaggcggcaaggatcctcgacgcgaggcgggaggcgctgagcaggtcggcgccggcggcgtccggcgacgccatgtgcgcggcgctggtggcggagctgcgggagctgagcgagcgcgtggcggacgagcgggagtacgcgcagacggggcgcgcgtgcgtgctcgccggcatgagctcgcacgggcagcagcgcgcctcgtcggtgcagctaggggagctccgtgtacgggtgttcgtccgtgttcgcgacaccggagatgcagaggatggagaagctctcggtgattttgcgtga

SEQ ID NO: 52076 - DNA, 324 bp, Oryza sativa
  Clone ID: PAT_MRT4530_54407C.1
atgcatacgcctttacgctttccctgcaagtcagcgcgtaaccccacacacagagatatgatcggcctgcctgcacgagcacaacgccgcacgttttcatgcacgcacgcacgcaagcacggctgcgccatcgccaattcgtcacgcgcgcacacgaacccgcgccgccgattaatttggacgatcaatcgctgggcttttgctcgccaccgatcgatcgaccgcgacgttttgggcatcatcgatcatcccagcagctggcgtctgttgtcaaaaagaaaaaaagaaaaaaaaaagcagcgggcgccactgttgccggagcgc

SEQ ID NO: 52077 - DNA, 206 bp, Oryza sativa
  Clone ID: PAT_MRT4530_54408C.1
gacaaaaaggaacctgttttggccagaacactcctgataatcgccaattacaaaggggtgtctgacggatcgcccagtttatgcagattgttctatttcttgaacccagggagcctccctggaatcattaattaagttcctacctgggtttttctagggggactttactatctacaccccagtattttaacaagagattcctagcc

SEQ ID NO: 52078 - DNA, 391 bp, Oryza sativa
  Clone ID: PAT_MRT4530_54409C.1
aacgctaactttgcttccacttaacacaacagaagagggataccggggcccccccaacaatttgaacaaccacccctttacaagcccagaaatccccgcaggcacggacagggaaaacacaccgggggtttaattttacacgggttttccaaaactggggatgtgcacaaaaccgcaaggccacacaaatagccacaaaggtttcccctttaaagccgaggggggggcgccgtcaaaagaaaaacagttaaagggattatttttataagagagggacctgtcagcctacagatagctttgttttatggtatggaggggaagctaacctctcaaaggttgtggggaaaccccccagtttattatgcgaaaaggggttcttggccggtaacgc

SEQ ID NO: 52079 - DNA, 150 bp, Oryza sativa
  Clone ID: PAT_MRT4530_5440C.1
gacttccccacctttatattgatcctgcgagtactcgactgaggacgcctgatacaacctttcataacctcagagaggctgcgagatgctcggattcctcacctcgcactgcctggacgcgcctcatgttctgtggcgcgccaaacaaag

SEQ ID NO: 52080 - DNA, 695 bp, Oryza sativa
  Clone ID: PAT_MRT4530_54410C.1
ggccgaaatacgtatatgcgggagggagaggaaacaaacagggggggatttatcaaatggggggggcaacaaagagatgaagaagatttatactagggggaacgggagcacgaaaggggcaatggaagtgggaggaaatggatgtgtacgcagaactggggcggcgggggtcagaatcgggcgggtatcgggccgaaaattaaaaaggggatttcgccggccaggtttggggccagcgaaaagggggggaagcgggcgataaaaggggaaatggggggggggtatatggggcttaatggtcgtcttcgggaatagagggggtaagggatttccaaacgcccgagggacacaaacgggggaaagcgtgggatacggtaaaggggatcgctggccatgattcccccctcattaaggcgcgcgggaaaggcgggatgcggcggaatccgcggcggcggcggcgctagggcacgggcgcggcggcgggcccggcgggaggaaggcgatgacaggtgggccccacccgtcagcgagagtggcgggcgggcccgcctgtcagcggcgcgcgcgcgcggggaggccgatgggccgcgggggaggagagagagagagggagggagaagtgggccgagccggcccaagagggaagggggggggaaaagaacttcttttagggttttctttttataaaacctttt

SEQ ID NO: 52081 - DNA, 228 bp, Oryza sativa
  Clone ID: PAT_MRT4530_54411C.1
atgggctgtgtatccatgttgggcccattaggggcgcgtcctagggttggagcacgaccctatggtcgttcttcccctctttttatacctctagtcgccgccaagaacaggcgggacgagtgtcctcgtggcccgggtgacgcgcaccacaagttcgcggcgaccattggagacggtgtatcggttgctaaggcgcagcgtctttggacagttgtagtcgggccgtga

SEQ ID NO: 52082 - DNA, 219 bp, Oryza sativa
  Clone ID: PAT_MRT4530_54412C.1
acccagtcaacacacaaggaccagaacgatcccggcccttgtcgctccttctgctcgcctcatcctcggctcaagcgcgccgccacccagcgcctaaagacgcttcgctaccgccgctcctccctgctgactgcgagcaccagagccgccgcgcctcacctctcctccgcgccgccaccaaagatgccgcttcggttcccgacgccgctgcccgtctag

SEQ ID NO: 52083 - DNA, 421 bp, Oryza sativa
  unsure (1)..(421): unsure at all n locations
  Clone ID: PAT_MRT4530_54413C.1
aagtgtctgtaacctgaaatgtggagggcgtgtgaaattctgtgattgaagtgaaaaaaaaaaaaaaaaaaaaaaaaaaaaaaaaaaaaaaaaaaaaaaaaaaaaaaaaaaaaaaaaaaaaaaaaaaaaaaaaaaaaaaaaaaaaaaaaaaaaaaaaaaaaaaaaaaaaaaaaaaaaaagggggtccgcccgggggaaaanaaaaaaaaaaaaaaaaaaaaaaaaaaaaaaaagggggggccgttttttagaaaaacaaccttctttacccgccttttttccaaattcaaattcttttctaaaggggcccccctaactaaaaaacccccccccccgtttttcaccccccgcttgtctcgaaaaaaaaccctgtccctccccgaatttatttttctttctccccattcctctttttaaacgt

SEQ ID NO: 52084 - DNA, 284 bp, Oryza sativa
  Clone ID: PAT_MRT4530_54414C.1
ttatttactgcagcagcagcagctgagcttgaggcagggtaaaaaggaacacatggcgcgcctacaccatggccctctcgtacccaagcgctggccggcaaggccgccccgaaggtgttcggcgaggggcgcataaccatgcgcaagtcggcggcaaagaccaagcccggcgagacgtgaagaccgtggtactgttactaacggatcatatacctattctagctatgaaagaagcgacccaatcaaacttgagttgtgctctggccaagctaccaaagggtggg

SEQ ID NO: 52085 - DNA, 349 bp, Oryza sativa
  unsure (1)..(349): unsure at all n locations
  Clone ID: PAT_MRT4530_54415C.1
ctttctaacaggaaaggtggaagctcgttccgtgatcttctacatatatctcctatacgaaatgcatcgggcaaggtagcatttcacgtgtgggttcaccttgatgagggtgcaaagtatgattttaatgggctgacccccgaggtatggcagcttggtgctgttggtgcggtgagagtggcagtcagaagcttgtctgcgtcaggaagcctgttgagaccgtcccaatagcattatctagtttcttgccattttatgacttgtcgacttgccaatgtacattgagttgcctgttgtctgtaaagtaattgctnggtggaaaattttcagctcaaaaaaaaaaaataaa

SEQ ID NO: 52086 - DNA, 498 bp, Oryza sativa
  Clone ID: PAT_MRT4530_54416C.1
atggcgtggaccgccgccgcagccaccgtcaccagggccgccgcaacgccggccgcggagctccgcctgccgctcgccgccggcctcggccgcgcctccttcgccgtcaccggccgtctccgccgcgctgtctccgcgtccctctccaccgccgcggccgccgttaaaaaggaggctgttcagacagagaaggccccggcagcattaggcccgtattctcaggccatcaaagccaacaatatggtctttgtctctggagttcttggcctaaaccctgaggttatgaagaatatgggtgaaatattgaaagcaagtggtgctagctactcttcagttgtcaagacaacaatcatgttggctgatctacaagatttcaagaaagtgaatgagatctatgccaaatattttccagctcctgcaccagcacgctcaacttaccaagtagcagctctgccgctgaacgccagaatcgagatcgagtgcattgctgctctctag

SEQ ID NO: 52087 - DNA, 696 bp, Oryza sativa
  Clone ID: PAT_MRT4530_54417C.1
ggcacggggaacggccgctctgttttttttttttttttttcctgggcatcaacgtttattgcaggcagttcaagatcttaattggtactacaagatcaggttcagaatggcagtgcattcttccaggatagtgaccaactagaacggcaccacagaatgcttattggcaatttgattgatagacagtagcaggtaactagagagcagcaatgcactcgatctcgattctggcgttcagcggcagagctgctacttggtaagttgagcgtgctggtgcaggagctggaaaatatttggcatagatctcattcactttcttgaaatcttgtagatcagccaacatgattgttgtcttgacaactgaagagtagctagcaccacttgctttcaatatttcacccatattcttcataacctgttcagtttgctcctccacgctttcagatacaaactttccagtctcagggtttaggccaagaactccagagacaaagaccatattgttggctttgatggcctgagaatacgggcctaatgctgccggggccttctctgtctgaacagcctcctttttaacgccggccgcagccccttagggggacgcgggtacggcgcggccgagacggccggtgacggcgaaggaggcgcggccgaggccggcggcgagcggcaggcggagctccgcggccggcgttg

SEQ ID NO: 52088 - DNA, 770 bp, Oryza sativa
  Clone ID: PAT_MRT4530_54418C.1
gctgtcctgccgtgccctgcctcccttatccaacaagcgtaatcgatcgatcgatccatccatgtctctgcatccgggtagtgggtacaaataagctgaggccttctcgcgagaaatcaaaaccgtatcacctcacactcacagcagttcggctgaccatggcgagagcggcggcggcggcggccttcgtcttcgtctccctcgccctcctctgcgacgccagccaaggcgaaggggcggcggcggcggcggcgtgcagggcggcggatttggtggtgaggcagagggcgacggggcgggtggtggaggggaagccggagtacgcggtggaggtggcgaaccggtgccggtgcgcgcagtcgagggtggtgctgcgatgctacgggctcatcagcgtcgagtcggtggacccgcgcgccatccgccccgtcgatgacgagcgctgcgtgctccgcggtggccgagtcatccgccgcggcgcgccgcccgtgcgcttcacctacgcctggatgacgcccttcgacttccccctcgcgtccagctttgttaatttctacggtaaaaattggttaaggatttcaactagttgggtacaaagtttgggcaagtattgtcgccaccaagctgttgacatgtgttcctgcagtatatatgcttcacaaattggagatgattatattcgtgaaaatgctcaaatgaaaaagaaaactacagtccaatttggaaataacccagacttgccagttgccacgcgagaccggtctgactag

SEQ ID NO: 52089 - DNA, 324 bp, Oryza sativa
  Clone ID: PAT_MRT4530_54419C.1
atgtcccaaccaggacttgttcttcctctgctccaaatacaagttgccatcatgagctcagatgctgaaaaggcctccagtgctcggaagagcggtgatggcagcgacatcctctccccttccccatcccacggtgacgagctcggtgcagttgccacatctagcccgccaacatcgagcgttgagctatttcgcagcggtcaaggagggtttgttcccgttctcctcctccttgctgcttcttccgatccggcgaccttggtggtggatgtgctcagagcggcgtccttgacggtggagcagctgcgcgtggtgagggactag

SEQ ID NO: 52090 - DNA, 513 bp, Oryza sativa
  Clone ID: PAT_MRT4530_5441C.1
ttcattatctgctatccgagacatgggcgacaagagggcttttaataggatcatgggtgctgttggtgtaccgctcgtcccaggttaccatggggctgaacaagacattgagctgttaaaacttgaagccaataagattgggtattcagttttgatcaagcccacacatggtggagggggcatggggatgagaatagttcaaaggcctgaggactttgtggattctgtattgagtgctcaacgagaagccgcagtatcatttggcataaacacgctgctggttgagaagtatattacccaacccagacatatagaagtccagatatttggagatcaacatggaaatgtgattcacctttatgagagagattgtagtctacaaagaaggcaccaaaagattatcgaggaagctccagctacgaatgtgacagttgagaataagcatatactagtgttgctgctgtatcagctgcaaggcagttggttactacagtgctggaacagtggaattta

SEQ ID NO: 52091 - DNA, 523 bp, Oryza sativa
  Clone ID: PAT_MRT4530_54420C.1
agaacatgacagtcacatccacccgtacgtaagatcctatacagcagacgccctttctttttttttttttttttttttaatattatttttttttttagttaagactttataaaaaaaaaaaattaatttcaaattaatacccaaccaactaacaatcccaaatataaatccctacactcatttttttttctttctgcccaaggttcccccccccccccaaaacaaaataccccaaattctaaatttttttaaaaaaaaaccctcacacaaaaaaatacaagatccttttccccccccacaaaaaaaccctttttcttatagcgttttccccccccccaaaaaaccctctacaaaaaaagcccccacccaccaataaatccccaattttaacatttcccccggctttccggtgaaactatccttccaaaaaaaaaaaaaaaacttttactactccacacgctagcaattttttttttttataaaaaccccttttaacccctttaaaaaaacccccccccccaaa

SEQ ID NO: 52092 - DNA, 205 bp, Oryza sativa
  unsure (1)..(205): unsure at all n locations
  Clone ID: PAT_MRT4530_54421C.1
atggccgcggcgacgatcgagatcccgcgctcgccggcgttccggctgcttctcgtcaccgcggcgaggaagaatctcctttcgggcggcgatcctcgcgctcgccgactcgattgccggccgacacctcatcggcggcagaagcgccggcggcggtgcgagaagaccaagagcagctttccgttgcnggcattgaagcctggag

SEQ ID NO: 52093 - DNA, 508 bp, Oryza sativa
  unsure (1)..(508): unsure at all n locations
  Clone ID: PAT_MRT4530_54422C.1
attgagatcattcccccgcagtacgaacaagactggtatagatggcttgaaaatatacgtgattggtgtgtttcaaggcaacattggtggggacaccgtgtacctgcatggtatgtgacactagaagatgaccaggagaaaactctaggttctgacaatgaccgctggatagtcgccaaaagtgaaagtgctgcaagcgttgaggcacagaaaagttatccaggaaagaaattcatcctaaatcaggatcctgatgtgctagacacatggttttcatctgctctcttccccttagcagtacttggttggccagatgatactgctgacctccgttctttctaccctacttcagttctagaaactggacttgatattctcttctgttgggtagcacggatggtgatgatgggaacacaacttggtggtgatgtgccgtttcagaaggtttaattgcatnctattgtatgcgacacacatgtgncgaaaatgtgcaagtcacttggtaatg

SEQ ID NO: 52094 - DNA, 105 bp, Oryza sativa
  Clone ID: PAT_MRT4530_54423C.1
attcactaactgctgttgttcgcgttatggctgatggatcggaccctaagtcttggctgatattgagcctgtacttagtataaggactgttgcaagactagctgg

SEQ ID NO: 52095 - DNA, 1342 bp, Oryza sativa
  Clone ID: PAT_MRT4530_54424C.1
atcattctgcaaaattggtgatctttcattctcaatatcatgatgggagtacatgtatgtacaatggaattatggcaaaaggaatgatgggctttgcatcattctcatcttgtggcaaacataaacatattactcacattgcaaacaaacagttgccagaacacagcaacacacacaaaaaaaaccattacaacaatatgatcaaacaataaatctaccatgttgtgagtgatcgatcctattattcttctaccaagacagactctacagagttcagaactatactactaaatcgccaatactaactcatccagttctcattgactgcatattcaaccagatccactcttgcatgccttactctggagcatctttccttccatcagcttttgtggaagcaaacagtttgtcagatggaacaacttggtaattccgtgtaagagcacttcttaacttccttctcttgcatgctttgcttgattctgcatcaacctccgcctcatcatcagcaaaattctgatcagagacctctgtactttcaccaacaagtttttcttccttgcaagcctcccactcccttccatgtgacaacggagtcctcccttggatagtctgaataccagattcatgatcacccagctaaagcctccgccgcatcattccttgcattgctactgcattcgcgcggcctgagatgctgaatccaggggcttgcgggcaggcagtattttctcccgatccgtgagcaagcactggtccgatcaaatttgagtttctcccacaccccaccacggagaaccttgaatccgttgccagcatcattttgttcgtgattgtagagttgctcaacgaaagaagcctccattgagcttatataatgcatgtgccgctcatctgtccaccctgacgacatcatgtccaggattcgattgccctgagcaatgccgcctgcagctggctccgccttgatcggtcgattgactgacacatcacccatttgattcttctcaatgaaccaaggaacccacaaggggaggaaaatccgaagaaattgccaaaaatcttctcgaaccgtatcagaaaccagcccaaaatttcctctcttgaaatatgtacagctacagagaagtagggggaggtctagggatctctcgctcgatttcacccgcagatcgaacaacccgcctccctcgcagcgagaaagaagagagaacgcatccaagatttggtctgagcggctcgatctatggacagacaagaggaggtgaagaagaggaggagagagagaagcaggagagggaggagaatggaattgcaacggaagaagcaaagggagacgaag

SEQ ID NO: 52096 - DNA, 303 bp, Oryza sativa
  Clone ID: PAT_MRT4530_54425C.1
atggccgaacacggcggcgccctcatcgttggtggagctgatggcaatgagtcgctcgggaggggagcaagggtggtagcgattagaggagtgaaaggtggggatggcgggcatggcgactcttgtggccatggttttggcgaaaggagaaggaaggagaaggcggcgacaggggcgcgaggacggcgacgcggcgccggagtttgtatgtggacttggaataagagatatgagatctttaatgccacaaataaaaatatgaataagagccaaattttgaaaataggtttgtatttaaattag

SEQ ID NO: 52097 - DNA, 1988 bp, Oryza sativa
  Clone ID: PAT_MRT4530_54426C.1
atggcagtagaagccccatgccgagcaggagctggccgccagcgagccgccgccgcgcttgctggagtccacacgcagccgccccaccgaccagctgccatccggtgtggaggcgacggatctggccgcggacggctagatccagccagtgatcgtcttcggcgttctgaagcaaagctaggagtgaccaaaaaagatgcaaagctggctgcatggaccttatttattggttcatctgcatttgcaggtttcctacagcagcaggagcaggaacatcttgaagatagtacagccagacagaacgaaaattgcaattatgcaaagggaaaatgggtggcagacaagaagcggccactctattctggcaatgagtgcaaacagtggctatcgaaaatgtgggcttgtcgaatgatgcaacgcgcagatttctcttacgagaattttcggtggcagccgcatggatgtcagatgcctgagtttacggggcctaacattttgaaaaggtattttacttcaattttccttttcgtctggatctccttaaggactggacttattttagcattttccgaggcttgcaggttgaggcataaaactcttgcttttgttggtgattctcttggtagacagcaatttcagtccatgatgtgtatagctacaggtggtaaatacagcccagaagttgaagatgttggatggaaatatggcctagttaaagctccaggtgctttaagacctgacggatgggcttactggtttccagggactaattccacaatccttttctactggtctgctagtctatctgaactggaacttctgaatacaacagattcagtgacatcctatgcattgcatcttgatcgtccagttacatttttgaagaagtatctccacagttttgatgtgttagtacttaacacaggtcatcactggaacagagggaagttcaatggaaatcactgggaactgtacgctgatgggaaacctgtaggcaaaggtagacttgcagatctgaaccgtgcaaaaaatcttacattgtacagcattgccagatgggtggattcagaacttgtgcgatatcctcaagtgaaagctttcctgaggacaatatcacccaggcattttgtaaatggtgactggaatactgggggaagctgtggcaataccgttcccttgtctaacggaagtgaggtattgcaggatcattcaagcgacttacctgtggagagtgctgtgaatggaactcgggttaagattttggatataactgctgtttcacagctacgagatgaggggcatatatccaattctactttcaaaggtagagcttcaacagggattaacgattgcttgcactggtgccttcctggtataccagatatgtggaatgagctcctctttgcacagatttagtgctgcacttcagtgaggggatttttttttttacacaatccgaagagttcctttggtgttctgcacagatagcacagatatgtggaatgagctcctctatacagaagctgttttagcgtagcatttaattatggaacttctggccacccatatggaagcagtcgacaatttcaagatgatagtatgcacccataagactagagatgatgctagtgtaaagttcggttcagattatttagccttttctcaagtcaagatatggaactagatgctgctacagagccttatagagtagtcccccaggtacatcgattttttgttttctttttttttttgagtaaaatgctaccacagtccacagtttaccatgtgcaacatatattttttagatacacacatgcaagttgaccaaagtgctgtatgctcttatacttttaaggtagaattcttgttttatgcctgtaacaacaatctcatttcagatgttgtaacatttgaaaagtttcatgtaatcattgtagagtttaaaaaaaaaaaaaaaaaaaaaaaaaaaaaaagggggggcctcgtgc

SEQ ID NO: 52098 - DNA, 275 bp, Oryza sativa
  Clone ID: PAT_MRT4530_54427C.1
atgggtgatgtgtcagtcaatcgaccgatcaaggcggagccagctgcaggcggcattgctcagggcaatcgaatcctggacatgatgtcgtcagggtggacagatgagcggcacatgcattatataagctcaatggaggcttttttcgttgagcaactctacaatcacgaacaaaatgatgctggcaacggattcaagtgcttgctcacggatcgggagaaaatactgcctgcccgcaagcccctggatccagcatttcagcccgcgcgaatgca

SEQ ID NO: 52099 - DNA, 384 bp, Oryza sativa
  Clone ID: PAT_MRT4530_54428C.1
ccccacgcgagcaaccccatttttctgaaaaaacactattggacaaccttcaagggggggaagaccatatatgaaatgggggtttttcataagggcaaaggatcgctcttttgggtggagcctaaagatgaactttttaaaaaaaaaaaaaaattatttttttggaaaattctcccaaaaaaaaggaccatccctccgtttttgataccatgtccccagttcccaacaaaaagggcccggacaacaacgtttggtttcccttttgcacattcttacaggaggccagggaaggggccgtttccccgttgttgattccaacccttaaccaatttgtctgggcaaaagattgcaccgttttttgcaaaagatccatgtggggcatgt

SEQ ID NO: 52100 - DNA, 217 bp, Oryza sativa
  unsure (1)..(217): unsure at all n locations
  Clone ID: PAT_MRT4530_54429C.1
tcagcgtacggaggctcgaggcctacgacatctcctacacgaccaaggtgcgcgacttgcgggaccttgtcgacgcagcgcgaacgtcgtgcgctgccaagggccgctccatataaaagatcttcttatcgaagtgcagnatggccatgaacgaactgcgcaaatacctgtaccacgtcgggtggaacatgacgctcatggacgggccgcccggatg

SEQ ID NO: 52101 - DNA, 881 bp, Oryza sativa
  Clone ID: PAT_MRT4530_5442C.1
cacacacgctcacacccggaggcggattgggggatggcggcggcggcggcgggggcggcggcggcgccgtcgaggcttatgctgcgcttccgggacggcgagctgcgcttcgcggccaccgacgatgcgctgcgagtccccttggggtacgcgatcggggcccccttcatccgcaacgagcgcatcttccgcctcctcgacgagtacgcgcggacccacgcgcggggcggcggcgccgacgccgtggccaacatcgccgcctgggaccgcgacttcatggcgcgggaggtcaccgacaccgtcacgctctacgacctcttcgtgggcgcgacggcgctgggaatcgacgggctgagcgacctgtgtgcacagatgaccgcggacgcggtgaaggggcgtcccgtgggggaggtcaaggcgctgctcggcatcaccgacgtcggcatgacgcaggaggaggagctcaagctccagcaagacaacgatgccatcctctacctccgttaactacctgatcatcatcaacaacgctacttttgtcgctgaagcattttgattccatctcgcctactgtggtgtactttgaggtggtattggcttctctacgtctagatagacagcttagctagatagatgcacacttcatcaacctggcttcctggtatgctgctgaacttgtagtagtaattctgagagaagtttggaggaattctgagagaagttttgtctggtgcggtggtgcctgggccttgcaccttactagtagctattactcgctgcttaattcagtcatatttggtactcctgtgtacggtactaattgagaaaaactggttatattatcaatatatcatactaccatcgaaaaaaaaaaaaaaaaa

SEQ ID NO: 52102 - DNA, 1631 bp, Oryza sativa
  Clone ID: PAT_MRT4530_54430C.1
tcagaccgcaaccaacgaaaatcctgcgcccccggcggataggattttctccgaacgcatagcctccatgtctgccgccgccgccggcaagagattccccgtcgacgcgaccatctcggtcggggctcctacttctccgccgatggggagacgaaggcggcagacggaacggttcgcgcttctcgtcaagcatcttgagcacaatgcgagcggcggcggcggcgtcgagcgtgagagagcacggccggtgagcgcgacgcaagcgacgagagcggggccggcgagcacaatgcaagcggcggcggtggcgagtgcgacgagagcagcggcggcgagcgtgacgagagcgcggccggcgagcgcgacgcaagcggcggcggcagcggcgagagcgacaagagcagggccggcgagcgcgacgcaagcggcggcggcgagcgtgagcggcgaggttgagcggcgtgctgcatgctctggagcatctttccttccatcagcttttgtggaagcaaacagtttgtcagatggaacaacttggtaattccgtgtaagagcacttcttaacttccttctcttgcatgctttgcttgattctgcatcaacctccgcctcatcatcagcaaaattctgatcagagacctctgtactttcaccaacagctttttcttccttgcaagcctcccactcccttccatgtgacaacggagtcctcccttggatagtctgaataccagattcatgatcacccactaaagcctccgccgcatcattccttgcattgctactgcattcgcgcggcctgaaatgctggatccaggggcttgcgggcaggcagtattttctcccgatccgtgagcaagcactggtccgatcaaatttgagtttctcccacaccccaccacggagaaccttgaatccgttgccagcatcattttgttcgtgattgtagagttgctcaacgaaagaagcctccattgagcttatataatgcatgtgccgctcatctgtccacgctgacgacatcatgtccaggattcgattgccctgagcaatgccgcctgcagctggctccgccttgatcggtcgattgactgacacatcacccatttgattcttctcaatgaaccaaggaacccacaaggggaggaaaatccgaagaaattgccaaaaatcttctcgaaccgtatcagaaaccagcccaaaatttcctctcttgaaatatgtacagctacagagaagtagggggaggtctagggatcttgaagcaaatcggcgaacaaaccaaagtaaatctcctcgcgaccggatgattacgaagagggaaaacaaaaaaaaaaaacaaacaaacacggacaagatttcaacttcaagaaacaaacaagagaaacaaaaatcacacctctcgctcgatttcacccgcagatcgaacaacccgcctccctcgcagcgagaaagaagagagaacgcatccaagatttggtctgagcggctcgatctatggacagacaaggaggtgaagaagaggaggagagagagaagcaggagagagaggagaatggaattgcaacggaagaagcaaagggagacgaagaagatcccctcctgttaagctgcagcccggggatccacta

SEQ ID NO: 52103 - DNA, 578 bp, Oryza sativa
  Clone ID: PAT_MRT4530_54431C.1
gacgagggctgcatacactgcagatatctagttggtattaatctacatttcttcagatcttcggaaacatcatccggctcactggagctatgctgataggcgagccttacgggagaaacaatgtccgcattatactgaatttctttcgaggccaggctgcggccggctgagttcgaggagagttggcccgcgccgtgcttgccaacgaccggcgtccttgactcgccgtcagttccagccactgcctcccaggtgctttattttttaagacaatatatcatgttgttgatgtgaaattttgggatcatcttgtatagtagtaatccgggtgcttagaaattagaatacggttcttatctgagcttgtgttttgaaatgtggaattgctggacaccagttttgtgatcatgcttttatgttgtttataatatcatttacatcccatgttacatattttcctttgcttaaactaaattgagagttgaatccactgtcatttatttgtttcaagtattattttctgtgattctcagcattacattttcactctgatactcccaccgttccaaaatgtaatg

SEQ ID NO: 52104 - DNA, 1395 bp, Oryza sativa
  Clone ID: PAT_MRT4530_54432C.1
atgaacgccgccgtgttgctgctgctcctcgcgctcgccgccctcccggcgtcgtgcgcgccgccgagatccttccgcctcgagctcgccagcgtcgacgcctcggcagccgacgccgccaacctcacggagcatgagctcctgcggcgcgccatccagcgcagccggtaccggttggccggcatcggcatggcgcgcggcgaggcggccagcgcgcgcaaggccgtcgtggccgagacgcccatcatgccggccggcggcgagtacctggtgaagctcggcatcggcacgccgccgtacaagttcacggcggccatagacaccgccagcgacctcatctggacgcagtgccagccctgcaccggctgctaccaccaggtcgaccccatgttcaaccccagggtgtcctccacctacgccgcgctgccgtgcagcagcgacacgtgcgacgagctggacgtgcaccggtgcggccacgacgacgacgagtcgtgccagtacacctacacgtacagcggcaacgccacgacggagggcaccctggccgtcgacaagctggtcatcggcgaggacgcgttccgcggcgtcgccttcggctgcagcacctccagcaccggcggcgccccgccaccgcaggcgtccggtgtggtcggcctcggccgcggcccactctcgctggtgtcccagctctctgtgcggaggttcgcctactgcctgcccccgccggcgtcgaggatccccgggaagctcgtcctcggcgccgacgccgacgccgcccgcaacgccaccaaccggatcgccgtcccgatgagacgggacccgcggtacccgtcctactactacctcaacctcgacggcctgctcatcggcgacagggcgatgtccctgccgccaacgacgacgacgacggcgacggcgacggcgacggcgccggcgccggcgccgacgccctccccgaacgcgacggcggtcgccgtgggcgacgcgaacaggtacggaatgatcatcgacatcgcgtcgacgatcacgttcctggaggcatcgctgtacgacgagctggtgaacgacctggaggtggagatccggctgccgcgcgggacggggtcaagcctgggcctcgacctgtgcttcatcctgcccgacggcgtggcgttcgaccgggtgtacgtgccggcggtggcgctggcgttcgacgggaggtggctccggctggacaaggcgcggctgttcgcggaggacagggagagcgggatgatgtgcctgatggtggggagggcggaggcgggcagcgtctccatcctcggcaacttccagcagcagaacatgcaggtgctctacaaccttcgccgcggcagggtcaccttcgtccagtccccctgcggcgccctgcgatga

SEQ ID NO: 52105 - DNA, 218 bp, Oryza sativa
  Clone ID: PAT_MRT4530_54433C.1
ggactcaaacaacaaagtgtgcatgtatttatgcattccttgctggttaccatttgcgcaagggcacaagaatgaaacattacaatatcaaaacaaaaacctggactacatctgctctcccaaaaaaaatcataaatcaaagtaaagaagattgtcctctacacaatcttacgtgcgaatttacaacatttctccccgttgctttgcctttgtttcta

SEQ ID NO: 52106 - DNA, 243 bp, Oryza sativa
  Clone ID: PAT_MRT4530_54434C.1
tctccaccgtgccgccgccttcgtgtcgccgcgccgtcgctgctgtgacgccgcgctgcggtgtgtgccgcgccggaccccgagggaattgcggatccgagcgaggatcaggacccgcaagactatgagcaaggcaagtcatcactattctttgaacatgttgatcccaattgcgaaattattttgtttacaaataaaactgcatgcaatgatgaaaatcctacttgtgattatgccatgcct

SEQ ID NO: 52107 - DNA, 672 bp, Oryza sativa
  Clone ID: PAT_MRT4530_54435C.1
atggcgacgagtctcttcctcgcgctgcagtgcgtccagtgctccactatgcaggtgaagccgcagaagaagagcagcaacaagtgggtgtgcgtggtgtgcaaccagcgccagtccgtgatgcgcgtccacgcccgcgggcaccgcgccgccgacctccgccgcttcgtccaggaagccaacctctcgcgcggccgcgccgcgcatgtgcccgtgcccgaggaagactgggtccctgcggtgccgggggagcagcgggatgagttcccgaaggagaggaagaggcggatggactggtccgactatctggaagatccgggggagtacgatggcggcggccaccacgaggaagctcgagatgaagccgacaccgtcagccaggttgccccaaatcgtcgcggcccgcccgtgctcggggcagtggctatcgcgacgccgcggccgcgcgggcgatcaggcgccgtgccgcgcgagatgccaaccgcgaagcgcgtcgcgcgcgtcgcatgcggctggggcgaaatcatagccaacaacgacactcccagcaatggtacggcacaatcatggagcatcaactggtgcgtccaaggatctcaccccatgatgaccccgccgcagcagctgggtatcgcgtgttgtgggctcgagtacctcgtatacggtctctag

SEQ ID NO: 52108 - DNA, 297 bp, Oryza sativa
  Clone ID: PAT_MRT4530_54436C.1
gttttacgcaaaggaatcagatgcctgcccacggggggctttgtatttatcagggggggctgttgtgcctgtttctgctcactgcaagggtggctatgctcttcccaatcctggggccggtctgatgcgcatcgctaagtaccattctatggggctctagactatccaggcctctggtgagcatatcattgtacctgctggatagctacaccttagaaaacaggttgaaggatctgcattggagattacatgggttgcgctaaaatgaactgctccacacctggtgacctttgctat

SEQ ID NO: 52109 - DNA, 1284 bp, Oryza sativa
  Clone ID: PAT_MRT4530_54437C.1
atgaagagtacaaaactccacttattttgggacgtagggagtagcattatattattgacaccaagggagaagagagaatatggcaatgagaatacgtgcaagattgcccatggaattaggaaatggcgccgccccagcaggcggcgccgttcctgccacgatcctcatggcctcggatcgctacggctgtcagcggctgaaggatctcctgaacatggaagacgcgacgacgacgatggttgtggtgatgccgtcgatcaacaacaacgacaaagtcgacgaacaagacgcggtgctgccgccgccggctgcggctgcaggcggcggtccccaacagcagccgctaaccatgcatccccggctgctaatggctgcgcgcaacggcgatcacaaggcgcttatgaggtgcagcggcggccaccacatcacatcatccatatgcacgagggagctcctgcaccacctagcgctcatgtagttgatgaagaaggtcgacaagaagtttcagtggaagacgatgcagatggtcatcagcgttcaaagtgcactgatggagtccctgcagcgccgcaagcatctgcggccgatgttgaagaagactctgttcatcatgaaaacatcagcaagctaatctcaggtttcgtacctccggctctgggagcgccaattctagatgaagtgactacctacgatggagactccgcgctgcatgtggtggcagcctgtgctgacaccgaggactatttgaagtgtgcaagaatgatatacaacaaggcgagtcgcctattggatgcgatcaacagcgaaatggacactcctctgcactgtgcgggctgggaacattggtatggtttcttgcctcatcgagttggcggcaggcgagcagaattatcatcacggtgcagggtggaagaagctgatgtcggaggatccagaactagtatgcgtcccaaggatggcacatcaccactagaccttgccattgcattaaggcgttgggaccttgtgttcgaatcggagttgcttgttgcaagttttaagaagttctcttatttcggcccgtgtggacaaaatgtcttccatatagcagctttgtgggaaagagccaaatctagtccgcacgcgatgaaggctgtcatcgtaatgcttgagaagtatcctagctgcgccacattgcgtgatcagaggaaaggaaggaccttccttcacaatgctgtcaccaggggcaaccgcgccctggtcgcgtttgcttgcagaaatccagagtttgcgctccggttctga

SEQ ID NO: 52110 - DNA, 317 bp, Oryza sativa
  Clone ID: PAT_MRT4530_54438C.1
atacgaccagaaattatttttttccgggataaattgatacatctcgccttgatattttacttgtttatgtaaacactgatcaaacagagaaaatcctttgaggacatgggcatatacacttcttgttcttgaatatatgacacacaaaaatacgttcttctatttgcgagagttcataaaatcttggcaatttatatggtgagatcaaagcataaaccatctatgtagtaaaagtgaacatattattctggtccaatccggcaaggggattgaaatgcacattctactttaagggtccttctttcttgccatcgccc

SEQ ID NO: 52111 - DNA, 686 bp, Oryza sativa
  Clone ID: PAT_MRT4530_54439C.1
gtgacgccgtcgcgcagcggcaccgttggtgtcgctgtcaccgcacagtgcagcgagctaggaggcctgcgagcccagccgagctccgccgcctcgagctcgtggagggcgccgccaacgccgtcttcggtgcgctcgtgaagatcttggccgcgcggatgagcgacgccgtcgtgctcctgccaccatggcgcccaaccaccaccacccccaccgcaacaataacagcaacaacagatcaaatcaagaccctcacagtcgctatctctcacctcataaatcctgcggacacaatcttgcacacgcaaaaaccgaagggatctcaccgacgacggatcgatgagctgtgcaaggcaagaaaaggcggcgttttcttggggggttttgggtgcctcctccgcccaacccgcctctgtcctctgtgtcaagctaccctcaccgccccgtcagtgaccgccgtggggaagtcattggtgaagaggagtcggtcagtcggggagcttgtccgtcacagactcatggaggcgtgcgctgacatccccaccatcgtcgatgacccctctgccgccgcctccttctccttccccgacaccgccgtctatggcaaccgggacttggacgacattgacttcccctccgaccccaaccacgccaccaaaaaagagaagagaatggagtggagctga

SEQ ID NO: 52112 - DNA, 1221 bp, Oryza sativa
  Clone ID: PAT_MRT4530_5443C.1
atggggcggatccagggtaatgccgaggtcaccttcgcaccgcatgagccgatagccgtcaccagatgcaccacgcccgagcaccaggctcactggatgtggagcttgccgtggcaatccgccgtccgcctccacgtcgcctccccgccgcagctcccgtggatcgctctctcccccaggccgcccgtcgccacacccacccacgccggcgagaacaacgttgttaacaccgtctgcgttggctccaccgacggatggcgcgccctgcaccacaccgccaccgccggcggcgggacgaaaaccaagaggcacacgttcttcttgcacaaccctttcaccaccaccaccgtcccgctcgccgagctagaggacgtcctcgacgacgctttcttaaagcagaacgaggtccgcaaggtgatcatccggtcctcctcctgctgccccgatggggaccacctcgtcgccatcatgaccgaccactataacttccctttgatcctgtgccggccagggaagggcacctggacgcccgactcatgcacgatgccattcgtccgcgtcatcgatattgccttcttcaaggacaagctctatctaattacaacagccgaggacctcttcgctgtcgacctcgccgccgatgaacacggcaagcccaccgtcaccaacgtcgagcgcatcatcagacaaccgagaagccccgatggcatgatcgacgcatttaggtggagtgacgacgaagacgacgacgacgacggcgacgcacgagaggatgacggtgacgcatcgtcgaccaatgacgacggggagtactcctccctcaatgatgagggggtagtagatggtgaggaccatgacgaggtattgaaccaagagggtggagacaacaacagcgacggcgacggcgaaattgagcccgtcactgatgacgatgacatcgacgacgttggccagcagtggtgccccacttgggagcatagaaagtttgagcaattctacgaggaggagtacgcgattaccgaccacacccgcaagctggacgccggaacatgggttccggtcaccggcggcctaggtggccaagcaatcttcctcagtgaactcttcagcaagtccgtgcctgcgcctgcacacggtgaggttgaaaaggacatggtttattttgttgatacatacgacgtgtgggacatgaaatccggcactaggaggccgtttaggtga

SEQ ID NO: 52113 - DNA, 696 bp, Oryza sativa
  Clone ID: PAT_MRT4530_54440C.1
atgccgtactacgcgctgttcggcgaggtggtcatggatgggatcgtccgtgtggaacccatgggagggttcgacggtacagccactgcctactatcttcagtgcaaggactgtggctccctgggctcagtctccctcatacccggcaaggggaaagccctcacccctgattccaagaacatggtgatgttaatccattgcgatggacacatccctatcgctttcagcccggcaccctactggattgccaacaaggtcaatggggatcagcatgagttgcacttctccaaggatgggttcgagggctacggcgacaatgatgagctgattctcaccagtgccaagttcaccgtcgagaggctgaagaaggccgagaaaatgtcattcaaatggcatatcaaggctaaagacagggcaaatcatagactatcacaagtggaatacaagtataaaacagaggattgcaaaatacaggaaaaacatagaaacggccatttgattaggccgcaggaaaaatacaggaattcgaggagagataaaaactcaaaggactcacaaaagatcatcgaagcagtcgagtctgaagaggaagcggggagggtgctgtcggtcgggagcaggaagggcgcgagggggagcgggcagtcgggactggggcagattggcaggaggaaagcgtggccggcgacggcgtag

SEQ ID NO: 52114 - DNA, 458 bp, Oryza sativa
  Clone ID: PAT_MRT4530_54441C.1
gctgaagtaagcatttccatgttcttaaaaattagtgaatacacacagcagctgctgttcaaatacataatgctagaagaagatttccacatctgacggtactacgaggcaatcttggtcacccttatcaatttgatcctacaaactctcagttttttttgtgcaatacttcctaaagaacctaacataaagaacctaatctaacatagaaaccccccaaccatgcattttgactgaacattttggagctaccttttgacttcgactagccatggcccatgggaatactgattctcaaaaataccttattttaaataaataaatctagtgcacagcgcagtagtcaaataaatgcatgaaaattcacctattcatctagcatataatgggtcctcaaaaccagtcctgttgctgcagcttgagaggtagatagacctcagtgagatactggaaaccaa

SEQ ID NO: 52115 - DNA, 426 bp, Oryza sativa
  unsure (1)..(426): unsure at all n locations
  Clone ID: PAT_MRT4530_54442C.1
gaacagtgtgattggtccgccgccacggaggattaatcgtcaccacgttcaanccttttctttctctctgtttccttgaatgtgtggtgtcaaatatctatgtccgggaggtgctcgattaaatgctgcataaataatcttccattcagttcatcaaacaattttgttgtcagtgtgtggttttgtactctatctgtgtacacacctaggtagtaattttgatattgcagttgcataatcagatatattgccagttcaaattagattgtgaggggtattcctggatgtatgaagtcctctgaaggaagagtgttttttctctgtgatttttgagggaaggaatgtttcctacttgacatttccagaaaaaaaaccgtacttgctgctgcaattccctgggnattcccgatttgcatgattcctgga

SEQ ID NO: 52116 - DNA, 1556 bp, Oryza sativa
  Clone ID: PAT_MRT4530_54443C.1
accctggaattcagaaggttacaaaaatctcaatttgcaaagcataagtttggagagagagagagagagagagagagagagagagagagagagagagagagagagagagagagatgaagaggagatccatgttcacagtagggaagaacaaaggagtggccttgtcggtgcataggaagccccttcagcacatggtgcagaggaggctaagggagctgaagaagatagtaccagatgcccatgaggacaacgtcgatgtgctgctccggcaaacggctgagtacatctgcatccttgagctgaaggtggccgtgttgcggaagctcgccgcaatctatggtgcatgaaggatgccgcaccatcggccatctcagttcattgaaatgtccatggtttgagttttgaggtcagaatttgttgcagttgtacatttaatgggagaggagggtgtttcttgcctcatctctctcgtgttgtacccccgagtagtagtggtagtatgctcgtggctcctataaaggagtttgtttggctggagaagccagccattgtttctgacaatgctatataattgtgctgtttacaaaaaactgaaaaaaatattaaagaaagatttatcagatttgattgtgcaactgaatggaagtgaatggatggaaacgtacattgtatgttattcaagagttacgtcgaggccagatcttaccataggacatgctacttatgaattatccaggggatacagaatgacaagtgaaaggaaggctagaggatcccaagaacttatcgaatccaacattcgaatcgacactacgttactaatccatgtagcggcatcaaagcattacatgttcttccagactaatcatattcctttatcaaaaaactccgccgatgctgcaccctcacgccgccgacgctccgccatcgcgacgccgcctcgccacccgcgacgccgcctcgcccctcatgccaaccgccgccgaccggcgccgccaccagcatcgccgattctccatcgcgccctatcgtggcctgcatcgccgatctaccccgaccggtgccgccgcccgcatcacccatctactccgtgcctccacgtcaacctccatcgcctccccgggctcgagaccgtcgccatcatcgggaagaccaatggcgccaacctcttcgcctgggatgaccgccggggcctccttgctgtcggctgctggaagcgcctgaccatcttccgccttgacaatgagaattcagctccgcattgcctattctttctcggttgtgatttgagtgtttatggctatggtttgactgttacatcatttgggtttcggtggaaattgagatggcctgttggtagtgctcaatttggagaatgggaaccattgtctcatgatgaagcaagatcattatttgcgtttgttgcaccgtatgtcaatgaagccaaggagaccaagagcagtagttctctacctcaaaagactacagagatgcagcgctccggcatcggaagcagggtgatccggcaagggatagggcggcagggcggtagatga

SEQ ID NO: 52117 - DNA, 601 bp, Oryza sativa
  unsure (1)..(601): unsure at all n locations
  Clone ID: PAT_MRT4530_54444C.1
gatcccgggctgaggaatcggacgaggctctcagctattagcctagctccccttttgttctccacttcctctctctctctctcctctcttgtttagtggcttgtgttgagagtcccaagaaacactgaatttngttgcatccttgtgggttttaggtgaccatgggccttttcccccctttgatctctcatggtttccattctgcagctgcagacaagaacagaagcatcaccagcatcatcagcatcagcagcagcaacaaggatctttgcagtgaggaggcagcaacaagaacaagaaggaggcgaggaagaggaggagtttgagtttcaagaacggatggatctctccggggcgcaaggcgagctcccgatcccaatgcacgcctccaccgccgcgtcgccattcgccggcatgggcgcgcacggcggcgcaggcggtggacatgtcgtggagcttcaccgccatgagcatgtgggtaacaatgggcaggcgatggcgatggcgtcaccgccgccgacgaatgttgcggtggcggcggagcaggagggctctgccggtggcggggaagaagcggggcggcatggcggtggtgggtggt

SEQ ID NO: 52118 - DNA, 455 bp, Oryza sativa
  unsure (1)..(455): unsure at all n locations
  Clone ID: PAT_MRT4530_54445C.1
atttgcttttgtctggagatgaactggatgagaatctacaatacgccacctatcttttggtcaagtgagactatacaaaatattatttttctatatttagccaccttagtttctgctgacttgatcaagttgtttgtagaaatttgcctgctgtctcaactgtcccaacaactgataactttcatggtagttatgttatgttgttgaatttgaaatctcgaatggcaattgcatgttagatcatgtgttgagtggtgcaatattagatgctccatacccaaactgtagaatataatngtgttccagtcaaattaattgtggtaatactaccgtccatctagtgcaatacagctgtagtnatttgttcaggaatccatgacatccaatattttcattccttctctttttggaaatctattgtcaagttaaagttaaaatgggtaattctggatttt

SEQ ID NO: 52119 - DNA, 246 bp, Oryza sativa
  unsure (1)..(246): unsure at all n locations
  Clone ID: PAT_MRT4530_54446C.1
cgcagctggagtatcggtgcaggtgaggatgggacnggaggtgctgagcgtcggcagcagcggctgcggtggtggtgaccgtgtctgcggtcatcagaggcatggtggcctcagacggcttgccgagggcgtgggagatggctgcatctggctagcgcgacatcatttggtggagaggtcaaagaccggcttggcgcagagaagcgcagtcgatggcagcggaggtcggctcggcgcgagaggcac

SEQ ID NO: 52120 - DNA, 1092 bp, Oryza sativa
  Clone ID: PAT_MRT4530_54447C.1
atggcggcggtggagagctcgaagaagctcgtggccatcctgtccaagtccggcgacccgttccggctgatggcggccgtcgcggagaccgacgaggcggtgtcaaggttcggcaaggtggtcaccatcctcagcaacagggtcggccatgcgagggcgaggcttggcaagaggaggagctcgccgccggttgatccgggctgcctcatggaccacccgttggcggcggcggcgagctctcctgctcccagcaatggccgcctccatttcagtagtagtgctgctactgcgtcgccgtctccggcaacggcggcggcggcttcctccgccgcgaacgtcacgccggcggtggttgaccggagcttgtttcttgagacgacgctcttggatttgaacagtcgcggcgctcctgctccagctgcatccatggcggcggctgccaagaacagctcgaagcttgcacctgcacccatggtgaacagctcctcctccgcaaatcacatccagttccagcagccgatgaagagctttcagttcgagcagacgccgatcagcgacaagttccacatcgagatgccgagaggcgtcggcggcggcggagggaaggaggtgatcagcttcagcttcgacaactcggtgtgcacctcgtcggcggcgacctccttcttcacctccatcagcagccagctcatcagcatgtccgacgccgccaccaactccgccgcggctgcggcggcgccgacgaccaagaagccgtcgtcgtgcgccaggaaggccaccgccgacgacgacgccggcggcaaatgccattgcccaaagaagaagtccgtgtcaatctcgccaccgtttctcggccatttctgccatgatcttgaccgtgttcttgcttccgatttcttcgcaggaaacccagggagaagaaggggatactacaggtgcagcagcaagaaggattgcccggcgaggaagcacgtcgagaggtgtcgcagcgacccggcgatgctgctcgtcacctacgagaacgaacacaaccacgcgcagccgctcgatctctccgtagtgcagcaagccaccgctaatccccagacctga

SEQ ID NO: 52121 - DNA, 1035 bp, Oryza sativa
  Clone ID: PAT_MRT4530_54448C.1
actagtggatccccgggctgcaggctcggcgtcgcctcgccggcggggtcaacgccgtggctctgctgtccctctccgccgggcagatctgggtgctagccccaggggatggctgcggacgggcgcacggtggagctgcacaagtgcgcggtcgtcgagctcgagccgtcgcggccggtgtacgccatggaggttgccatggggaggctgctcctcggtgaggctggtggtttgcgcgtgttcccgctacaaggcttgatgaagagtgggaaagagaggcaggtgaggaaggagggtgcgggggcagcagtaaggaagagcctgcacaagaagaatggaattcggaatggttttattgtgccaattgggcatggcggtagcgagggaggtggcaaacctggtgctgcccccgcccgtgggctcgccacgtggagagtaaaacagacttcagggagctatttctctttcttttcctcatgtagttctgaggatcatcataactcacaaggtgccgtagaagtgaaaaatgtagtgaaagttgtttcaatccgtcctctttccaaggacaagtttttggtccttgattcagctggattgttacatgtattcagtcttcaaaacaaagaattggtctcagaagctactagcaagagatatagtggaaatcacacacactgtttggataatgccatgaaagtgcagctatttgctgtctttccaagtagctctacaaagacagaaatcttttggatttcggatggtgggcattccatacacataatgtcagcacttgatgttgaaccccccaacagtgataatggaggtggtgatggagaaagagaatcaacaaccattaagctcacagctattgaagcaatctttacaagtgaaaaggttcaggacattgtgcctatctccaaggattcagtccttatccttggtcaaggcaacatgtttttgtatggaacttcttgaattgtgttgattatatcatatattcggtgggagatgtgaatgtttgtctagatcatgaat

SEQ ID NO: 52122 - DNA, 2018 bp, Oryza sativa
  Clone ID: PAT_MRT4530_54449C.1
atggcgtcgtcctcgtcgtcccggctgctcttcctcctctcgtgcagcgtgctcgcgctgctcgccggcgccgaagtgcaccatcatgaattcattgttcaagagacgccggtgaagaggctgtgcaagacacacaacgtgatcacggtgaacgggcagctgccggggccgacgctggaggtccgggagggcgacaccgtggtgatcaacgtcgtcaaccacgcgcagtacaacgtcaccatccattggcacggcatccggcagttcaggacggggtgggcggacgggccggagttcgtgacacagtgcccgatcaagccgggcggcagctacaagtaccggttcaccatcgaggggcaggagggcacgctgtggtggcacgcgcacagctcctggctcagggccaccgtctacggcgcgctcatcatccgccccagggagaacaagacctaccccttcgagaagcccgcgcgagaagtcccccttattctcggggaatggtgggacgcggacccgatccaagtcatcagggaggctcagaggaccggcgccgcgccgaacatctccgacgcgtacaccatcaacggtcagcctggtgatctgtacaactgctccaaggaaggtagaaaatcactcactctagtatgcgtgttctaccagccagtgtgtgtgcgtcagtgcgtggcaaatttacagagacatgataacatgcatgcagagaccacggctgtcccggtgaagcccggcgagacggcgctgctgcggttcatcaacgcggcactcaaccaggagctgttcgtctcgatcgcgcagcacaagatgaccgtggtcggcgtcgacgcgtcctacaccaagccgttcaccacctcggtgctcatgatcgcgccgggccagaccaccgacgtcctcgtcaccatggaccaggcgcccacccggtactacctcgccgcgcgcgcctacgactccgcgcagggcgtggcctttgacaacaccaccaccacggccgtcatcgagtacgactgcggctgcgccaccgacttcggcccctccatcccgccggcgttcccggtcctcccggcgttcaacgacaccaacaccgccaccgccttcgccgcgggcatcaggagcccccacgaggtcaagatccccggccccgtcgacgagaacctcttcttcaccgtcggtgtcggcctgttcaactgcgagcccgggcagcagtgcggtggcccgaacaacactcgcttcacggccagcatgaacaacatctccttcgtcttcccgcagaccacctcgctcctccacgcgcactactacggcatccccggcgtgttcaccaccgacttcccggcgtacccgccggtgcagttcgactacacggcgcagaacgtcccccgctacctgtggcagcccgtcccggcgacgaagctgtacaagctcaagttcggctccgtggtgcagatcgtcctgcaggacaccagcatcgtctcgccggagaaccaccccatccacatccacggctacgacttctacatcctcgccgagggcttcggcaacttcgaccccaagaaggacgccaagaagttcaactacgtcgacccgccacagaggaacaccgtcgcggtgccgacaaacggctgggccgtcatccggttcgtcgccgacaaccctggggtgtggctcatgcattgccatcttgacgtgcacataacctggggcctggcaatggcgttcctggtggaggatgggtatggcaaactggagactctggaggcgcctcctgttgatcttccaatgtgctagtgatcagcattcggcagatgatgatactgcgttaagaatacaaaatcccgttcatgtcgtattccaaattgatgctttttgggggtttattttgtgatctccagtactaggggttgatttttcatcttgatttgagctttcccctgtaaagttaagagtttttatgtgatttctatgcattattttggaataaatcctttttgtagcaagtgttactc

SEQ ID NO: 52123 - DNA, 1644 bp, Oryza sativa
  Clone ID: PAT_MRT4530_5444C.1
cgggcggcccccgggccgccagttttttttttttttgagatgacacttgaaatcacacttgatttaatcatctccctacacttcaaatcacacttgatttaatcatctccctgcagttcaacatcaacaatttcagacatcttaacacaaatcagggagtgaggttgttcatggaatatgtagtgtcacagcctacttatttcattgacccagagtgggatcccaggctatgaaccacagaattatctcatcactacgacatgatctcaactacggctcgcccaacgatcttgccacggtcaagatcctcgtaggcgctgttcgcctcttcaaacttgcatttccttgatatggtgttcttaagattgaaggccccactctctgcaagcttgactatctgaggaagatcttgcctggcccttgcaccatacgacccaatgatcttcacctgtcggcgaacaagacgggttatatccacctcccccatcacatttgtggcagcaaggccaatcataacagctttgcctccatctcgtacacttttggcgcactgagaaaatgtcaatgccttaccaagtgcttccacagctacatccacacccctcccatcagtaatttccttaatcttttcaactgcatcttcttttgcagcatttacagtatgggttgctccaagtgttctagcattctggagtttctcatcaagaacatccactgcaatgacttcggaagctccaaaggctttggctatctgtaaacagcttgacccaacccctccgactccaatcacagctactgaatccccagcacgcatttcagcagcatgcctcagggcgccgtatgcagtgaacacggcacatcctagaatcgccgactctgtgtatggcaaagagttgggaagaactgctagtgcgttggctggcacaacgcaatattctgcaagcccacccatactatacatgtacactggctttccattgctacgaaggaataatcgggtttgaccatcgtatagcgttcctttagcacggttgtatgcaaagaaagactcacacagatcttcttggcccttaacacagtagaagcaattcccacagggcattatgaaggcacccacaacatgactgccaactgggaacctgttgatgatctcagcaggggtgtgagtaccatggtcaacaacctccccagtgatctcatgcccaacaacgcaggggctggagaatgggagctcacccttgagaacatggagatcggagtggcaaactccacaagctttggtcttgatgaggagctcgccggccttggggcgcggcatgcggaagtcctcgagggtgagagggcggccgggctcccagaacaccgcgccgcgcatgaagctgggcccgccggcgacgtggtaccccggggaggatgccgggtccggctccgacgagaaggggcggcggaacgcgccgccgattcgtcggaggatggggagcgcggcggcgccggcgcggcgggaagcggaggtgatagacatggaaagccgcttgctttgtcagcaactctcaactcaactcaactagtgaccaaagtgtcgaatgcagatcagattgatgcttatatttgtatgcttaaaactctttttttcttaagattcat

SEQ ID NO: 52124 - DNA, 549 bp, Oryza sativa
  unsure (1)..(549): unsure at all n locations
  Clone ID: PAT_MRT4530_54450C.1
ccaacaacagcatcaagaacaaggatgacaggacttggctcaccatgtggcgcgtgcaagttcctacgcaggaagtgtgtgaaggggtgtgtcttcgccccatacttctgccatgagcaaggtgctgcacactttgccgctatccataaggtatttggggcaagtaatgcctcaaagatccttatgcatctccctgttagtgaccgctgcgaggctgcagtgaccatgtcatatggaggcgcaggctaggctacgcgatccaatatatggttgtgtcgcgcacatcttctctctgcaacagcaggtgagcaagttcttcattagtattcagtacattacaatgagggttttggttcagaattatttttttttattaaaagaagtggttttattcttcatggagtgggaaaaactcacctggtgagtgttgagaactcaagggctcacgggctaatcctaactaatctgnatgatcataaaagggttttgaagtatcacaaganaaaacagttaagaagtatccccctctttctttgtttgaaaaaaaaa

SEQ ID NO: 52125 - DNA, 642 bp, Oryza sativa
  Clone ID: PAT_MRT4530_54451C.1
gccgagggtgaacgctccctgcatacatattagtgttagcgtgctacatatatatagcaaagtgatgtgtgatagagctgcatttgcacctgcacctacagagaggaagatggagcagcaagctagcaatacgtgcttgatcgctatacgctagcttcttgcacacaatgttgttcctggtcccttcctgatccctaggtgcagaggcagatgcaactgtgtcatagacttcacatccatctttagttacttaccactatatattcaataaattagctagcaccctagttctcttgctgattcctttcaaaaaaatcttcagttacttgctccttctaatccttttttatagttatttcactccatgaagtttcaatcaatgagcatgcggctagctagatagttttaaaaaatagcataaataattttgatgatatagattattctcagtggtggagccaggataaaattatagtgggggctcctcagccttttgggccttctaaccatctcagacaaagtctattttagcccccttgcaatagatttatagatttacattttaggggggggggggtcttaatgggggctctaatgatttattaggggggtgggggggggggggtatcctattgtccttat

SEQ ID NO: 52126 - DNA, 305 bp, Oryza sativa
  Clone ID: PAT_MRT4530_54452C.1
gtactcttaatgaggaggtggcgagcatggacaagcggtggaaaaaggacctataatattccatcttccatcttacatgctgctgccaaatgcgagacaacaggatgaggaccaacaggaccatgtcgaggaaggcctactttgtcaccgtcaaaaggcttgaaagggacacgggcgggctgtacaacgccctcaagattagcactctctcgagaggggatgatggtcataagtagcttgatgccgtgtcaaaatacgctgcgaaggatgctttccagtggggattgaaacccggggtgtactct

SEQ ID NO: 52127 - DNA, 135 bp, Oryza sativa
  Clone ID: PAT_MRT4530_54453C.1
atgtgccggtgtggtgcaaaagcggcgcagtggatctcctggagcatggacaacccaggccggtgggcgccggttgcaatctttttgggtggtatgacccccaacaagcagctttttgagggagttgttgaatga

SEQ ID NO: 52128 - DNA, 380 bp, Oryza sativa
  unsure (1)..(380): unsure at all n locations
  Clone ID: PAT_MRT4530_54454C.1
atcaatggctctcacaagaggaagatgaaaaaaccgaggggaaagaattcactgaaggaagaactgaagtacttcaagaaagatattctttagttcttctgagcagaggaaagggatagatgatgcataggacaaatgggaagcaatggtaatcgcggtcgcaagcactaaagctgagatgttcaccttgtgtgtttcctggtataatgaaagaatatgtatcagggggaccaatagggtagggtncagttattatggtctacattcctgaaaaccttgatctgtaatccttgatgcgcgggtcaggcttaccaagtaccaacgctatttattaggagtcgtgggatggttaccctgtacctgggattgctattttgttg

SEQ ID NO: 52129 - DNA, 272 bp, Oryza sativa
  Clone ID: PAT_MRT4530_54455C.1
ggtccggaattaccgcctcgaccacgcgtccgaaccactttcacgcgtacacaccctgtatcgtctgacgcattttctagcccggccgattcggatactgagcttgattctgatcgtgtgtgtggtctgctaggcgactgccggcaccaggccactcaccgccgtttcgctgataacggaagcgagggggaagtaggagagaagcgcatgccagggtgaccccatcggcttttttttatcagcatcttcttgctggctaggcacggtgctca

SEQ ID NO: 52130 - DNA, 813 bp, Oryza sativa
  Clone ID: PAT_MRT4530_54456C.1
gtactgttaggcacacacaaaaatttcacccctgaatactgaaagatagctagctcatcagacatatctgaactgcagaatggatgcagtttctgagtgcagatcagagttggcactgccctgaatttgttgccattgcatcatgtaattgttttggtggtgggtatagtcgatatatcattgtagcgtcttaagttggaggtacgcgggttagcgagttgggttggtgatgcgtggtggtggatggcgaggctgtgagttcgtcggtgatagggggtggtggctccgtggctcttgctgggtttgggcgtgggccatttggccatggctgcaaatttggccgctgccatgggggtggcttcggtgaaggcgaaggctttggtgggggtggtgggttcggtggtggtggaggtggcgggctaggtggaggtggaggtggacttggtggaggacatggtggtgggttcggaggaggtggaggtttaggtggcggtgctagtggcggtgttgggggtggagggggttttggtggtggacgaggaggtgggcttggtggcggacaaggtggcggctttggtggaggatctggagctggaggtggtgcgggtggtggtcttggaggtggaggtggctttggaggaggaggtggaggaggattacgcggtggtggtggccatggtggtgggtttcgtgctggaggtgctgtaggcggctaagcgggtattctattcgatggtggtggctgctttgtcgctcgtgtaggacgagtcatgagtgtgcgacatgattgcgccatcggaggtggatctggcg

SEQ ID NO: 52131 - DNA, 1494 bp, Oryza sativa
  Clone ID: PAT_MRT4530_54457C.1
gacccttatgctcattattctcctatctcaacgcctgtaccggctgctgttagtggagatggtcagctctactctcctcagcagttctccttctcggctccttactaccagcaatcagtaccacctggcatgccatatttaagctctcctactccaatatcacagggtgaggcaatgactctgagtcctaacagcttccttttcggaccaagacctggttattatctatcttatgccttgttcagctgatactcctaattcaggtttcactttttaggcatgattttaaccttttatctcatgatgataatttcagaatggttccgatcgtctgaaggaaatgggtcgtttccatcacctgcggcttcacctcaacctgctggtggcgtttcagggccctttggacaaagcaacttccctatgcgttctggaatgcaatctcctcagcacaggcccttctatggttttgggacaccaagtgactcttacggaagagtgttctctcatggtggatatttcccacaggccactaattatgggggccctttccctagctttggcctgaatggtacgagttctattccgatggaaaaaggccgcaggagaggaaggggcaatgctcttctttgcagctgcaatggttcacttgacttcctcaatgagcaaagccgaggcccacgtgccactaggcctaagaagcaaccagaggatggcggcaaggatgagaagccttctgcaggcgttgattgcgagttgtacaacaggcctgactttgttacagagtacaagaatgccagatttttcatcataaaatcatacagcgaagacaatgtgcacaagagcatcaaatatggtgtttgggctagcaccacaaacgggaacaagaaactagactcagcctaccgtgaagcaaaggagaaagaagagcattgcccaatttttctgctgttttcggtgaatgctagtgcacaattctgtggtgttgcagagatgattgggccagtggattttgagaagagtgttgactattggcagcaagataagtggactggccagttccctgttaagtggcacattgtgaaggatgttccaaataatcttttccgccatataattcttgaaaacaatgataataaacctgtgaccaacagccgggacacacaagaggtaaaactcgaacaaggtatggagatgctgaaaatcttcaaggatcatgaggaggatgcatcgatactcgatgactttgacttctacgaggagcgtgagagagccctgctggacaataaggcgcggctgcatcagcaacatcagctgcccagctctactgtggttgagcccaagaagcccttgactgtggccactgatctagttggtcatataactaagagctttgcgcaggcagttcggcttggtgaggccaagaatgagatcatcagcgcgaggtcgacgacgacgacgacgaccaccgccgccgccggcgacgtcaacctcgac

SEQ ID NO: 52132 - DNA, 264 bp, Oryza sativa
  Clone ID: PAT_MRT4530_54458C.1
atggagggcaaggcggtggttgtgaaggggaagatccggtcgctgttgactcaagcgtctcccatccctcccacagcgacgccttgccgcctatcgcttctctccagcagcgatggtgtggccaccgtcgatgcaaatgacctggccactaatatatccactgcctccctcggcggcaccctccttgtcgcccgtcgcatcaagtggagagagaagaagggaggatggaggaagatgaaattgacatgtgggtcccacgtctag

SEQ ID NO: 52133 - DNA, 342 bp, Oryza sativa
  Clone ID: PAT_MRT4530_54459C.1
ggagcggctgttcaacgcccatatcaattagcttctcaaccacgaggagttcggcgcgctgctgcaggagttcaagacggactataaccacacccacttctttcgtaaccacggagttcaaggccgccggcgacaagatgtgggggcctctcaagcagatcttagtggagttcctcgagcgctcctgcaccgtggagtcctccgggttcctgctctacaaggagctcggccacatgctcatgataacaaacccagtggtggttgacatctttctagcttatgtcctgggcatgaagcccaggacgctgggttctttaacaatatccttttttgacttatact

SEQ ID NO: 52134 - DNA, 816 bp, Oryza sativa
  Clone ID: PAT_MRT4530_5445C.1
atgtgcttcttctccaactccggtaacctcctcttcttctccggcgccggcgaattagggtcccggggtggggtggggtggaggtgggaggggaagaagggggaggtggccgggctcagagggatggccatgagaggtggcagcccggccaccgcggaatgcggcactcatctcgacaacctcaagtcatcgccaacaagggaagggggtgacggtggcctagatgtggctagccgcatggctgaggagatggcggggttcatctggcatagcctcaccaagcttgagttggtgggcatggaccgggcacaagcccctcgatttgaatggtcttggtccattgttccaagcccgatgtcgacaccttctactcagatccaacaacatgcggcagtgagctccctttcagcctctccatacggtggctcaaaggggaggaggaaggcggcctggctcggctcggcttcaaggcggccggccggttatggtgagggcggctgcgcgagcgcgtcgtctgcgacgacaatcggcggcgagaggcggcggcgggcggtgcgaaaggcagcggcgaccggcgcgaagggcggcgacgcacggcgcagcccggcgctaggagggagaggaagggagaaaaagagggggagggaggcctcaccggggattcggccggcgtgggtgaagacgacggcggacggcggcggcaagcggcggatggcggggggcaaccgagcggcggccgggatagctcccatgacggcgaagctagcagcggcgacggcgtggcgcagcggcggcggcgcatggccggaggcgtag

SEQ ID NO: 52135 - DNA, 2148 bp, Oryza sativa
  Clone ID: PAT_MRT4530_54460C.1
atggccttcccagatgatgatgaaaagatgaagggttgccggccaaaactttttggaacaaaagataagaaagttgtgaagagggcagattaccaaagctgttctgcagctcatctagttgaatcaggggaattgctcaagtcagttgggcaatcagccaactacattcataagttaagtccgggccaagttcctcaaagtcacaatcttcttcccccttcagaacacttacaggaagtttttgcagaagttaggagcatacgcctcagccatttacttggtcactcttcaagtactactaaaactgaacctttcaggatatttgtatctacatggaatgtcggaggaaacacgcctactgctgaattaaacctggatgacttccttcctgctgatgacaattcagatatttatgttttaggttttcaggaaattgtccctctcaatgctggtaatgtgcttgtcgtagaagacaatgaaccagctgcaaggtggcttgctcttataaaccgaacgctaaacaaaccagttgacagtaatgctgatatcttccagcacaagccatcttcttcccttgattcaacctcgtctctgtcttcatcaaaccttgatgcctcattctccagccgcacaagaacagctagtggtagttctgcaatcttccagaagtcctccttgaagtctatcaggaagccttacatgccaacccagagaaaactgctcaaactctgcaattgctcagttgagatgactaggaagtcctacaaagatgcttgctttggatgtccacaagcatatgctaatgagacggactcttcagaagatgatacagatgatagatcgaatgatccttgtggttatatagttgatggaatgaattctgctgcctctgcctccagggatcagctaaaatacaacctcgtatcgtgcaaacgaatggttgggatttttatcacggtgtgggcaaagaaagaacttgtgcatcatataggccatgtgagaacgtcttgtataggtcgtggaataatgggctatctgggaaacaagggatgtatatcagtgagcatgacggtgcaccagacaagtttctgcttcatctgtagccatttggcttcaggtgagaaagagggtgatgagctgaggcggaatttagatgttttagagatactgagactcacgcaatttcaaaggatttgtagagctgggccgagaattcctgagagggttcttgaccacgatcgagtgatatggctgggagatctaaactaccgtatttccttgagctatgaagataccaagaaacttcttactgaaaataactgggatgccctttttgaaaaggaccagcttaacatcgagcgcaagtctggaagggtgttcaagggttggagtgaggagaagatatattttgctcccacatacaagtattctagtaactcagattcttatgctggagagactgcaacatcaaagaaaaagaggagaacccccgcctggttacaactttattggtgtgacagaatactatggcatggagatggcattgtgcagttgtcctacttccgtggggagtccaaattttcggatcaccgtcctgtctgtggaacatttattgttgatgttgaaatacaagagagcagatcaaagaggcgatcatctaataccaacatcagaataggtgctgaagaactcttaccaactagtaagagtaaggctaataaaaataagggcaataaaggttctgggacctaaaccctattggaaattaaattggtagcaacagcaacttgtactaagatactgaagaatatttccatcggcacctgtaggtatttattccaaacagattatttttttgtgacaggggaaaggtgattaccaagtcgtacagaaaatgtagtgcatatatactttccaaagggaaaggtgattatattatactcgaacaattttccacattctttttgttcttttgggtagaacaagtgtgcctatgcatagctatccagaatccattgacccccttgtattattgtgtctgtctgatcagtttgaacttttctgtaacaaaattgtactgagaacgaggcattattcccaaatgtacattatgttatcttaacaaaaaaaaaaaaaaaaaaaaaaaaa

SEQ ID NO: 52136 - DNA, 324 bp, Oryza sativa
  Clone ID: PAT_MRT4530_54461C.1
atggcgagctcaccggcaaacgtggggaacggagctccggagtcaatcggcggcaaccaaacggcggtcgaggtgcgggcgggctcggtgagcgcgacggcggcgattgcgtggcgcgacgacgactctagcggcggcggcgcacggccggagatgggcggcgacagcggagctcgggtgtggcgtggggagagcgcggcggcacgtggccagagagcggcggcggcggaggagctttgcgagcgcgacgtggtggggggcacgggaggggagaacgtggccgggaaccctcccgatttggccggcgacgtgggaaggtggtga

SEQ ID NO: 52137 - DNA, 1134 bp, Oryza sativa
  Clone ID: PAT_MRT4530_54462C.1
atgggaaggctaatcgtaacactgctcgtgctgtgcgccgcggcgactacgtgccccgcggcgcttcgcgggcacgacccccggcgagccatgcgcggccgcctcctcgccgacggcggcggcgcggtcgtgccgttccactggtcccccgagctctacaacgtggcgaacttcaccatcggcacgccgccgcaggccgcgtcggcgttcatcgatctcaccggcgagctcgtctggacgcagtgctcgcagtgcatccactgcttcaagcaggacctgcccgtgttcgtcccgaacgcgtcgtccaccttcaagccggagccgtgcggcaccgacgtctgcaagtccatcccgacgcccaagtgcgccagcgacgtgtgcgcctacgacggggtcaccgggctgggcgggccaccgtcggcatcgtcgccactgacacgttcgccatcgggacggcggcgccggcgagcctcggcttcggggaggacgccgtggtcgctcgtcgcgcagatgaagctcaccaggttctcctactgcctggcgccacacgacaccgggaagaacagccggctgttcctcggcgcctccgccaaactggccggcggcggcgcctggacgccgttcgtcaagacctctcccaacgatggcatgagccaatattatccgatcgagttggaggagatcaaggccggcgacgcgacgatcacgatgcctcggggccgcaacaccgtcctggtccagaccgccgtcgtgcgggtcagcttgctggtcgacagcgtgtaccaggaattcaagaaggcggtgatggcttccgtcggcgccgcgccgacggcgacgccggtgggggcgcccttcgaggtctgcttcccgaaggcgggggtcagcggcgcgccggacctcgtgttcacgttccaggccggcgccgcgctgacggtgccgccggcgaactacctgttcgacgttgggaacgacacggtttgcttgtcggtgatgagcatcgcgctgctgaacatcacggcgttggacgggctgaacatcctgggaagctttcagcaggagaacgtccatctcctcttcgacctcgacaaggacatgctctccttcgagcctgcagactgcagctcactctcctaa

SEQ ID NO: 52138 - DNA, 1305 bp, Oryza sativa
  Clone ID: PAT_MRT4530_54463C.1
gtgcactgcgaagctacacttaccactgcaaccactgatcacagagctagaggttcacttaggcgaagcttaattacacagagcgcccatggcgtcgaggcaggacaggagggaggcgcgggccgaggccgacgcgcggcgcgcggcggaggagatcgcgcgggcgcgggacgagcgcgtcatgcaggcggaggtggacgcccggtcggccgcggacgagatcgcccgcgcccgcgccgaccgcggcgccgccacgatgggcgccgacaccgcccaccacgccgccggcggcggcggcatcctggagagcgtgcaggagggcgccaagtcgttcgtgagcgccgtcgggcgcacgttcggcggcgcgagggacaccgccgcggagaagacctcccagacggcggacgccacccgggacaagctcggcgagtacaaggactacaccgccgacaaggcccgcgagaccaacgacagcgtcgcgcggaagacgaacgagacggcggacgcctcccgtgacaagctcggcgagtacaaggactacaccgccgacaagacccgggagaccaaggacgccgtggcgcaaaaggcgagcgacgcctccgaggcgaccaagaacaagctgggcgagtacaaggacgcgctggccaggaagacgcgcgacgccaaggacaccaccgcgcagaaggcgacggagttcaaggacggcgtgaaggcgacggcgcaggagacgagggacgccaccgccgacacggcgaggaaggccaaggacgccaccaaggacaccacccagaccgccgccgacaaggccagggagacggccgccacccacgacgacgccaccgacaaggggcaagggcagggcctgctcggggcgctggggaacgtgacgggggcgatcaaggagaagctgacggtgagcccggcggcgacgcaggagcatctgggcggcggcgaggagcgcgcggtgaaggagcgcgcggcggaaaaggcggcgtcggtgtacttcgaggagaaggaccggctgacgagggagcgcgcggcggagcgggtggacaagtgcgtggagaagtgcgtcgaggggtgccccgacgccacctgcgcccaccgccacggcaagatgtgatcccccatgagcgcggtggacgactaataaaaaaaactcccagcatgttaacctttgtgtttcaagtttcactagctgcttttattttgctttcgttaagtttccactaccgtgtatgttccttctggtaatctaagtgcagtggtgctgaaatcaatataaagcccttcagtttaccgctt

SEQ ID NO: 52139 - DNA, 285 bp, Oryza sativa
  Clone ID: PAT_MRT4530_54464C.1
gacccacgtgaaccctgctgctgtctgctgctaccgtatctatcacgctactgctattacctgcctatgtacccttcgagggcacctgtagaccacgtgtgtcgtccaccagttacccacggtttgagattccgattggacacaagttaaaactatactgcattaattaattttaccttgagaacatacgtggttcatcatgtatttcatcacatgaatcttttctagagcgtttgatatacatacctcgtgttttgcctctgccaaaaaaaaaaaaaaaaaaaa

SEQ ID NO: 52140 - DNA, 435 bp, Oryza sativa
  Clone ID: PAT_MRT4530_54465C.1
cccacgcttccgcagacaaggagagaggctaataggaaggcgagaagctcgtcgtcgcgggggcgcgcgcagccaacaccagctctccgtctagggggctgagtccacctggcctcatgcccctgggctgtcgatccgtcaactagaactggaggaccctcagcaaggggggatggatcaggtgcatgcaggtgcggccgattgagggcatgacgaagttcgcgaccgtctactacctgccagcgttcacctgggaggacctactgaagcatatcgagtacctgctccgtatcaagtgggtgccctgcctcgagttcagcaaggtcggattcgtctaccgtgagaaccacatatcccccgtatactacgattgcaggtactggaccattgggaagttgcccacgttcggttgcactgactccaaccaagtgctta

SEQ ID NO: 52141 - DNA, 1194 bp, Oryza sativa
  Clone ID: PAT_MRT4530_54466C.1
atgggaaggctaatcgtaacactgctcgtgctgtgcgccgcggcgacgacgtgcgccgcggcgcttcgcgggcacgacccccggcgagccatgcgcggccgcctcctcgccgacggcggcggcgcggtcgtgccgttccactggtcccccgagctctacaacgtggcgaacttcaccatcggcacgccgccgcaggccgcgtcggcgttcatcgatctcaccggcgagctcgtctggacgcagtgctcgcagtgcatccactgcttcaagcaggacctgcccgtgttcgtcccgaacgcgtcgtccaccttcaagccggagccgtgcggcaccgacgtctgcaagtccatcccgacgcccaagtgcgccagcgacgtgtgcgcctacgacggggtcaccgggctgggcgggcacaccgtcggcatcgtcgccactgacacgttcgccatcgggacggcggcgccggcgagcctcggcttcgggtgcgtcgtggcgagcgacatcgacaccatgggcgggccttccgggttcatcgggttagggaggacgccgtggtcgctcgtcgcgcagatgaagctcaccaggttctcctactgcctggcgccacacgacaccgggaagaacagccggctgttcctcggcgcctccgccaaactggccggcggcggcgcctggacgccgttcgtcaagacctctcccaacgatggcatgagccaatattatccgatcgagttggaggagatcaaggccggcgacgcgacgatcacgatgcctcggggccgcaacaccgtcctggtccagaccgccgtcgtgcgggtcagcttgctggtcgacagcgtgtaccaggaattcaagaaggcggtgatggcttccgtcggcgccgcgccgacggcgacgccggtgggggcgcccttcgaggtctgcttcccgaaggcgggggtcagcggcgcgccggacctcgtgttcacgttccaggccggcgccgcgctgacggtgccgccggcgaactacctgttcgacgttgggaacgacacggtttgcttgtcggtgatgagcatcgcgctgctgaacatcacggcgttggacgggctgaacatcctgggaagctttcagcaggagaacgtccatctcctcttcgacctcgacaaggacatgctctccttcgagcctgcagactgcagctcactctcctaa

SEQ ID NO: 52142 - DNA, 576 bp, Oryza sativa
  Clone ID: PAT_MRT4530_54467C.1
atggccagccaaagccggcttaccatcagtggggcccatgccttcttcccctatctctctttccctgaatactctctgatccaccggaatctgcccgctgtgtcgtcgcctcttccgccagtggacggagaggcctcccgcccgccgggtcaccgcctccactgcctacgtcctcgtccgttaccgtctcgtatcgtcccaaccgaagccatggaaggaaggagcaagaggcgtcatcgtcttgggaagcctccgcccgatctccaagccggcgccgtagggggttgtgctgatggcagaggaaataagggaccggcgcctcctaccagcacatctcgtggacgagcaacctcacactcctcggctccacctcgctcctgttggacgctgacggcttcgcacccaccaccccgttccgctgctggcttcgcactcaccaccccgttccgcgtcggcgttggcaccaaccgcacagtcttctcggagcaccatcctcacaaggcgctacccatcacctccgccccatccaggaccgacgctgccgcttcgatggatgccccagtaggagaaaattag

SEQ ID NO: 52143 - DNA, 2778 bp, Oryza sativa
  Clone ID: PAT_MRT4530_54468C.1
atgcggcgccaccaccacctcctcggcctcctccgccgcgccacggcctcgccgacgcccgcctcccgccgcgcgggcccaccactccccggcctcctccaggacccgctgcggaatggcgccgccgccgctggcccccgcttcttctcctcgcgcgccggccccggcgccggagctgccgcgaagagcctgatcgaggacgaggccgagctcagcgactggatcagcgacctcaagaccgactcgttccacctcggcctcagcagcggcgacgaaggcgaggcctccacgcgcgggccggctgcctcgaggggaggccggagggggcgggactcgaggggcccgccgccgaggtcgagattcggtggcggtgatttcggcggcgataggcgtgggtttgagaggagggggaggatggtgagtaataatgagctgggtgacgacgatgatgatgaggatgaggtcgggtttggttccgcgaggggaaggcgggatcggggagggagacagtcagaattttcacatagaggaaggaggggaaatgatcggggagggagacagtcagaattttcgtatggagggaggagggcaaacgattttgatgatgatggtggtgggtttcggtctacaagggggcagcgcggccgaggtgggaggttggcaaatgtgtcgcggaggggatatgattttgatgatgagcctgggtttcaatctccaaagggacagcgcggccagggcgggaggtacagtgatttggatgatgatgaaggtgggtttgggtctctgaggggaagacgcggtcgcggtggaaggatgtctggtgtatcgcggagaggtgggaggggaagtgatttagatgacagtgaggatgatgaatactcaagaggttcgtctccaaggggaagacgtggtcgtggtggaaggatgtctggtgtgtcacggaaaggtgggaggggaagtgatttagatgacagtgaggatgatgaaaacgattctattgactctagaggcagaaggcgcgaccatggcacgagaggcaggaatgtgggaagtttgggaccacagagaggtgggagagggggcgatgcagattttagcgataggcggtcgaggggtggtaaaatgtttgattttggcttgtcagaagatgacagtgagctgggggaagttgatgaggatgatggtccatcaggcttcgaggatgatctctttgatgacgagggtggtgagaagaatctggtggagagtccagctaaaaattcagctccttttgagtcaattaaaggagagccaattgatcaggagggtgttgtgcacaccagagagagtggaggtggcgattcgtatttgagccagacgagtattaaactctggacatatggtgaaataagcaaagatgcaatcgtcttgatcctaagcttgaattgcaacttttctagcccataccatgtactaacaagccttatatatataggtaaggatgttcttgcaaaagcaaaaactgggactggaaaaactgtagcattcttgcttcctgccattgaagttgtctccaaattgccccctattgattgtgataaaaaaaggcctcccatcagtgttgttgttgtgtgccctacacgtgagctggctgatcaggctgctgcagaagctaacaagctcctgaaatttcatccatcaattggagtgcaacttgtaataggtggcactagaatggctctagagcagaagcgaatgcatactaacccttgccagattctagtagctacaccaggaaggcttaaggatcatatggagaacactccagggtttgctactagattgatgggtgtcaaagtccttattcttgatgaagcggatcgcttattagatatgggattccggactgatatcgagagaatagtggctgcactcccaaagcagcgtcaaacacttctattttctgcaactgttcctgatgaggtacgccaagtatgccacattgccatgaaaagagatcttgaatttgtgaacaccgttgaagaaggaagtgaggaaacacactcacaggtgaagcaaatgcatgtagttgcaccactagacaaacagttttctatcctgtatggtcttctaactgatcatatttcagaaaatgttgactacaagttgaatgtacgcgagattcactccagaaagccacaaagttacagaaccagaatatccaaagaatttaaggaatcaaaaggtcttattcttgttagctccgatgtatctgctaggggcgttgattatcccaatgtcacactagtcgtccagatgggagtgcctactgacagagaacaatatattcatcgacttggtagaactggccgcagaggaaacgaggggagtggaatcttattattggcaccgtgggaagaatacttcttgagaagtatcaaagatctgcctattacagaggcaacattacctttaattgatctggacactaaaagaaaggttgaaaaggctcttgcacatgtggaggttaaggataaggaacttgcctaccaagcatggctcggttactataattctaacaagttcattgggcgtgacaaataccagcttgtatcacttgccaatgaattcagcagaagtctgggcttgaataaccctcctgcggtgcctaagcttgtccttagaaagatgggactgaacaatatcccagtgtatgctacaactcttggcactttatacaaggtgaaggacatgagtgtccttgcgctaaaaaatataggcaatcttagcatccgttaa

SEQ ID NO: 52144 - DNA, 225 bp, Oryza sativa
  Clone ID: PAT_MRT4530_54469C.1
caaacgcacactaaccaatgctgaaccgggggatgattctgagcctaattggtgccgaatcgctggctctctatgcgtgctcatagtcggcctgaatcctgtcatgtccgaactggccaacctctgagcggattactgcgatgtatcaacactgcaaaccactgagctggagctctaggtgcataattcctgaaatcatacaagcgtgatctctgatgggtttat

SEQ ID NO: 52145 - DNA, 693 bp, Oryza sativa
  Clone ID: PAT_MRT4530_5446C.1
atgggattcatttcgaatcctcccccctctctctctccacctcccacgttgccggccaaatcggccaccttctcggcctcgtccgcctcccccttcgcctataaaacattcccccgagccccctctctctttttccccactcgccgtgctctctcgtgcctcctacctccatcgcgccgctcgccactagcaccgccgcttgcctacgcctccggccatgcgccgccgccgctgcgccacgccgtcgccgctgctagcttcgccgtcatgggagctatcccggccgccgctcggttgcccctaccgccgtcgcaccgctctccccacgccaagccacgcgccgccgcccattgttgcctccatccgtcgctagccgccgctagggccatcgtcgagccactccgtcatcgtcgtcggcctcgcgacgtcgagagccgcctcgtccaccccgcgcaccccgccatccgccgcttgccgccgccgtccgccgtcgtcttcacccacgccggccgaatccccggtgaggcctccctccccctctttttctcccttcctctccctcctagcgccgggctgcgccgtgcgtcgccgcccttcgcgccggtcgccgctgcctttcgcaccgcccgccgccgcctctcgccgccgattgtcgtcgcagacgacgcgctcgcgcagccgccctcaccataa

SEQ ID NO: 52146 - DNA, 285 bp, Oryza sativa
  Clone ID: PAT_MRT4530_54470C.1
atgacgcagaaggcgccggagaaggaggcggcggcgatggcgtgctaccggaggacggtgggggaggaggcgacgttcaaggagagatccaaggacctgttccggcagttcaaggacgcgccggcgggggatcactgggtctgcctcaagaacaaggtccgcgccgccggcgagtacgccaccctccgtactcgccagggcatcaccatgttcggcgagccaaatgtcggcgacctcttgggaagaaccaaggatgacgactccaagaagacgccttccgcgtaa

SEQ ID NO: 52147 - DNA, 411 bp, Oryza sativa
  Clone ID: PAT_MRT4530_54471C.1
atggcggaccaagtcccgagagagagagagagagagctgacagagagagaagtgagcacgcaacggcaagctgcgtccgtcgtcttcttcgtcgcaacaggtaattcagatgcagtctgcccgctgtgtgctcactctcttctgtcagccagccgcggccaccgccatcggttctcgtcgcccccacatccgtccatccatccacgacacaccatcccgtcgtcgaccaccgcgatccaatcgcggatcaacacggtgaccaagcatcagagagagagagagagagagagaggaaaagacgaccaccctgtcaaacaagtacgactatggcggaaggagccaagaagaggccagatctggggaggtctcgtcttcttcttcctcaaaccgttccggtggagccggccttaa

SEQ ID NO: 52148 - DNA, 1914 bp, Oryza sativa
  Clone ID: PAT_MRT4530_54472C.1
atgacatgggataataggattaaggaggagtcttccctcctcattgcccttttaatacgtcttagacacccagacattgacttagatgcctcgggagaagtagcattaggatttaagaccgttccccattttagctgtaccaagagagacaaaggtacacaagattaccagaaagaggccaggagcatgtcatccaagaagaagagagctgccatagatctctccctggaggcagagagaagacggccagaagaacgcggcggcggcagcgatcgcgaagccagcgatggcgccgctgctgcagctgaggaagatggtgatgtcaagcaacgagagggccctaaagaggaaaccggcggcgaggaggagaaggtagttgaagtggttgtggaccaaggagaagacggctccaatgaggagatcaaatataggactcaacaagcagagatgatcgaggaggacaagcaaccagctgcagcagcaaacgtcgacgacgatggcggcgacagcgacggagtcggagctagcgcggaagagaagcacatggtaacagaggccaccggcggcgaaggcgacgacggaggcgatagccgtacccccatggcgcaagatgagctcagcgagatgcaggaggagatggagaggatgaaggaggagaaccggatgctccggcgagtcgtcgacaagacggtgcgcgactactacgagctgcagatgaagctagccgcctaccagcagcaaccggcagcagcagatgagcctaaggagaccgaggtgttcctctccctcggcgcaacggccgccgcctccgccggctgcggcggcggcttcccggaggcgaagagcaaggagcaggccgcgtggcggcggcgctctgtcggaagcgacgacagcgactgcggcaaggaggatctagggctgtcccttagcctgggagcgtcgtcgtcgtacgacgacgaccagaaggcggtggaagcaaggccgcacgacgtcgacggcgcggcggctgcggccatgatcggcggcgacggcagcaggccggcgccgagggggtacccgctgctggagagcagcaaggtgcagggtggcgcggcgccggccgccggcgagctcgccgcggccggcggcatcacgagccagagcgtcaacccggccaaccgcaaaactagggtttcagttcgagtccggtgccaaggccccaccatgaacgatgggtgccaatggcggaaatacgggcagaaggtcgccaagggcaacccgtgcccgcgagcttactaccggtgcaccgtcgcgccgggctgcccggtgcggaagcaggtgcagagatgcctcgaggacatgtcgatcctggtgacgacgtacgagggcacgcacaaccacccgctccccgtcggcgccaccgccatggcgtccaccacctccgccgcggccaccttcatgcttctctccagcaccacctcctcctcctccgtctccgacgcctccgccgcgccgtcgtcgtcctacctcagcccgtacctgctcaactccgcctcgccgttgctaatgccgggcgccaccggcggcggcggcggcatgcagcatctcaacctgttcgggaattcgccgtcgtcgtcgtctctgctagctccgcaagcgccaggctccagcaagtacccgtggtctccgaaccaccctccgctcgccggcgccggaggtaataagagaccgttctggagcgccggcggcgacggggacaagccggcgccggcggcattggccgagaacgtcggcgcggtgatgtcggacccgaacaagttctcggcggcgatcgccgcggcgatcaacaacttcatggggaaagacggcgagagtagcagcggcaagagtagtagtaagtggggcgtggttgaatcacttccaccccatgagtag

SEQ ID NO: 52149 - DNA, 456 bp, Oryza sativa
  Clone ID: PAT_MRT4530_54473C.1
gtcgtcgccgtcgctcgggaaggtcgccttcgtggtcgccaagtcacagccgtcctcgtccgccacttcgccaccgccggagaccgccggagcatcgtcgccgtcatcaagccgaagaccgccgccgtttcttcctcgtcgccgtcgccgtccgttgctcctccgccgcttctttggtcgccggtgagtttgccgcgtcgccctctacccgttggtgccctccgttcgtgccgaagcgccgccgttcgccggcaagcgtgcgccgtccgagccgtccgagccgccgagccgccgccgccggtggtgacgtcatcgctggcgtcatcgtccccgtctcccgtgagctggtcgtggaccgatcgatctcggccgtccgttttggatggatcgatctcggccctccgttcccgtgaaccgtcgctgtgcgcccggtccaccgcaaaccctagccgctga

SEQ ID NO: 52150 - DNA, 485 bp, Oryza sativa
  Clone ID: PAT_MRT4530_54474C.1
tttctcattcctgctttatttctaaccttgtcatttctttgccaatttatatgtgcccttgattcctcgtttgctcatctgctctttttcgatatatatctatcttgttgtatcttcttttcgcatgacgagcgattcggctttttgcggctttcgatctatgctaccctagatacctgccaagaaagggcacatacaggttgattgattagccaatactgaattcattacaagagcttttagcctctcattgcctatgaaaatgctcacctacttttgtagatataaaaataaacccatcatatgagctaatgaagcacttcaagaaaaagtcaatttttatagcagattagagattgggctacagctagcctaaacacatgattgtggaggatgtttcagagtcctctatgactccatgctccatgacaaatgagctataaaatagcttaattctgaagcttcatatgaccccctcatggatg

SEQ ID NO: 52151 - DNA, 332 bp, Oryza sativa
  Clone ID: PAT_MRT4530_54475C.1
caatccattaggagtcgactcggctgctacttaattctcctggtggtcgccgtggaggtggactgagatcacattaacaatggagaaggctgatgttgtgctcgtgagcaaggagattgccaagggcactattcactttgtacaagagggagatggctgcaccactgagactggtagtgcatatggcctcaagcctggtgtacatgggttgcatattcatgcactagatgacaccaccaatggttgggtgtgaactggaccacactacaatggtgccggaaaggagcatggtgcaccagatgatgagacccgccatgctggtgaacctggaa

SEQ ID NO: 52152 - DNA, 453 bp, Oryza sativa
  Clone ID: PAT_MRT4530_54476C.1
atgggaaatttctcgtcggaggaggagccgccgccgtcgccgtcgccgccaccagcggacgaagacgtattaccgttcgaagagtacccgccgccatcgtccgacgaagaggaggaggaggagatcaaccaccccacgccacagacctccaacgaggcggctgacaggcgccctggattactcccggcctcgcgcaaggccatacagggcctgcgtgaggtgacggcggccggcgcgggagaagacgagtgcgccgtgtgcctgcaggatttcgaggcgggcgacaagctcaggatgatgccctgctgccacaccttccaccagcgctgcatcttcgactggctccgcctcagctgcatctgtcctctctgccgccacactctgcccacgcagaatgtggaggacgacaggcttgggcgcgctgcccacacagtggcaggatcaaccggctga

SEQ ID NO: 52153 - DNA, 393 bp, Oryza sativa
  unsure (1)..(393): unsure at all n locations
  Clone ID: PAT_MRT4530_54477C.1
ggagcantntnancngcggtggcaaccagtcagcaccttatttattaaaaaaaatatgggtcccacatgtcatactcatctttccatcttcctccctctcctctctcttctctcgcctcgtagagctccaccgccgaccagatgatgaggacgcctgaaccgtaaaatgatgaggacgcctgaaccggatncccgcctcgtagagctccnccnccgaccggatgatnccgccgttggcctcctcctcgtcgtcgtcgtngcggcggtcatctctcctggcggcggccgcctccttgacccccnaggtcaccgcgtgggtctatggtnctggccactgagcaaactcttgcggaacaagtcgagcgggtagagcgcccggtgttccttcgccng

SEQ ID NO: 52154 - DNA, 466 bp, Oryza sativa
  Clone ID: PAT_MRT4530_54478C.1
aagaaacactggctcatatgatagtgggcaagatgttgatctcttaaacctagtgagtacttcaagtttgttcatgaataattaaccaaacttctcaacatatatattacttgaatagatcaaccaatttggtgcaggtgtgggagcactggacaaggggaaacgttgtagagctgattgatccatccatgggcgaccatcctccaatcgagcagatgttgaagtgcatccacatcgggttgttgtgtgttcagaaaaaacctgcaagcaggccgacgatttcgtcagtaaacatcatgcttagcagcaacactgttcgtctcccttctctatccaggccggcgttctgcatccaggaagttagtgccagtgacagctctaatccgtattcagaacgctatccaagaccaagacattccgggtattctgataattcaacagtggtgtcttcgaatgatttgtcaat

SEQ ID NO: 52155 - DNA, 131 bp, Oryza sativa
  Clone ID: PAT_MRT4530_54479C.1
ccacgcgtccgaaaaatatatgatgtttgaatagttcaagcggctttagtttttagttattactcacaacagttctttaactaagggggcttcttatgcctactgtatttgcacagcatcaatctcttctt

SEQ ID NO: 52156 - DNA, 401 bp, Oryza sativa
  Clone ID: PAT_MRT4530_5447C.1
attatgggtcataagattttttgggttttccttttggatttatgggttggttggaaagaataaaagtcccagcctttaaaagggttttaatttgagtcattggtaccccattttccatttcccagtctttccacatagtccatgtaaaaaagggcaaaaagtttacctgcaggtaagggcccttcaaaaccctccaaaggagggtaaaggcttaaccaggggacttccgagggaaagcatgagtctggccctaatgggtttctttccaataaaggttattccaaaaccacttaccaggacccagagggatgacctgagggtaaatttccttaaattctgcaaggagcttggcgcccatcggaactggatacacactagaccagtgggaggcacgcccccca

SEQ ID NO: 52157 - DNA, 918 bp, Oryza sativa
  unsure (1)..(918): unsure at all n locations
  Clone ID: PAT_MRT4530_54480C.1
ttttaataattttattttttgnccatattcagactccattttattcaggaaataccatatagtactcactgacatacaacatattaatttattaatcatacggaaagagatgatcaagaggtctactcctacatggcactcacagaaatagaggaatattgaactgttcatcatgcagtccgaataaaaatcactgctgccgcagcatcgccctggccataatcttgtacttgtcctttggcgtgaaaaaggcggcgatgcgctctctgttgggcaaacacagcttcacggcatcgttggccgtgtactcgttggtccaccggcgcagagcgggatactcgtcatcgccatcgtcgccggcgaccaagctcactccggtaacctcctccagcacgccgacccagtgagccagcccaccggcggcgatgtccaggtagccgatggagtcacctgcaaagaacctcttccccccgagctgcgcttccaggagagccaggttctccttggtctccttcaagaaccccttctgctcctcgccctccaaccacagcgccagccatgacggcctcgtgctcttgtggtcgatgaagtgagcccaaaagcgagccatggcgcggtggtaggggtcggctggcaggaggggcgggccgttgaacgcctcgtcgatgtactcgacgatgacgagcgattcgcagacggcgcggtcgccatggaggagaacgggaaccttcttgtggatggggttcttggcgaggagcaggtcgctcttgttgttgaggtcctcgtggatgaactcataagctactcccttgagccgtagagccacctcagctcggtgcacgaatgggctgccaaaagcgccgatgagcttcaccagattggccatatatgtgcttgcttccaaatcggacgcgtggg

SEQ ID NO: 52158 - DNA, 469 bp, Oryza sativa
  unsure (1)..(469): unsure at all n locations
  Clone ID: PAT_MRT4530_54481C.1
cctttggtgcaggattccgcantagctcgtgccgaattcggcaccanctttccngaacttccnaannctaggcgancganagangcganacccntggacgcngacnccgtggcgaaagcgttcgtggancactactaccngacgtnngacacgaaccggccggcgctggtgtccctgtnccaggacnggtccatgctcaccttccanggccancaatttctcngcgccgccgccatcgccggnaagctcggntccctccccttcncgcagtgccaccncganatcnacnccgtccactgccanccgtccgggccgcanggnggnatgctcntcttcctctccggatccctccgcnccggtnnccaagaacaccccctcnanttctcccacaatattccanctgcttcccgctggaagcaacttctatgttcnnaacgacntgttccntctgaactatngttaaaggaaa

SEQ ID NO: 52159 - DNA, 1884 bp, Oryza sativa
  Clone ID: PAT_MRT4530_54482C.1
atgatgaagcacttggtggagtcggagaaggcggcggagaatgccgggccgacgtaccggaacgtgctggccaaggacgccgggcttctgcggccgccgccgggggtcgagagctgctgggacgtcttccgcaattcggtggagaagtacccggacagcccgatgctcggtcgccggagagtcgtcgacgacggcaaggcaggtgaatatgtttggatgacttacaaggaggtttatgacgttgtgatgaaacttgctgcctccattagcaagtcaggaatcagcaagggtgaaagctgtggcatctacggcgcaaactgccctgaatggatcatcagcatggaggcttgcaatgcacttggggtttcatgcgtgcctctctatgatagtcttggtgctggtgcagtggagtttatcgtgtgccatgctgaaatccagattgcttttgtggaagagagaaaaatcgcagagctcttgaaaacttgtcatgccacatcaaagtatttgaagacaatcatcagctttggaggtgtgacaaatgaccaaaaagaggaggctaaaaatcatgggatgtccatattctcatgggaggaattcctgatcatgggaggtgatcatcattttgatcttcctgaaaagaagaaatctgacatctgcacaataatgtacacaagcgggacaactggagaccctaaaggtgttatgatatcaaatgaaagccttcttgttaacatcactggtgctgattgcgtgaccaggtctattggcgaacctgacgtcaagctgttggtcgatgacattgcagctctaaaaccaacagtattctgtgcagttccacgagtacttgatagaatatactcaggtcttacaggaaagatctcgtctggtggcatactgaagaaagctttattcaatattgcttacaagctgaaactggacagcatgaggaaaggaattaaacacgagaaagcagctccattttttgacaaattagttttcagcaaggtgaaagaaagactgggtggaaaactacgttttatcgtgtctggtggtgcccctttatctgtagcagtggaagaatttttgagggttgtgacatgtgcaagtgttgttcaaggctatgggctcacggaaactggtgcggcgtcatttgttgcaataccaaatgatttttccatggttgggactgttggtccaccagttgagcatttggatgcacgtcttgagtcagttccagagatgggctatgacgctttgtcgagcattcctcgtggagaggtatgtgtaaaaggaagtgttctattctcaggatactacaaaagggaggatcttacacaggaagtcatgattgatggatggttccacacagatgatgactatatgccaaataccatgtataatacaggggatgttggcgagtggcaaccaaatgggtccttgaaaatcattgacaggaagaaaaatatattcaagctttcacagggagaatatgttgcagtagaaaatctcgagaatgtgtacggggttctccaagagatagattcgatatggatttacggaaatagttttgaatctttccttgttgctgtcataaatcccaaccaacaagttcttgagcattgggctgaacaaaatggtatctctggaagtttatctgaattatgtgaaaattcaagagctaaagaatatattctttcagaactcacgaagattgcaaaggaaaagaagctgaaaggctatgagttcataagagctgtacatcttgacccattaccatttgatatggagcgtgatcttataaccccaacatacaagaagaaacgaccacagttgcttaagcactatcagggaaccattgacgcactctacaagatggcaaagtaa

SEQ ID NO: 52160 - DNA, 729 bp, Oryza sativa
  Clone ID: PAT_MRT4530_54483C.1
atggccaatctggttaagctcatcggcgcttttggcagcccattcgtgcaccgagctgaggtggctctacggctcaagggagtagcttatgagttcatccacgaggacctcaacaacaagagcgacctgctcctcgccaagaaccccatccacaagaaggttcccgttctcctccatggcgaccgcgccgtctgcgaatcgctcgtcatcgtcgagtacatcgacgaggcgttcaacggcccgcccctcctgccagccgacccctaccaccgcgccatggctcgcttttgggctcacttcatcgaccacaaggcaatattttcttgtcatagttttaaatcctatagcacgaggccgtcatggctggcgctgtggttggagggcgaggagcagaaggggttcttgaaggagaccaaggagaacctggctctcctggaagcgcagctcggggggaagaggttctttgcaggtgactccatcggctacctggacatcgccgccggtgggctggctcactgggtcggcgtgctggaggaggttaccggagtgagcttggtcgccggcgacgatggcgatgacgagtatcccgctctgcgccggtggaccaacgagtacacggccaacgatgccgtgaagctgtgtttgcccaacagagagcgcatcgccgccttcttcacgccaaaggacaagtacaagattatggccagggcgatgctgcggcagcagtga

SEQ ID NO: 52161 - DNA, 574 bp, Oryza sativa
  Clone ID: PAT_MRT4530_54484C.1
atggagtactattttggccagataaagctggtgccggcgacggacctcggtggtggtcgcgtgctgtgcgacaggcaaaggggagcgacggggcaggtctggctcgccacatcgctcctcgccgacggcctcgccgtcgctggccagctcgccatcgtcctcggcgctggactgacggccttcctcgccgctggcatggttgcagatattgagatcttgcagtcggctctcaatggggtcgccatggggatgtcccaggaacagcgtgtccgactgtccgtcggtctgctcgttgcctcgtcgtcgcgctcttcttccatcaccaccaccagggcaccagtgaggccgacgagcccatcgtgcctgcgcaaggtgattcgcagcaccaagccacgggggctcgatgaggagactgtcgtagcaccattcgttgagcgcctcgtctcggagctggctagccgggctacgcctgcatcgtcgtcgtccgctcccccggcgaggcccctggccactgcccccgtgccggtcgccaccccgcccatcgccgcgtccactggtggagaaaccatctttg

SEQ ID NO: 52162 - DNA, 795 bp, Oryza sativa
  Clone ID: PAT_MRT4530_54485C.1
acacaacatgtctttgaactggtcacaacaacctggagctgctgtccgcattgcctcgaacgagcatgaggattggtgcgtcaacgcgaaccaagaaatctactaccgccgcaatggaggtgggttgggaacgcaaggagggagctgccgtctacgtcgacgtggctcgcgatggtacctgctgggtgatcaactctgccgaccagatctaccgctggaatggacatggctgggaccacatgcctggagccgcgcgcactgttggtgttggttcccgcaacgacgtctgggtcaccaacgccaaccacgagatctaccactgcaacggagatggcaactgggcccgcatcgatggcgctgccacccagatctcccgccggtgacgatggcactgtgatgtgcgtcaacgcccagcaacagatctactaccgccaggggtgtgcatggcgcgtggcagcagctcgatggcgcccgccgtcccaggtcgactgcttcgatcacaacacctacttggccgtcaacgccgccgacgagatctacctccgccagcacggcgcctgggtccgtcagcctggagcctgcaagcacgcctcgatcggtggcaacgactaccgccgcgtctgctgcaccaacggcgcccacggaatctacactcatggtcattaataagctcaccccgagctcgccgccccgcacaactgatcagttgtggtcttgtggaggagaatagtattcatgcctgtgtattcattgaataaaagtgtctgtacttgtaccccaaaaaaaaaaaaaaaa

SEQ ID NO: 52163 - DNA, 2247 bp, Oryza sativa
  Clone ID: PAT_MRT4530_54486C.1
atgtcttgctcgaaggtgcttctgtcgaagaagggggtgctggggacggtgtgggtggcggcggtcagcggcgtggcggcgctcagccgggaccaggtggttcgcaccaacgtcgtcgcctgcgtcggtgggaggcagtggaacagtgtgggaggcggtgtgcggaagaggggtttatccggggctttaggttatagaaatgaagcgaatcatgtgatgagaatctggatttattccaagaaagtggaatacctctgccatgaatgcaatgagcttcttggatcatatggatcagcacattgcaatgaactaagtatcccaactggaggagcaacaaatagagtttcaaagcaagcgaagaaacctgttcgcgcaagaagattagttgtaagacaagaaggtgcttacaaggtaaaaatacctatgcaagctgtgcgaacaactagagcagaaacaagagctacttcacagataactgaagttcgagacacacatgctacacctgatcttccaactttcacaatacccaaaagatttgagcttgactcttttgatttggggattcctgaagatagggatgatgatgacgtggatcatcaccaattgccacatcaaggtaccatgttggaagatgagaatcaccatacatcctgtttgtttgagtcttataagatgatgacatgctcatacgctgatctagactctgcctgcattatgccagtacgcgtcactatcccaactgaaatgatgagtgtcattagtgaagtcaacagtctactatgcttgagtagcattgggggtgaacctgaaaatcacaatgctgaatctgcttgctttacaccagtgaaggatattcttccacctgagatggtggatatgatggctgaagtaaatgatccttcagataaaagcacaagggggaaaaaacctcaaagagaattgaatagggatgagaatgggaattctgcttgccacatccctttgtcaggaagtaaggaagtgcaaatacctgaaaatattgtggagaatgtgacttttccaagtcgtgatgcaaattgtcccacaattgaagaatcagaaaatgggtcactgcatggaactaacacaaatccatcatgtgatggttttgaggaacccgggtctcttgaacaaccaactttgcgctgtaagacaaagctaatcaatgagctgtcaccttccactccggagcccatgacagagggtggcacagggctaccctgctctcctaaatttatggttactacaccagctaaaaaggagaagcaccgggtgactagaaaacgaagaaggggattatacaataaagattatataccaacagatagaggagacaaacggaagatatttaaggctcaaggcaaggtactaacattgagaaacacaatagaggatgcaagtgatctagtgcagcagagaaggaaggcacctcatacttgtctttatacctggaaggagggcaaaattcgttctctgccagttactttcatggatccattgattttgtatccaacttcggtgtacgttagacacactattacagcagatacaccagaaaattcgtgcagggagtcagtaaaatcaagaaggcgactttcgttggagctttctgaatccaacaatatctgcgatgatgctaaaaatgtagaaggtgaaagcattccagatgaaccaagaaagagaaaattggatgaattgacagatagtgtacaggcaactgttgggtgttacactgaaagtgcacagtatcacaatgatgaagactatagatttaatgacgatacagtcaaagaaaaggatttctcaattggaggacatgaatctcattcaacagaactgcaagaaagattgaatgcattgaaaagtaaaaatccacagctcgacgaggcattggatgctgatatagatagtatggaagaggatactcatatggatgaacaacatgctagagatgaaggtttgctgcgttcaacaagaacaaggactgtagcaaggtacttccatcaactactcgtggaccagaagtgccaacaacggaacaattctgtatgccttggtcaagcactcgaaggaacgaaaagaaaaacttcagcaagattcttctatgaaactctgatcctgaagagtggtagtctcatagaagtcaatcaagagcagacttatggggacatcatagtctcagcgactccgcggctcgaggcggcattgcggagtagtgagaagcaatga

SEQ ID NO: 52164 - DNA, 333 bp, Oryza sativa
  Clone ID: PAT_MRT4530_54487C.1
ttcttctgagaagtctccacccccgccagctccggtgatcttgtcgtctcctccaatctaaatctcctcccccaccggctccagtcattttgccaccttcttcagttaagttcccaccaccaccagtaccagttttcttgccacctcctcctgtgaagcctccctccaccacccagatccggtcatccttgcccaccccccccctgtgaagttctccacctttcttcctctcccagatttttttgcctcccttcaccctgtgtaggtctcccccttcatcctgcacccggttaatttcgtccccctccttcagtgatgttttcccccccccct

SEQ ID NO: 52165 - DNA, 3339 bp, Oryza sativa
  Clone ID: PAT_MRT4530_54488C.1
atgaggctggttgtgtggcactggtttttcttcttcttcttcacttctgtttcatcgtcttggagtttgacttcagatggtctagcccttctttctctgtctagggatctcatattacctcattccataagctccacttggaaagcttctgatacaactccttgtaattgggatggggtttcctgcaacaaaaagaatagtgtggtttctcttgacctgtcatcttctggagtttctggttctcttggaccccaaataggacttatgaagagcctacaagtactcagtttgtcaaataacagcatatctggttcaatccctcaagaattgggcaattgtagcatgcttgatcaattggatttgtccagtaacagtttttctggtgagataccagcatcccttggtgacatcaaaaagctttcgtctctctctttgtacagtaactccctcactggtgaaataccagaggggttgttcaagaatcagtttctggagcaagtgtacctccattacaataaactcagtggttctatccccttgacagttggagaaatgactagccttaggtacctgtggctgcatggcaataaattatctggagttctaccagattcaattggcaactgcaccaagttggaggagctctatctactagataatcaattgagtgggagtcttccgaaaaccttgagctatatcaaaggactgaagattttcgatattaccgcaaatagtttcacaggtgagatcacatttagttttgaggattgcaagcttgaggtattcatattgtcattcaatcagattagcaacgaaattccatcatggctagggaattgtagtagcttgacacagcttgcatttgtcaacaataatatatctggccagattccatcgtctctgggtttattgagaaacctctctcaacttttactttctgagaactcactttctgggccaattcctcctgagataggtaactgccagttgctggtgtggctggagttggatgcaaaccagctcaatggcactgttcctaaagagctggcaaatctgagaaaattggagaaactctttctgtttgaaaaccgcctcattggggagttccctgaggatatttggagcatcaagagcctgcaaagtgtccttatctatgaaaacagttttactgggaggctacctccagtgctagctgagctgaagttcctgaagaacattacacttttcaacaatttcttcactggagttataccaccagatttgggtgttaatagtcgtttaacccaaattgatttcacaaacaacagttttgttggtggaatcccgcctaacatttgttcagggaaaagattgagaattttggacttggggcttaatcttctcaatggtagcatcccatccaatgttatggactgcccaagtttggaacgatttattctccaaaacaacaatctaagtgggcccattccacaatttaggaactgtgcaaatctgagctatatagatctgagtcataattccttaagtggcaacattccagcaagcttggggagatgtgtaaatattacgatgataaaatggtcagaaaacaagttggttggtccaataccatctgaaattagagacttggtgaatttgagagtgctaaacctctcgcaaaacagcctgcaaggtgttcttccagtgcagatttctagttgctccaagctgtacttgcttgacttgagtttcaactctttgaatggttcggcactcacaaccgtaagcaaccttaagtttctgtcacaactacggttacaagagaataaattcagtggaggcatacctgattccctctcgcagttggatatgcttattgagctgcaacttggtggcaacgttcttgggggcagtatcccttcatcgttaggaaggttggtaaaactgggcattgcattgaatatttgtagcaatggactcgttggtggcattccgccattattgagcaatttggtggagctgcaaagtttagatttgtcacttaatggcctcactggagacctagacatgttaggaaacttacaattactgcatgtattgaatgtttcctacaatagattcagtggtccggtcccagaaaatcttctgaattttctggtttcctcaccgagctcctttaatggcaatccagacctctgtatctcttgccataccaatggttcttattgcaaggggtctaatgttttgaaaccttgtggagagaccaaaaaactacacaaacacgtcaagattgctgttatagttattggttcattgttcgttggagcagtttccatacttatactgagttgcatccttttaaagttttatcatccaaagacaaaaaatttagaatcagtcagtactctgtttgaaggttcttcttctaaattaaatgaggttatagaggctactgaaaactttgatgacaagtatatcatcggtactggtgctcatggaactgtttacaaggcaacactgaggtcaggagaagtatatgctgtaaagaagcttgcaatatctgcacagaaaggttcgtacaaaagcatgatcagagaactgaagacattaggcaaaatcaagcatcggaacttgataaagctgaaagagttttggttaagaagtgagtatgggttcatgctttatgtttatatggagcaaggtagccttcaagatgttctgcatgggatccaacctcctccaagtttggactggagtgtgcgctataccatagctcttggtactgcccatgggctagcgtatcttcatgatgactgtcaacctgcaattattcaccgagatattaagcccagtaatatacttctgaatggggacatggttccacatatagcagattttggcattgcaaagctcatggaccagtcttcttctgctccacagactactggagttattggcacctttggatatatggccccagagttggcattttccaccaggagtagtatcgagtccgatgtatacagctacggcgtcatactccttgagctgctaacaaaaaaacaggtggtggatccctcgttccccgacaacatggacattgtcggttgggtgaccgcaacgctcaacggcaccgaccaaatcgaactcgtctgcgactcgacgctgatggaggaagtctatggcacggtggaaatagaggaagtcagcaaggtcctgtccttggctcttaggtgcgcagcgaaggaagcgagccgaaggccgcccatggccgatgttgtgaaggagctgactgatgtcaggaaatccgccgggaagttgtccaagccggagaagacggcctcccggagctcgtcctga

SEQ ID NO: 52166 - DNA, 315 bp, Oryza sativa
  Clone ID: PAT_MRT4530_54489C.1
atggcttctacttcgccggcggccggcggccggcggcgtctgcgcggcaggttggcgcccctcctcgcctcctccggcaacaacaccaccccgccgccgccgcgctccctctccgacgccatcacggctcccaacgcgatcaacgccgccttccgctccaccgcgcaacttctgacaccaccgcgctgcctcttcgattcccacagcgacgggaactttaaggacgggatgcggcacgagctagccacgccgcctcctcctctcccgcctcgccccagtggcctcctccccaaccgccagccggcttgcccatag

SEQ ID NO: 52167 - DNA, 1265 bp, Oryza sativa
  unsure (1)..(1265): unsure at all n locations
  Clone ID: PAT_MRT4530_5448C.1
atccccaaaaaaaaacccctagccctaggcgcccgagctcgccgctgccgctcgccaccacgccggatccatcgcgcccgagctcgccgacgtcgtcgtcgtctcggataggtcgtcgtggccgcacccaagctcgccgccgtcgtcgtcgccgaggttgtcgtcgccgtacctccgccacgctcgagctcgccgtcaccacccgtcgccgtcaatgtcgccaaggtcgtcgtcgccgcgaggaggtcgtcgtcgctgcacccgtgccggatctgccgccctcgagctcgtcgtcgccgaggggagctcgttgtcaccgcgggggagagtgccggtgccggatccgcgtggaaggagggcggctgaccccggatctgctcgggggagggctacagtcccaagatccgatctggccgcctcccgcccccgtgtgccttctttcaagctcaccgccgccgcctttcgagcccgcggcagccgcttttcgagccccacgccgtcggcctttcgagccccgtgggaccgccgccgccaacgcttcatgtacttcctggctctacgccatactgcccagccgagagggaggccgacgccgataccgacgagctccgcacacgtgcgggcgggctcgggcgcagaacccgccgccgtgcaagacggctccggcgctgcaaccgcgtgcccgcggcgcgcacgcacgccgccngcggccacgcgggcctcgtcggcctcgccaacgctccgtgtccccccctacctttgggccgcactgccccgccaaagaggaagcccgacgccgacgccgacaagctccgcgcgcgcgccggcggcctccggcgctgcaactgccggaaagggaggccgatgccgacgccgacgagctccgcgcgcgcgccaagcggctccggcgctgcaaccgcgcgcacgcggcgcgcgggcacgccacccgcggctgcgcgggcctcgtccgcctcgccaacgcacacctccgcgccgatgccgccgccctcagccgccgccccgcgtcaccgtccgccgctgccctcgtcgccgaggccgccgcccccgcgtcagcgtcccccgcgcccttctctcccaagttccagccttccccctctcccccaccgccggcaagtacatcctcgaatcagatcggtcacccctgccttccgccgttgcaagaagtgctaaaaccagcacctataggctttttcccacctccgcgggttgacagcgtcgacggcgtcagtggcgcgcgccggaaa

SEQ ID NO: 52168 - DNA, 462 bp, Oryza sativa
  Clone ID: PAT_MRT4530_54490C.1
atggccatcgacaacatcgcgatcggaatcgccaaggcaatcgtctacacgagaaccaaaaccaagaccaaattcgaaatctttaagatcaacagcgttagcaggacaagaacggaggaggtcagcgcaatcatcatgaagacagtcggcgaagcggttcacgatctccagctccaaggcgagatcaagtccatgacatacgatattgagatcgcacacctaacgatagcgatccatcttcatcgtctaggggaggttcgtgacgacctcgcggtcaccgacccccactcatacccagcggcggatgcaggatatttagacccgctcttcgagaagtcaacaggccctcaaaattccatcccgtaccattggacaaatacggaggaagcactgatcctgaggaatttctatgcgtctactctactgtcctatacaccgccagcgcagacgacaatgcattga

SEQ ID NO: 52169 - DNA, 3328 bp, Oryza sativa
  Clone ID: PAT_MRT4530_54491C.1
aggaggaggaggacgctgcagtggtgggtggcgtagctcccgatccgggaagccgacccggtctgggggatttgctcctggcgcgcgctcgatcgagagggaggccaggggtgggtttgggggggaggggagaggggcggcgggaggcggagggagggcggcggaggcggggcgcggcggtgttctgtgagctggagccgacgtgctcgtcgcgcacggggtggcggtgccgcatcgcggacgccatagtggaggggcgatggagcgggggctccgggcggaagcctcagggcccgctcaagatgctcatcagctacgtcgacaacctgcgcaccgggccatgagcccggactgtattgtgcaggggatcttgcgcgcaccaatctccgtgttatacgcgtccagcttggtaatcaggggaaagcgtgtcattcgtcaaaagctatgaagagagttgccattccacctcacctgatggttgggacttctatggaatgtgtttgacttcattgtggtctgagttggaaagttttgtctaggtcgagggagaggatatccagttgctagacgtcaggtaaagagtgttagatttttggggttgtttcccagtgtaccagcaatctacatcatgctggaccctaattaagaggacaaagggattgtcgaacaatggcacggtgggggatgatggtgcggctgatactgagcacggctattcgctaggcaagggcttgttatgaaagttacagcatctcgttaatgacactgtaggcacattggctggcggaagatatgttgataatgacgttgctgctgctgtaatattaggcactggcacaaacgcagcctacgtggagcatgcaaatgcaattccaaaatggactggactactacctggatcaggaaatatggtgattaacatggaatggggaaacttcaagtcagaaaggttttcgcgttccgatggcgataacgctgggggctttgaaagtgtaaacccaggcgagtggttcaggagggacctgagtgtggaggtcaacccggcgctggcggcggcggcgcgcgccggcggggatgtggtgccggcgtacgtgtgggcgcccgaggaggacgggccgtactaccccggccgcgtgtcgcggtggtggctcagccagagcctgaagcacctcgacgcctcgctgcggcggctcggcgccggcaagctggtgacgaggaggtcggccgacgccgtcgtcgcgctgctccagctcgtccgcgacaccggcgccacgcggctcttcttcaaccatctctacgacccgatctcactggtcagggaccaccggctgaaggagatgatggcagcggagggcatcatcgtgcagtctttcaatgcagacctgctgtgtcattgctctggatggtggtctctatgagcattaacaagaagttcagaacctgcctagaagcaacgcttgcagacctgcttggagaggaggctgcctcatcagttgttgtcaagttggcaaacgatggctctggcatcggagctgcacttcttgcagcatctcactcccagtatgctagcgtcgagtagtaacaggagctcatgggactgagctcccagtgtagcttgttttcctcccattttccccgtttctttccaatgggagttcgtttccctcctgcgattcgcatctccttttgctattctgcagtcacataaacgagtgcctgtgcagcgggatgtagctagtatggcgccaaagagtttgcagttatcacatgaacaagcatttgcaactgcagggaagtgaaaacgggggcttgaatgatgccgttcttttcctgcaaattattttccccctttccctgtaagtttgtattgtgatgcgatgtcgcaaaccaatcacagcggtttcgcgtgtagccttttgtcattcagatttcagaataaagagggggacataatttcgcttaaagaaaaaaaatggttacccccttgttgatgccggcatgagggagctatgggctacagggtggttgcatgatcgtattcgtgtggtagtgtcaagtttcttcgtcaaagtccttcaactaccatggcgatgggggatgaagtacttttgggacacattgttagacgcagatcttgagagcgatgcactaggctggcagtatatctctggctctcttcctgatggccgagaacttgaccgcattgacaatcctcagctcgaaggctacaagtttgatccgcatggtgagtatgtccgaaggtggcttccggagcttgcaaggttgccaacagaatggatacaccatctttgggatgcacccgcatctgtgctgcaagctgcaggagtcgagttaggctccaactaccctctccctatagttgggctagatgcagccaacgccaggctgcaagaagccctgtcagaaatgtggcagcttgaggcagcatccagggccgcaatggacaatggaatggaagaaggccttggcgactcctcggaggttccaccaattgaatttcctcgagaactacagatggaagttgaccgagaaccagctcgagtaacagccaatgtgctgacaacagctcgaagacgcgaggatcagatggtgccaacaatgacatcttcactaaacagggctgaaactgagatttctgccgattttatgaacagtgtggacagtagggcagaggtaccaacccgtgtgaattttgagcctcgaactgagcgggaagaaaatttccgtaccactgcgggaaatgttgctagaacaaatggtattcatgagcacaataatttccagcaacctcagcaccgtatgcgaaatgttctagcaccatctgtatcagaggcatcaagtggctggactgggagagagggaggcgtagtcccagtttggtcgcctcctgcagcatcagaccattcagaaacttttgcctctgatgaagctgacatttctagtaggagttatttggataggcatccacagtcgcaccggttgatgaactggagtcaattatcccagtcattgtgagttcagatgcacggtaactgattggtctcagacaacaggtcgggaagtggaaaattccatgcaaccaaattggatcggttagggttttctccgccccagattcatatgtaaattgtccacctatgtgcttatctatagtctgatgagcatgcaagccaggcaatttcctgagtgtgacaatagttgtgtaaatctaatcctgtagaacctattctgttgtaacagcattgttagagttggctgaaagggatatgtaatattgatcagacaacgagggttttcctaaaaaaaa

SEQ ID NO: 52170 - DNA, 2480 bp, Oryza sativa
  Clone ID: PAT_MRT4530_54492C.1
atgggcggcggcggtggcggggacgccggggggaggacggtggtgtggttcaggagggacctgagggtggaggacaacccggcgctggcggcggcggcgcgcgccggcggggaggtggtgccggcgtacgtgtgggcgcccgaggaggacgggccgtactaccccggccgcgtgtcgcggtggtggctcagccagagcctgaagcacctcgacgcctcgctgcggcggctcggcgccggcaagctggtgacgaggaggtcggccgacgccgtcgtcgcgctgctccagctcgtccgcgacaccggcgccacgcggctcttcttcaaccatctctacgacccgatctcactggtcagggaccaccggctgaaggagatgatggcagcggagggcatcatcgtgcagtctttcaatgcagacctgctgtacgagccgtgggaagttgtcgacgacgaaggccaatctttcaccatgtttgcgcctttctggaataggtgcctcagcatgccgtatgatcctgccgcaccgctgttgcctcctaagagaatcaattcaggtgacttatcaatgtgcccatcagatgatctgatctttgaggatgactcggagaggggaagcaatgcacttcttgcccgagcatggtcaccaggctggcagaatgcagacaaggcactgacagctttcctgaatggtcctttgatccactactcagtgaatcgcaagaaagcagacagtgcaactaccgcgttcttatcaccgtacctgcatttcggtgagctgagtgtgcgcaaggtcttccaccttgttcggatgaagcagcttgtgtggagcaatgagggcaatcgtgcagctgaagagagctgcaccctgttccttcggtccattggtctccgggagtactcacggtatctgagtttcaaccacccatgcagccatgagaagccccttttggcacacctcaggttcttcccctgggtgatcaatgagtgctacttcaagatatggcggcagggaaggactggttacccccttgttgatgccggcatgagggagctatgggctacagggtggttgcatgatcgtattcgtgtggtagtgtcaagtttcttcgtcaaagtccttcaactaccatggcgatgggggatgaagtacttttgggacacattattagacgcagatcttgagagcgatgcactaggctggcagtatatctctggctctcttcctgatggccgagaacttgaccgcattgacaatcctcagctcgaaggctacaagtttgatccgcatggtgagtatgtccgaaggtggcttccggagcttgcaaggttgccaacagaatggatacaccatccatgggatgcacccgcatctgtgctgcaagctgcaggagtcgagttaggctccaactaccctctccctatagttgggctagatgcagccaacgccaggctgcaagaagccctgtcagaaatgtggcagcttgaggcagcatccagggccgcaatggacaatggaatggaagaaggccttggcgactcctcggaggttccaccaattgaatttcctcgagaactacagatggaagttgaccgagaaccagctcgagtaacagccaatgtgctgacaacagctcgaagacgcgaggatcagatggtgccaacaatgacatcttcactaaacagggctgaaactgagatttctgccgattttatgaacagtgtggacagtagggcagaggtaccaacccgtgtgaattttgagcctcgaactgagcgggaagaaaatttccgtaccactgcgggaaatgttgctagaacaaatggtattcatgagcacaataatttccagcaacctcagcaccgtatgcgaaatgttctagcaccatctgtatcagaggcatcaagtggctggactgggagagagggaggcgtagtcccagtttggtcgcctcctgcagcatcagaccattcagaaacttttgcctctgatgaagctgacatttctagtaggagttatttggataggcatccacagtcgcaccggttgatgaactggagtcaattatcccagtcattgtgaacaacaggtcgggaagtggaaaattccatgcaaccaaattggatcggttagggttttctccgccccagattcatatgtaaattgtccacctatgtgcttatctatagtctgatgagcatgcaagccaggcaatttcctgagtgtgacaatagttgtgtaaatctaatcctgtagaacctattctgttgtaacagcattgttagagttggctgaaagggatatgtaatattgatcagacaacgagggttttcctagtgtcacgcgtatagtatttttagggggagtcttgtctatacctgtacattcccttgtgctattggcaatctattatcactacttttgtgttgaagtaccactgtttagtgttataaatcacaattgtagattgacctgctacc

SEQ ID NO: 52171 - DNA, 540 bp, Oryza sativa
  Clone ID: PAT_MRT4530_54493C.1
gattatacattagaagctcaaaataaggagtttgagaggagggctgttgctacagaaactgcattaaagagggttcgatggaattattctgctgctgtggagcgtctacagaaagatcttgagttactgtcctttcaggttctctctatgtatgaatcaaatgaaactcttgcgaagcaatccattgtagaagattttgagagttcccctgaagaacagtctgcagtagcagatttaggtgctaacaaggaacgtagcctgtacatgtctgatcatgaatcccaagcattttcagcagaaaatggcagaccagataatctcacttacaaaatggatggccagaaaagtcttcttcgggcccttaaaatggaagagatccgtaatagatctgaatttcaagttcgaagtaatactaatctacaggttgactactccaaacttgacaagctagaacaaaccccttcaacaacggaatctgaggttttagaaacatatatggccaacatagagtggcaagtattctctgatgtgctacgtgag

SEQ ID NO: 52172 - DNA, 722 bp, Oryza sativa
  Clone ID: PAT_MRT4530_54494C.1
caggaagacattgaactcatggccagtttgggtttccgtgcttatagattttctatatcttggccacgcatatttcctgatggcctggggaaaaatgtcaatgagcaaggagttgccttttataatgaccttataaatttcatgattgagaaaggtattgagccatacgcaactctgtgtagttgggatcttccacataatcttcagcagactgtgggtggttggctttctgataagatcgtttaatggttacggaattggacattttgcacctggaggatgtgaaggggaaactgctagatgctacttggccgcccactaccaaatcttggctcatgctgctgctgttgatgtttacagaaggaaatttaaggctgtgcaaggtggtgaagtaggcttggttgtcgattgtgaatgggcagagccattttcagagaaaacagaagatcaggttgctgcagaacgaaagcttgactttcagctaggatggtacctggacccaatatatttcggtgattacccagaaagtatgcgtcagcgactgggcgatgatcttccaaccttctcggagaaagataaagaatttatcaggaacaaaattgactttgctggaataaatcattatacttcaagattcattgctcatcatcaggatccagaagatatttatttctaccgagtacaacaagtggagagaatagaaaatggcacactggtgaaaa

SEQ ID NO: 52173 - DNA, 210 bp, Oryza sativa
  unsure (1)..(210): unsure at all n locations
  Clone ID: PAT_MRT4530_54495C.1
cttctcttgtctcgctgtggctcgctggacacaacacacacccacacccactcccccactcgagctcgactacataggnctctcgccgccggtgcccgccgccgncgatgacgncgccgacaacgacctnaagggcaccgagctncggctnggccttgcccggctnccaattgccggancggttcccggccgncgncaaggttggaactt

SEQ ID NO: 52174 - DNA, 1786 bp, Oryza sativa
  unsure (1)..(1786): unsure at all n locations
  Clone ID: PAT_MRT4530_54496C.1
cgcgaggcgcgcgactcacctgccgagccacgcgtcgcgcacgctgcggagatcgcctcctcctcgccgccgccgccggggggaatggggagcacggggcgcgacgcggaggtgacccgcggcgacttccccgacggcttcgtcttcggcgtcgccacctccgcttaccagattgaaggggcgagacgggagggaggcaaaggagataacatatgggatgttttcacagaaaacaaagaacgtatcttagatgggagcagtggagaagttgcagttgatcattaccatcgatacaaggaagacattgaactcatggccagtttgggtttccgtgcttatagattttctatatcttggccacgcatatttcctgatggcctggggaaaaatgtcaatgagcaaggagttgccttttataatgaccttataaatttcatgattgagaaaggtattgagccatacgcaactctgtatcattgggatcttccacataatcttcagcagactgtgggtggttggctttctgataagatcgtggagtactttgcactgtatgcagaagcttgctttgcaaattttggagacagagtaaagcattggataacaatcaatgagcctcttcaaactgcagttaatggttacggaattggacattttgcacctggaggatgtgaaggggaaactgctagatgctacttggccgcccactaccaaatcttggctcatgctgctgctgttgatgtttacagaaggaaatttaaggctgtgcaaggtggtgaagtaggcttggttgtcgattgtgaatgggcagagccattttcagagaaaacagaagatcaggttgctgcagaacgaaggcttgactttcagctaggatggtacctggacccaatatatttcggtgattacccagaaagtatgcgtcagcgactgggcgatgatcttccaaccttctcggagaaagataaagaatttatcaggaacaaaattgactttgttggaataaatcattatacttcaagattcattgctcatcatcaggatccagaagatatttatttttaccgagtacaacaagtggagagaatagaaaaatggaacactggtgaaaaaattggtgaaagggccgcatctgagtggcttttcatagttccttggggcctccggaaattacttaattatgcagcaaagagatatggaaatcctgtgatatatgtaactgagaatggcatggatgaggaagatgatcaatcggcaacgcttgaccaagtcttgaatgatacgacgagggttggttacttcaaaggatacctcgcgtcagttgcacaagcaatcaaggatggtgctgatgttcgtgggtacttcgcatggtcgttcctggacaacttcgagtgggctatgggatacaccaagaggtttggcattgtttatgttgattacaaaaatgggctttcccggcatcccaaagcatcggcccggtggttctcgcgcttcttaaagggcgatgacgctgagaacaaagctgacatgaactaggccatcctgaagaaagtaaaggaacattacacagtaatcgtttctgctgttgttgtatcttatattgatatatgtagtgtatctattcatcatcataatagtgtatcttatattgatatacatctcagatgtgctatttagtttgtcattgatcaaattcagaggtttgcccataccaataaaatctgaatcaatgccaaacactcatgtttacagccctcacgcttataatctcaaaaaanaaaanaaa

SEQ ID NO: 52175 - DNA, 234 bp, Oryza sativa
  Clone ID: PAT_MRT4530_54497C.1
gtagcctcgagctgaactgaagcaggggaggggaggagagtcaagctcaacatgctttcttcactgcctactgttgaactcaactacatccatttctgctgcctgttctctatgctatcatgtcttattcttctccgttgctatcctgcctagcaacaagcagttgcctgaggctaacgatcattttgatctacaaaagaagagaacatgcattcgtccattactcaactgtaa

SEQ ID NO: 52176 - DNA, 432 bp, Oryza sativa
  Clone ID: PAT_MRT4530_54498C.1
atggaccccacctgcagcttgtggagcggcggcacgcacgcgcgtggcatcggcgctggcgcggtggaggccccgacgcacccgctcccccacccccacacacctcgcgctcgcggcggccaccggcgcggcggccgcaagaaccgcaccgacgtttacagcttcgggatggttctcctcgagcttgtgcatggccgcaagaaccgcagcgagcacgtgagcgacggcgtcggcgccgccaccggcgacgactccaactcctcgaacaggacaatgggcagctcgtcacgcggcgcacggagcgactactcggtgatggcgagcatctcggcaagagacgacgacgaggccgaagatggcgagcatctcagcgagccccaccacgtggagcagcgtcgacgaccagatcttctcccaccaccaccacattag

SEQ ID NO: 52177 - DNA, 245 bp, Oryza sativa
  Clone ID: PAT_MRT4530_54499C.1
aaaacaaaaaaaattcaaccccccggggggggcctgacactacagggggggagttaacttatgctatatttgatgaaattggccacaaaggggcatttcaatccaatacactgggacaaatgatctcatgggggaaaatagaccaaattcagcattggaaatcgactgccaacattggtgatcattcaggaagggagtagagttacaacccaggtttttcaggggagcatgtgcctttgcaaggg

SEQ ID NO: 52178 - DNA, 428 bp, Oryza sativa
  Clone ID: PAT_MRT4530_5449C.1
cttgtcatgatctcaaatcttccagtgcttcaggtcctggtagtcgttgactgctccatgctgcaagatttgaggggagttgcaggcctaaggcatgtccgcctcgtggacagagtgacgaaagaacttccagattggttgacaggccatgaggctcctctgctgcaaacattcaccatagtcggcacgacagaactactcaggaagttagttcccaacagcaaaggctggtcggctatacgtaacatggacagagtttatgcaaatttgcctgatggggccccgttcttggcttacaacaagggcagacctgattttcaaatgattaagacagcggttggccctcagttggaagatcgtccttctgcatatattatcctcagaaagcttgtcaggatggcctcacaaactggccttctggatagctt

SEQ ID NO: 52179 - DNA, 271 bp, Oryza sativa
  Clone ID: PAT_MRT4530_544C.1
ctgacgcgtgggcggacgcgtgggccaccctcgcgagccaagctaccattctcctcctcggcggcggcggcaccaaggcttgccagcatagagaccgcgacaaccacgaccactaccgaccgaggcgagggcatgatcatgccgcacgaatgcgaatctgaaacccacgcaatgcccaggaattgtaatgaagtacagtatatcacggatcaactatttgtatatatatgacttgatccatatatttacccgacacaagaaatcagcagct

SEQ ID NO: 52180 - DNA, 591 bp, Oryza sativa
  unsure (1)..(591): unsure at all n locations
  Clone ID: PAT_MRT4530_54500C.1
cgaggcttgtacctctgtgggcatagacaatttgttgtgttcttggtgccatcaaaggtacagtaactgttgaagccgcatgcaccactgcctacctttgtttgaattgtctggcagatgttctccggaagtgcatccaccgctctccattgctcttgccataagctcctggcctgtttgctctttgggtaaatatattgccggaacacaccatctgtatcaagggttgcacggtggaagaaatcacccatagagtccactcctgcagaagtgatgtttatctgtgaaccattagtcagcgtgaagtatatccttccagtttcattgaacaccagctgtgagccattccccactgtgttactggcccagtatggatcatggtagtatgcagaaggtacagcaactagatacagcacaagattaccgtcatcttgaacatttagttgaaaccggccattggaatagtctgtggcgaggagacggctgtggagtgctgtccctagtgggagcacttgtgtgggtaggatggtatcagaanggtcaccaaaggactcccactttgttgcgccatcagtgcctaaaagcctgaaa

SEQ ID NO: 52181 - DNA, 363 bp, Oryza sativa
  Clone ID: PAT_MRT4530_54501C.1
atggcggcccccagatcggaggatggtgggtggagagaaagaagaggaaggatggagaggaagaagaggaagattgagcacgtggccacgccgtcaaatcgaaaatatcctctctttctccatctagctcccagatccggccggcgtggtgggggaagggaaggaggccggcggcacggtggaagatggggaggaggcctcaccttcgtccggcatgccagtggcgaggagagcgcctctcgtcaccgtccgcctctcgtcgccgtccgcctctcgttgccgggagccggatccgccccgccccgcctcggcgccgtccgggccaggtgcgccgaggaccgcggtggccgtgagattgtatag

SEQ ID NO: 52182 - DNA, 403 bp, Oryza sativa
  Clone ID: PAT_MRT4530_54502C.1
aagaaacctaagcccatcggaaatctctcctcctcccagcaaagaggaggtggtggagatctcccaatccgcgggaatcactcgctggtcaccgggattcggcctccgctcgagctctgaatctcgggagctcctgatctggaggatgccaaatctcaaacagcaactttgccgccagacagcgcttacggtggactgatgacctccatgatcgttttgtggatgctgtaacacagcttggtggacccgacagggcaactccgaagggaattcttagaataatgggtgttcaagggttgaccatctatcatgtcaaaagccatctgcaaaaatatcggcttgctaaatacattccagatcccacagctgatggtgccaagtctgacaaggaaagatctcggag

SEQ ID NO: 52183 - DNA, 405 bp, Oryza sativa
  Clone ID: PAT_MRT4530_54503C.1
ggattctatatctaaaaaaccgaacatgtcctgccttgacaacatatgccttaatcatcaggtgtcactcacattcagtgtcacgactcacgagcgagcggggtcatctttatcttacaactgacgagaggtcagagggctcactagacaggagtcccgaaggtcttgacgagctccgggatgataaacgctagcttgtcgtccaagggcttgaccatatcgggcttcattttgtacaacttgcctgtgctgtacccacccaacaccttctttaagtgctcatcgtcagggaagtctccgactggaagatggtactccctttggacctttgcaaacattatcacccatgttggttattactacgatgttgaaccttagctttacacatcattgcaggcatctcct

SEQ ID NO: 52184 - DNA, 408 bp, Oryza sativa
  Clone ID: PAT_MRT4530_54504C.1
ttacttcttgcatatcttttgccaagaaacagaccaaagcaatttccagcaagagagaggagtaccgaagttgtggccgacaatgcagtgccaggtagggccgtggttcttgtcgaactccttaatgtactccacgatgtccttctccatggtgtgcttctcgaacgcgacgcggtcgatgtcgaaggcctcctggcgcatctcctccttcatgttggcgctcttgatctggatcttgtgccctgcaagcggcggcggcggcgctaggaggcggggagcccgcggaggccggcttgcggtcgccgtcggaggaggccctctccacccgcccaccgtcaccgcgcccgcgctagccgtcgccacccgcacccgcaccaccagcagcgccaagagggaggagggagccat

SEQ ID NO: 52185 - DNA, 849 bp, Oryza sativa
  Clone ID: PAT_MRT4530_54505C.1
atggcggacggagcggtggcggtggtggtggtgaccggggtcggcgtcggcgggcggagtggtggcggtggtgaccggggtcggcgtcggcggccggagcggtggcggccccacgatggatccggcctcggcggcggcctgggtggcgacggcgggcagagcagtggtggcggcgtcagcggccggggtcggtgtcgacgggtggagcgatggcggccccacgacggatccggcctcgacggcggctggggtggtgacggcgggcagagccacatccggcgtcagttgtcggcgggcggagcagtgtgcctccccatcgccgcgccatcggcggcggccatcccgctcatcgacctcgctaaggcggatgtcgaccgtggcagggtggttgccgaggtcagggtggccaccgagacggtcggcttcttccaggtggtcaaccacgacgtcgccaaggagctcacggatgcgatgctcgcagcggtgcggtacttccacgaggagcccctggaggcaaaggcgccatactacaccagggacgtcggcagcaaggttcggttcagctccaactacgacctgttccggccgccggcggccaactggcgcgacacgctgttcatggagatggcgccggaggggccttcgccggaggagatcccgccgccgtgcaggggcgtggctgaggagtacgccgcggcggctcggggaatggctgttcgagctgctgtcggaggcgctgggtctccccgcgggtgctgcacatcaactttcccatcttggttaaagccatctataaatggccataaggcccaaggcccgacggcgcagcccaagcacggcacggcttga

SEQ ID NO: 52186 - DNA, 1392 bp, Oryza sativa
  Clone ID: PAT_MRT4530_54506C.1
tttaatctctcctcctcccagcaaagaggaggtggtggagatctcccaatccgcgggaatcactcgctgttcaccccgattcggcctccgctcgagctctgaatctcgggagctcctgatctggaggatgccaaatgtatgaaccaaagcccttctcaagcattgtactagctcacaacgatccagtttcccacaatcaacaaattgaacgtattaacaacaatgtagtatctaatagtggtgggaacagctcaaacagcaactttgccgccagacagcgcttacggtggactgatgacctccatgatcgttttgtggatgctgtaacacagcttggtggacccgacagggcaactccgaagggaattcttagaataatgggtgttcaagggttgaccatctatcatgtcaaaagccatctgcaaaaatatcggcttgctaaatacattccagatcccacagctgatggtgccaagtctgacaagaaagatctcggagatttgcttgctgacattgaaagctcctcgggaatggaaataggggaggctttaaagttgcagatggaggtgcaaaggcagctacagctccggatagaagcccaaggaaggtacctccagaagatcattgaggagcagcagcggctcagtggtgtgctgggtgaatcaggcaagttaggcgccctgggaccagctccaggggagccataccaggattccaacaaaaccgacccctcgaccccggtaccgacttccgaatccccaatccgcgacaaggctggaagcggcttgttcaagaccatttcttcgcacgacgactgccgcgagcctttgacaccggactccagctgccgtgccggctcccctttggagagcccccccagggctagcaagaggatccgggtcagcagcgacattgatcatcgtgggaacaatgagttcccccctcctctcaaagttccggagccaagttcaggttcagatttccgacaggaaagctcagtgttattatcatccagcgcagtgcacttcgattctttggagagcctggatgcagatgaaaatgtcttcaccaatggttcaggcagtgatgattgatttttcatctgtgtaggggcagggcagtgatgtttagaggacttgctagttatctcttcagtagagctgttgatcttagtgaggctgtaatgctgtaaacccagccatgactgttagttgttatctactgttcagtgcatgtttgtagcttatacttattcaatcagagatgtgcagtgtgcacatcactttacagttcatgtaggtctggaaatctcgtaaggtgagaagaacataaagatatgatcttattttcgttgagcatgcaaaaaaaaaactcgagactcctgctctctcc

SEQ ID NO: 52187 - DNA, 539 bp, Oryza sativa
  Clone ID: PAT_MRT4530_54507C.1
gctgcgcacttgtggaaagggcgatcggtgcgggcctcttcgctattacgccagctggcgaaagggggatgtgctgcaaggcgattaagttggcccctgtagatgtcagtgcgcaggttactgcagcagtagctgcagagaatagtcgcatcatgggcatcctgaactgcgacgaggctaaagggcgtgagtcacaggcgcgagcactggccgaaacgccgggtatgacggtagagagcgcacagcgcattctggctgctgcaccgcaaagtgcccagatgcgtaccgatacggcgctggatcgtttgatggaaacagcacccgaggctatcatggcaattactgaagttttcacacataaccagccgctcggtaacagcgacccggcgcacactgcgtatggtcctggcgaactgacggcttccactccagccatgacgccgctcatgctggatgccacttctggcaagctgaccgtctgggatggtgctcatgctggcgcggcaatgtcgggaaacctgtcgtgccagctgcattaa

SEQ ID NO: 52188 - DNA, 291 bp, Oryza sativa
  Clone ID: PAT_MRT4530_54508C.1
atggagcagaggtggtgcgacaatagcccctcatcatctcgggtcagcctctccccgtcgctgtcccccttttgttctgatccctccatctcctcgcagccgtcctaccacaaggcaacaggtgctgtcgccgctaatcatcttcaaggggctcttcggggtggtgctgacctcgacagcgaacaactggctcctgggtgggtggcaacaacgcaggcgtttgtgaataacagcagcagctacgaggacatgggaccttgtacgatccctgactacgtgttcaacttataa

SEQ ID NO: 52189 - DNA, 561 bp, Oryza sativa
  Clone ID: PAT_MRT4530_54509C.1
gtgcatttagggttatatcgatctaatcatttctcccttgccaattaagtctccatcgatcggtaaatcagctatggaagcgagaaaagccagtgttgtttgctgcatcttactgcttgtgttagcacttggaggtcctgcttctgccacagattattgctacaaagccattggcaagctgatcgtctgcgtgggtcctacgtgcatgtaggactgttggcttgaggcgaaatacaataaaggcagagtcaagcgtcacaagtgcatgaaacatggcatatttgccaaatgttactgcgaaatctgcgttacattttgagggaatcgatcgacaatttgtaaaagtctttggttgatttagtctcgtgtaataatctagtacgttgtttgctagctagtttcttttaataattgattagttttgggagttgcttttgtttggatataggatatgtgattatttattttcttcctccaatgtatcagttatcactgtactctcattcgagattttttttaaataaagtataagtgataattgcattaaaaaaaaaaaaaaaa

SEQ ID NO: 52190 - DNA, 222 bp, Oryza sativa
  Clone ID: PAT_MRT4530_5450C.1
atgggactacagctccacttgcgggctgagccgaagagaggtaggccactaggccaggcacaagactattcgagctgggcctacagctccacttatgggctgagccaaagagagataggccaggcaaaggactgttcgagctgggcctacagctccacttgtgggctgagccagagagagataggccgagcaaatagagacagcggactgcactgggactga

SEQ ID NO: 52191 - DNA, 360 bp, Oryza sativa
  unsure (1)..(360): unsure at all n locations
  Clone ID: PAT_MRT4530_54510C.1
atgaccatgattacgccaagctcctcgtcgcagttcaggatgcccatgatgcgactattctctgcagctactgctgcagtaacctgcgcactgacatctacaggggctgctacggaagcaannnnnnnnnnnnnnnnnnnnnnnnnnnnnnnnnnnnnnnnnnnnaattcgccctatagtgagtcgtattacaattcactggccgtcgttntacaacgtcgtgactgggaaaaccccttgcgttacccaacttaatcgccttgcagcacatccccctttcgccagctggcgtaatagcgaagaggcccgcaccgatcgccctttccacaagtgcgcagcctnnnnnnnnnnnnnnnnnnn

SEQ ID NO: 52192 - DNA, 324 bp, Oryza sativa
  Clone ID: PAT_MRT4530_54511C.1
ttaaggcctagaagactggccacgggagaggaagctctctctatttcatccagcatggatgagtgccgagggatgtgtcttttgcactgttcgatctgccaattcacgccatatacccacgggagagggccctgcgatcggtgttgacctcagacaaactactcgagagaccgcgcgagggagcacgacggggtggacaatatcgccttcgaccaaaggaaccacacgacgccctggtatgcagcatgcaccgacttcgatcaggtaatcggagacagcctcgagaaccaagtactccttgaccgcatcaacactggattcaat

SEQ ID NO: 52193 - DNA, 474 bp, Oryza sativa
  Clone ID: PAT_MRT4530_54512C.1
atggggggaaagggagagggaatcacggggaatgattccccccactttattgcacgcgggggcggcgggagcggcgggatttgcggcggcggcggcgctagggcacgggcgaggcggcgggagcggcgggaggtaggggatgacgggtgggccccacccgtcagcgagggtggcgggcgggcccgcccgtcagcggcgcgcgcgcgggggaaggccggatgggccgcggggaagaggggagagagggagggagctgggccgagccggcccaagagggggagggggagggaaagggaactttttagggacgtgacaaatccaccccccttacaagaatctcatggaatcttctcttcacccgacttgtccctggttgaacctttagctgacttcgactgggttgcggcacttgaagatggtgcttcagttccagaacttcgcatagtttatatttttggcgtcaacctcatagaa

SEQ ID NO: 52194 - DNA, 354 bp, Oryza sativa
  Clone ID: PAT_MRT4530_54513C.1
gaaaaacaaaactcaggccctgccctggtttccgaggcacaaaacaggccctaacagggataagggcgtacctgcaacaaaaggggaattgccttgccttaagctaaaaaagattaccccgaccctacggatctggggtggaaacaaaaatgggctagggccttcttttacgtttttgttttcaaaacttcaaaacctaggggagggggagcggatcccatggctcccctggagggaaaaaggggccaggccccaaaaacggggaccccctgcataatgcacttgaactccccaaaatcaacccggccgtcgttgtcggggtcaacgttgaaaaacatctccccggacccgtgg

SEQ ID NO: 52195 - DNA, 924 bp, Oryza sativa
  Clone ID: PAT_MRT4530_54514C.1
gggcgcgcccgaaagtggccacccccgcacaaccgacgggaagccgcgcacccgcgccccgatggtcccgccggcgaccaccggcgcggcggaacggcgccccaaaaaagggaaggaagggggaaacgaatcggcggtccacagctcaccccggggtggccgcgaacaacggaaccgccaccggaaccgaagaaagccgccgcccgcttccggttaacggggacggcggcggttcggccgttggccggccaaaccgaagggttgaccaagttggccaagtttcggccaaaccgaaggaagcggcccccaaaccggaaaaggttcggggcgacgacggcggccagccggaagttggcggttaccgccgaaaaaaaaaaccaccaccgcgagttgtattcggcgaaaaaaaaaaaaccgcgagtgcgaaaccgttgaaggaagccacgggaggtgtttatataggtttggaattaaaaaaggccgcccggataaggggaaaacgggcgcggaagatccggccgccattgatggcgccggcgaggttaggggagaggtttccaaacgaatccgagggagagagggagagaaaaatggggggaaagagggagggaatcacggggaatatttccccccactttattgcgcgcgtggacggcgggaggcggcgggattcgcggcggcggcggcgctagggcacgggcgaggcggcgggagcggcgggaggaaggggatgacgggtgggccccacccgtcagcgagggtggcgggcgggcccgcccgtcagcggcgcgcgcgcggggagaggccggatgggccgcggggagaggagagggagggggagggagctgggccggaccggcccaagagggagagggggagggaaagggaactttttttagggtttttctttttataaaacctttt

SEQ ID NO: 52196 - DNA, 539 bp, Oryza sativa
  unsure (1)..(539): unsure at all n locations
  Clone ID: PAT_MRT4530_54515C.1
ccaatccaatttctaccaaaaggatcattgattttatacttatcacaaaaatttcactgaaattactttcttaggaaaaccaccttttacccccggataaaacacggaaaaaatctttacaaaaaatggttggtttttgggaggcaaaaacggccggcggcggggcggccattacccggatgggaacaccttcttgacaatctcttccctaagggaggcaatctgggcttcaagcgccttgacggcctcctccttctgcgcctccaaggttggcaaacgcctccacaaactcggcctcgaacgcgggggggcccctccgtccacttccctccactcctggttgtcccctcctccacttttgaacccgcggaaattcgngcnttgcccctttcacaagggggggctgtcctccaattgcccccnccccgaacnttntttaacccccnaancggcggntttggttcccnctcccnaacttnccacgnttaattaanttcanccctccacgaacgcccanacgaattnggttaatttaaccc

SEQ ID NO: 52197 - DNA, 216 bp, Oryza sativa
  Clone ID: PAT_MRT4530_54516C.1
atggcagatcggcagtgcgacggcaacgccacctccgaccgggaaggacggctgcaacagtgcagcatcacgggggcgggcccggaacctcctggtgatgaacaccggaacttcctggtagtgatgagtagcccggaacttccggagttcttgagccaggaacttccggacaacagagataaacgaaatatgagaagaaaaacaggtcctagctag

SEQ ID NO: 52198 - DNA, 161 bp, Oryza sativa
  Clone ID: PAT_MRT4530_54517C.1
tttgtgtttggaagtatcaggggaccacagcttttgtttagggaaccaaagcaaaaaagctgagcgacctgcgacccacggaatcacaaggaactctgaatcaatgacgatcaagagatcaacgcaacgtgggattaaaatagactcaagactgctaccat

SEQ ID NO: 52199 - DNA, 460 bp, Oryza sativa
  Clone ID: PAT_MRT4530_54518C.1
tgtttgtgacttagaagatacgggtctgccacacaacaagggactatcaaaaggacccgacacttcaatatccacgctctccctggtaaaagatgcaccatgccaggagcatcggacatcttgacaagagttagagcatccactagaagcacctgatttactaatgatggccgagggccccgaagcgtgagcaggatatgggcagacctcccggagctcagccccaggccggacgcgctcggcaggcatatcaaagaaataagaaggcaacgccccacgcgataagggcgggcggtctcctggctggctgtccacacatggatcataaggcatggcaacgccaacgctggcccgaatcgtgccttcgacgctcggctgcacaaggtgggacactacgagactggatcttgatgggaaaacattatcatatgtaccatgcaatacataagtggatgcctcg

SEQ ID NO: 52200 - DNA, 562 bp, Oryza sativa
  Clone ID: PAT_MRT4530_54519C.1
gatctgtactgtttttttcttttttggtttgattaaggcgcgcaaaaagagagggttttataagttcttaaaaaagctcacaatcgatgacacaacgacatcaaattcaggcatgcatttttgcctcccataaaaaaacttccacgctcactttcaagcgtgactaattaaataaacgagttatgacgacatggaaaacaacccccatttactcctcgagtagagcctgccaaggtactcctcaagaaccccgagcctgtctagctctctgaaaagaaggtactctttctaacaaagcttaacttgaggccctccatactcaggtactataacggcgcgaccttgtttcaaagatacagggaacaatttgccatccttgatacgttcgccaggacacaaaggcactaattttgcctaattaaactgcttggcgaacttcgggaggaggatgccgaacaccctcttgatggtggtgaggaggtaaaccaccaacacccgcctcatcaacttgatcaggcttctccccggcattgccgtgccgggatgagctcttactcttctc

SEQ ID NO: 52201 - DNA, 553 bp, Oryza sativa
  Clone ID: PAT_MRT4530_5451C.1
ctcccggttgggccaacgtctcccggttttgggccaacagtgcgagcgcaaggcagcgaacgcggccggatgcggcgcgcggtgggcttgccggtgcgcgaccttcattacacaaggatagaaggtatgccttatttgtataacccttaaaatcatctatatgcttaagtggatattccgatgttgattttgctggttgtcgaatcgacataaaaaatactagtggaacatattattttcttggtacatcattagttgcatggtcttctaggaaataatctagtgttgctcaatcaaccactaaatctgaatatattgctgctgctagttgttgtttatagattttttttggcttatatcaactttgaaatattatggtcttacttttgagaaagttcctctcttttacaataacacgagtgttatttaatattgctaagaattctgtacaacactcacgcacaaagcacaaagaccaattgtaccatatactttcgtcacgaattcggaagggccaagctcaatctgcaagaacaagattatgaacgtggtt

SEQ ID NO: 52202 - DNA, 168 bp, Oryza sativa
  Clone ID: PAT_MRT4530_54520C.1
atggggaggaagcgaagggaaggcgagggcccgtcagacaagtggaaggggaagaaattcgaggcgctggacaagctgccaaggacggctctagatttcgagcatgtgtttggtgtatgcgtagggttggtgtatggaggtagttggttattgtgggcgtttgtgtag

SEQ ID NO: 52203 - DNA, 233 bp, Oryza sativa
  unsure (1)..(233): unsure at all n locations
  Clone ID: PAT_MRT4530_54521C.1
gcctgcagtaccgtccgtnatcccgttcgaccccgcgtccgtcacnctttctcgcatctcatcntactcacatcattctattatgcaagaagtgtgttggcaactataataatatcaaacattactcttttggattgcttcctataataatatagatgcaactattttattgggctattgttgataatatatcaaatatataaatatggctatatatattttatttttacatt

SEQ ID NO: 52204 - DNA, 1860 bp, Oryza sativa
  Clone ID: PAT_MRT4530_54522C.1
atggcggaggatggaagaggagaggagaaggccgtggacgtggtggcggtgaagaagccgaagcagggaggcttcaggaccatgccgttcatcctaggtaccggtatcaggaggtacaaattgctggaccgtaaaaatgctatttctcaaaagggaaatgcgaacgacttctgcgaccggctcgcgaatgtggggttcagctccaacctgatcacgtacctgaccctgcagctgcacctccccctcgtcgacgcctccaacacgctgaccaacttccacggcaccgccaacctcaccccgctcgtcggcggcctcatcgccgactccttcgccggcaggttctggaccatcacgttcggctccgtcatctaccagctcggcatggtcttcctcaccctctccgccgcgctcccctcgctccgcccgccgccctgcgccaagcacgccgccgactgccagcgcgcctcgtcctcccagatcgccgtgctctacgcctcgctgctcttcacctccatcggcaccggcggcacgcgcccctgcatcatggcgttcggcgccgaccagctcgagctcgacgctggcgcgcgcgggcgccgcgggcgcaaggggcccaagtggagcttcttcaacctctacttcttcggcatcgagctcgccaagctcaccgccgtcaccgtcatcgtgtacatccaggagaacgtcgggtgggggtggggcctcggcgtgcccaccatcgccatgttcgccgccgtggtcgccttcgtgtccggctactcgatgtacgtcaagatgcctcccgccggcagccccctggtccggctggcgcaggtcgcagccgccgccttcaagaagaggaaagccgtcatgccggagccaagccgcctctacgaggacaaggtgctcgacgccggcatctccaccaccggccgtcttctccacaccgatcagctaaagttctttgacaaggcggccattatcacggacggcgacgtgctgccgtccggcgagccgaagctgtggcggctgtcgacggtgcaccgcgtcgaggagctcaagtcgatcctccgcatgctgcccatctgggcggcgggcatcctgctggtgacctcggcgtcgcacaacagcagcttcgcgatccagcaggcgcgcaccatggaccgcgacatcacgccgcacttcaagatcccgccggcctccatgctcatcttcaccaacctcgccatgctgctcaccctcgccttctacgaccgcgtcctcgtccgcgtgctccgccgcttcacgggccacccaaacggcatcacccacctccagcgcgccggcgtgggcatgaccattgccatgctcgccaacgcggtggccgcggtcgtggagagtcgccgcaagtccgtggccgcggcgagcggcatgctcgacgcgcccaagggtagctcgctgcccatcagcgtcttctggctggtgccgcagtacgccatccacggcgtcgccgacgccttcatggacgtcggccgcatggagttcctctacgaccaggcgccggagagcatgcggagcaccgcggcggcgctctactggctcaccatgtcgatcggcagctacctcggcacgctgctcgtcaccatcatccacgccaagacgcagcggagcgggcagtggctgcaggacaacctcaaccgagccaagctggacagctactactggctcgtcttcggcttgcaggggctcaacctcatctactacttcgtctgcgtcaggtactacaccttcaagccattggagacggtgaaacctgaggaggagctcgagctctaccgtggaaatggcaacgagggcgatggcaagaaaggaggaaccttgaagtag

SEQ ID NO: 52205 - DNA, 311 bp, Oryza sativa
  unsure (1)..(311): unsure at all n locations
  Clone ID: PAT_MRT4530_54523C.1
cggcagcgcagccccaanancncaagctncagccgctcggcgaggcgcncacgnnnncgaagagacaaccncacccngnccgagncgagggggancccccgccacanagcgcacaagnacgcgaggcagggaaacccggacccgancggcacgggcgcgcnggagcgcgcgnccancgagcaggggcngcagacggaggcgcagagcnncgacgcgcccagcgccgngcaggcccaccgccccgccggcccgccgcccggccngcccgggccgggcgccgccgggcccgggncccggcccggcccccgccc

SEQ ID NO: 52206 - DNA, 229 bp, Oryza sativa
  Clone ID: PAT_MRT4530_54524C.1
ctgacgcgtgggcggacccgtggacggacgcgtgttggctcgacagttcgacttactcccctcaagcctgaaccccttcccctaccaggcgcggctgccgaggattgcttgatcccttcgccatcctgcctcgccgacgcgcgccaccttgccgtggaatcgaaggctataagccgtttgcggttttagataaattaggcccttttcaatccatcgagtctgaagtgcc

SEQ ID NO: 52207 - DNA, 633 bp, Oryza sativa
  Clone ID: PAT_MRT4530_54525C.1
atgtggcgatgtcaacacccaaaacttggcgtctgcttgctcaccatcgccaccggagcaaacgggcacgcagattgggccaaaaaattgcgctgtttgctagctagcaggttaggcggcgtgggtctttcgctgctagagctagacggcggcatatgcaggccgggccaagcagtagtgcagtgctgggtcggctttcgccaagagcaagctagcgcggtgtggtcgagtgtccttgtcgcccgcgtgtacagcagcggatggcgtagctccaaagacttcattatcacacttccacacttgactctcatccaccttgaaaatccctttcattatctcttggcttttcttacaccaccacatccacatgatgaagaccccgctgccgctgggctgattgccaacctcagcacgggcagagtcgcgtggaacaacgttgggccaggccgagccaaactaacagacgggcctcaacttgggctacgccgctacacccgccccagctctcggtcacctggaccgattcgggaatccgcgtcctaccaggttgctgcctgcttgtgtgtgatcgtcgtctttgcgctgggcagggccgagtcggtttcgtttcgccggctacttgtgtggggttag

SEQ ID NO: 52208 - DNA, 2727 bp, Oryza sativa
  Clone ID: PAT_MRT4530_54526C.1
atggcgaccgccgccgccgacgagctcgcgctgcggcggctggacgacgccacccgcgacgcccggaggcttcagctcgagaccctccgcgccatcctcgccgagaatgccggcgccgcctacctccgccggtacatcccctccgacggcggcgcccaccacctcctccgctccaccgacctcgccgcggcggccgacgaattccgcctcctcgtccccgtcacctcctacgacgactacgccgagtccatccgccgcgtcgcggatggcgacgctgcccccgacgagctctcgccgcgccccctcctctgcttcttcctcagctctgggacgagctcgctgcggccgaagctgataccctacttggattcgccgggggcgagggccgccaccgccgccgtgatgcaggccaactccgccctcgtcagaaggctgttccctccacggccggcggtgagcaaggcgctgtggttcttgtacgccggcgaggtcaggaagacgaagggtggatacgaggccatggcggcgacggcgtggggcatccggagcagcggcatccggggagcctcgccggtgatgtccgcctgcgtcagccccgccgaggtcatcctcggcgccgaccaccagcagcagatgtactgccacctcctctgcggcctccgccgatgggacgccgtcgactgcatccgcgcgccgtacgccgccgccctggcgcgcgccctccgcctcctccagtccaagtggcgtcaactctgcgatgacctcgagtgcgggacagtctgcgccgacgtcgtcaccgacgcggcgatgagaggcgccgtccaggacggagtgctcgccgggccatgccccgagctcgccggccgcgtccgccgaatctgcgagagggatgactggcgcggcgtgctgcgccaactgtggccggacgcgaggtacatctcctgcgtcacgacggggaccatggagcagtacttcccggcgatcaagcacttcgccggcgaggcgttgccggtgctcggaacggactacctcgcctccgagtgcgccatcggcatcaacctggagcgcacgtcgccgcctgaggaaaccacctacgtgctcctccccagggcggcatacttcgagttcatcccgttcgacatggacgccgccggccgcggcgccgccgcggcagagccggtggacatcgccggcgtggaggccggcaagacgtacgagttggtggccaccacgttccgtgggctgtaccggtacaaagtcggcgacgtcgtgaagatcgccggcttccaccactcctcccctcggcttcagttcgtgacccgcgcgccgccgccgcaagaacacggcgaggtgctcaccgagagggacgtcatggccgccatggacaccttccagctcatgctaaaggacggcggcgaggttatcgaatttgcggcgttcatcattgacggcgacggaggccagcggcggcggcgatgcgcgacgatcgccgtcgaggtgagcaatggaagcaagctgctcgaccatgagaggtcagccgccttcctcaggcgatgcaccgcgccgctcgagggctgcctcggcggagcgtacaggctgagcagagccaccggcgacgtcgcgccgctggaggtcgccgtggtgaggcccggcacgttcgacaggctcgccgaggccgcgatccgcggcggcgctccggcgaaccagtacaagccgcccaagatcgtcaggcaccggcacctcgtcgatgtgctgcaatcctccgtgaaaagaaattcagacttgtgcagttcagaagcagaagagatggaagctgcatcatcatcgggagctctgccattgccgttgccattgctcgtccatgatcttggaacccgtagcgatgactcgcagacgcaattcagcatctgcaaccaagcactcagcactgcagccatcgagctactgagagatttcaggtgcttcgagactccacaaggctgggtactcactctgaatcctgcgtcactgcaaaccttcctatggcgacctcaggacagcaagaagatcgatctcccaacggcgaaacagaacttccctagaagcggcaagtgcctcctctccggcaacccaatctcgtcgtcgtcagattgcgccgtgttggtactagatcttgacaccccagcgatgctagtctgcaagatcggaggcagtgaatgggattctttcagctacgagctctccatggtcagcaagaacaacaagaccctggaggttcacatggccaagcttcagggcatcgatgctgttgccggcaaggtgtactacacattctcaggagacgctctcggagtaatcgagttcagcctggagtcatgcggcgagctgtttcttgtggtcgtcttcttcctcggccacaacctgcacaggatcgcggaggtggcggtgtacaagatggatttctcggggccatcagagtggtgcaaggtggacgggatcggtgacagtgtgtttcttctcggtggagatttcatcggagcttctaattttggagcgtcgtgctcggctagtgaccatggtttgtccgggaattgcatcaattttgtgaacaatattgccgctgaggagaattttgttcatgtcatcgacttggagaaagggactgaagaagtgcttcggcctttcagacacaaaggatacccgctgccgctgcgtccacccttctggctattaaccacccatgattga

SEQ ID NO: 52209 - DNA, 356 bp, Oryza sativa
  Clone ID: PAT_MRT4530_54527C.1
aaaaacaacacgttgccttaccctaaagtatgaagtatgaacacaaatatttcaggccttctggtgataaaaagtgatcgtacgtaacgcttatacaaaagctgtatcgtatctcgccgatgtcccggacggctcacgccgccctgaaccgtcgccgtcgccgcatcgccccatcgggctcctccgatcctgccgtgatgatagcgcaacatcatcggcctccagcatgcggacgacgctgcccatcgtgggccgcttgtccgctttggggtcgacgcacttgagggcagccacgagcgcgcgcctcagctgccgtttggttggcttggcctccatcgcagggtctactacctcct

SEQ ID NO: 52210 - DNA, 252 bp, Oryza sativa
  Clone ID: PAT_MRT4530_54528C.1
atggcgacatgtgagtacaatgcacttgccatctgctgtagaactgatgataaatccagagcccgcaccatgcataacgactcgacggccatcaatcactttgacagggaacccaagagtaatcgaaagggaactgacacattggatggaactgaggaaactgcgatcgagcggcacacgcccgcaacccgcgcaatgtcgccgaccagagacgtcgccacgaccaccaagcatatgctgcggccgcagtga

SEQ ID NO: 52211 - DNA, 464 bp, Oryza sativa
  unsure (1)..(464): unsure at all n locations
  Clone ID: PAT_MRT4530_54529C.1
gcgtctaagtacggtcggatacgtgcggtacggcacgagctctggcatggcggcggcgccgaccatatccggtgcacgtgggcatccacatgccgcgcgcggagcgtggctcgctatccaggtccgcccatgagacgaggaagcgtgagggctggcagctcgacggcgatgtttggtgttgggtttgggcgggggacgacctgtggcgaccaggctgcggagacctgatgcgagacgctgccgtagctgcctccactaccgagcacggtggcgtgggcatactacggttgcagcgcagaaagtgcctgagagatgcctacgttgacaccattgatgcgagaggaggcaacgacgcctctaaccttatctgtgtggcggcggctgtaggtgtcaacggtttgattgacgacataccanggctgtgcgctgtactgtgcagtgggtggctgacgaggcatcatgcg

SEQ ID NO: 52212 - DNA, 190 bp, Oryza sativa
  Clone ID: PAT_MRT4530_5452C.1
ctcctcttcgctcccccaaatcccggggggagcctcggctctctcccacagcaccgcctgctgcgtcgatccgcttaccgcacctccttggcggaacttcgatgcagacctgccgggctccaccggagaccacaacactcctcatgagtgggcgtatgagcaccgcagcctccttcatgggggggggggg

SEQ ID NO: 52213 - DNA, 296 bp, Oryza sativa
  Clone ID: PAT_MRT4530_54530C.1
gacagtggcacggtctagatccgatgcacacactatgctagttgaactgtaacctctattgctagggattgacatgaaacaagagcggactctggggaccagagactgccgaggttgatacggcgagtgactgtatacgcatactgttgctgctaatgctaacagcatcagatgtaaagcacggatagactacacatatgttatatgattcatgacatcatactattattgaaactcggacatgttggaagcatcacatactgctgcagccaagagattgcatggagactggattc

SEQ ID NO: 52214 - DNA, 180 bp, Oryza sativa
  Clone ID: PAT_MRT4530_54531C.1
atgccgacgctgctgcaagttggctgcagcagcactgttgcattttgtacctccaacgtcacggcctttgctgcagcaggaaattccccaagcaaattgctgcggctgtggctgcgcacagtgtgtgaagcactgtttgtgccggcgcagccgcagcgcgggcagccgaacaggccctag

SEQ ID NO: 52215 - DNA, 219 bp, Oryza sativa
  Clone ID: PAT_MRT4530_54532C.1
atgtacgtggttggtgaagattccatatggcatacgatggaggtattgcgtgtgtatgggatgtggggtcaaatttggaaggactccaaatttggtatgattgattatgtaaagtttgttttttgtacgagaatgttccctatggggattaggacttctagtatgagtttggttcgtggctttatactgcctacctcatgtataaatagggagggagcg

SEQ ID NO: 52216 - DNA, 722 bp, Oryza sativa
  Clone ID: PAT_MRT4530_54533C.1
ctattgaggatcttccctcgacagctggcgcgccaggtaggggcggttgcgcattccgagaggaagtcgctttcttccgtcccaattttctccaggccttagctgaccatggtcgaggtcctggaagtagaggaggaggcggtggcgtttactcccaccccgtccgggagtggggattccggcgagagccgaggtcctcgtcaccgttgccatggttgtcacgccggaggtgaggaacctcagccgcacctcccccttcgtcgtcggccgccgtagctcgccgtcgtcggtcaagccgagccgtcgccaccgccccttcgtcgccggccgtcgtcgtttgtcgtttggcacgagggtgagtaccgttgggttcgcctcgtcgtcctcgtgccaaccacaagccagcgtgggcaacggctttaccttttgtatagcatgattcattacggagtgccagactgagaagcggcgagaagtccgtggcggtcgctggggagtccatgcctctggtttttgaggggtgccgtggtggtacttcggggcatggcaacatgtgtggaatcgtgtcttgtgggtacagtgaattctctataaatcattttatcatcctctcccctcctgctttcaacttgagtagttctgagacattgaaacttgaagacgccaatgaggtctacttatggaggtatggttgcattcccgtcattgatgtagtccagtga

SEQ ID NO: 52217 - DNA, 405 bp, Oryza sativa
  Clone ID: PAT_MRT4530_54534C.1
atggggctccctgttttgggccgtaacgccgcggcggtgttgtgtttcgtgggcgcgcgcgggtgcacggcgggacgggccggcatgtgctcctgcttgccacaaggcccagtcagcagggtgaaaacagtgaaagtgtggaacttggttcggaacttccgatatgacaccgtgttcccaggacttaaagttgtggctccggttgggtctgtgctggagcaggctgcaacaagtggtatcatggtggggaggtttggaacccggaataatttctatgggttacatgtggtatcatggtggggagttttggaacccggaataatttctatgggttacatgtggtatcatggtggggaggtttggaacccggaacaatttttatgggtcacatggtggggaggctag

SEQ ID NO: 52218 - DNA, 1131 bp, Oryza sativa
  Clone ID: PAT_MRT4530_54535C.1
atggctgcctccgagcagcgcgtcgtcgccgtccgcatggtcggtgggccgatctaatggacgtcggtccggccgcggtggataaccaatcctaagccgcaggtccccctccccggcctggccacggttcctccctcagcgcagatatagccccaagggctcgatcagcagcgaaggtgcgtgctgtagctgtcgccgagctgcgtctttgtcttagtctgcatggtcggcgggccgacggaagagacgaggtgttggacactctagctgtacgggccaaggcagccgttcccgaaagcctgacggccacaggttgaaggtcacaactccgccaaacgcggtatcaccaatctgtcgtaaatccactgaggctgaagataggaggggtggtagttaacagtattggtctccccgatctccctcgagatgtcagtccgcatgaggaaactatatgatgatagtcctttcataatacatatatttatccaattccaaatagagtctgtggtgcaagatgtagttcctctcttttattacctccttgtaagcttccccccagattgataccattagtctatgttacagcaagcttgaaaaatgaacattggaagtttttagcgtataaattactgatgtaaaaatgtacaaacatatgacaatttttttttattgaactaacgattttcatcaaaaaaaaaaaaaaaaaagaaggaactttacacataccagactctcgacttttgggaacagatcaagaccccagggatgtctttgagatgctctggcctatatctttctcagttccgccatacctctcctcatcttttagcctcaggagatggcaaaaggagtgccactattataggtgatgtgtacattcatccgtctgcaaagatcggtcctaatgtctcgatatcagcaaatgcacgtattggagctggagccaggcttattcattgcattattctggatgatgttgaaattatgggtgaaggtgaccataacgccaaactcggtatcacaattcttggtgaagccgttgatgttgaagatgaagtggttgtagttaacagcattgtgctccccaataaaactctcaatgtcagtgtgcaagaggagatcatattatga

SEQ ID NO: 52219 - DNA, 897 bp, Oryza sativa
  Clone ID: PAT_MRT4530_54536C.1
ctataagagcagacttctattagccgcgtacagatagatagacacaacagcaacaacaacaagcgaattcttcttgcagatagggaaaaaaaaacgaaagcgagagatgaggagcagctcggctctgttcttggcctttgttcttctcgccgtcttcctcgcggcgctccccttcgccgaatccagcggcaggcaccaccaccaccaccactcccatctccatggcagaggggaaggcgagagaggaggaggagaagcacggtcgctggcggcgaagggggcggcggcggcgtggccgtgctgcgacaactgcggcgggtgcaccaagtcgatcccgccgcagtgccagtgcatggacgcgaggccggcggggtgccacccggcgtgcaagagctgcgtcaagtccagcctcagcgtctccccgccggtctaccagtgcatggaccgcatccccaacctctgccagcgccgctgcaccgccgccgcccgctgacctcccccgccgcccatctgacccgacccaccggccaccgccaccgaccggccttacttaattaagagtggtttttgtttgtccctttttttttttggaaaagctgaagaagtgaagaagcagtagtacctactgtactggaggtgattggagggagcagctggtttcaggtttatgtgctggaatcagcctccagttttcatctcctcgctctgctaactacggagtaattgtgtagagattactcgccgagctatatgtacaaacggcctgtgtgatgagacgaaattgtaatggtaaattttttttcaccttcataaaaaaaaaaaaaaaaaaaatgttgctagcgaaatcaccatgcaaacatccttggggcctcgtgccaaaaaaaaaaaaaaaaaaaa

SEQ ID NO: 52220 - DNA, 453 bp, Oryza sativa
  unsure (1)..(453): unsure at all n locations
  Clone ID: PAT_MRT4530_54537C.1
ctttgagatgctctggcctatatctttctcagttccgccatacctctcctcatcttttagcctcaggagatggcaaaaggagtgccactattataggtgatgtgtacattcatccgtctgcaaaggttcatccaacagcaaagatcggtcctaatgtctcgatatcagcaaatgcacgtattggagctggagccaggcttattcattgcattattctggatgatgttgaaattatggagaatgcagttgttatacactcaattgtggggntgaagtcaaccgtaggaaaatggtcacgtgtacagggtgaaggtgaccataacgccaaactcggtatcacaattcttggtgaagccgttgatgttgaagaatgaagtggttgtagttaacagcattgtgctccccaataaaactctcaatgtcagtgtgcaagaagagatcatattatgatag

SEQ ID NO: 52221 - DNA, 459 bp, Oryza sativa
  Clone ID: PAT_MRT4530_54538C.1
gccatctcagattatagtgtgtatcagcaagatgaagtgaggatgaagtatattgcacttgggccttgtcgaccaccactagagcaatttcctcaaagaaattgtggagatgacttaaacacagctttgcaaaggagggcgcaagatattgtgaatgcggttgagctcattgttttgacaaagatgcaattggagatgttgcggcaagatgatgggtgggagaattttttaaaaaaagtcacctcttttttatgaagaacgaagtcaaagttcctcagatggatgctaggtacaagccggttggaagatcaccaagcttctttggctcgtagagtcaagttgtaacaacttgtgttgatttttcagaacatggacaggatcacactatcttatataatatatgttgctgatgggtatcattcaatggcattttcttcctctgtattggatccaatcttt

SEQ ID NO: 52222 - DNA, 388 bp, Oryza sativa
  Clone ID: PAT_MRT4530_54539C.1
atgaatgccaactttacagtatgatcatgttatactgattataccgctagcttatttgggagatacatcggtacgagtataatgtttacttatgcaattactctatgtcatgacgatgatattagattagtatctggtagtttatgtgtggtgtctagattacgggatatcattatttggggttatatgctgtggatgagaggtgggccactgatggtgacagcttagtacaggtattccttcctgcatgtatatagtcctaagttaattttttggggagggtactcctccgtatttagccccggttgtatggttatgacgggctgtcgtaagaaacttggcaggcaggggtggcttctcgaagtactaggagggcatcagaaagagg

SEQ ID NO: 52223 - DNA, 438 bp, Oryza sativa
  Clone ID: PAT_MRT4530_5453C.1
atggccgaggggccgagcaggccggcgcttgagggcgcggcccacgagcgaaaaggccgagtggccgaggggccgactgggccggaccgacgtatggaggtggagaggagagggcgccggctggcgctcgcgtggggcctacgtggcgaccacggaggccggccgggcggaatggggaaggggacggccgagaccgccagcggcgacggcgggggactcggcggcgcggcacgagcccggcggaagggagtacaccggtgtggagagatggggaagaggaagaagaccaccggctcggattcgcgcgggaaggaccgacggcggctggcgacggcgcggggcagcggcggtagcagcggcgcggggatggaacggagaagagggccggcgaccttggcggcgcccagagggggtttctacggggagctagcggcctaa

SEQ ID NO: 52224 - DNA, 1043 bp, Oryza sativa
  Clone ID: PAT_MRT4530_54540C.1
tgcaggaattcggcacgagggtagctagctagacacccgcgctcgctcgtctccattgaagcgagaaataaagtagaaggacacagacacacttgagtagaattttagagatgatgtcgagagaacgcaagaaggcagctgctctacacgagaagctgcagatcctgcgctccatcactcactcccacgcgctcagcaacacctccataatcacggacgcgtcagagtacatcaaggagctaaagcagaaggttgtcaggctcaacaaggagatcgcatgcgcagaagctgcagcactcagacagaactccatccccacggtgacggtggaaaccctagggcacgggttcctcatcaacgtgttctctgacaagagctgccccgggttgcttgtttctatcctggaagccttcgatgagctgggcctcaatgtactcgaagcaacggcatcttgcgacgataccttccgtcttgaggctgtaggaggagagaaccaggtggatgagcatgtcatcaagcaaacggtgctccaggccatcagcaacagcaactgctcggagagcagcggtgaccaggaggggtagagcaatggtgatcttccatttgcattggatggcattttgatcaggacaatcatatcgcgcttatggactgcagctagctgaatttcatttccctatctcgcttcttgctcgatcagttgcaaattttccgtgactcttctcttgattgacatctacccgagatgatgagctgcaaatatctatgtcagatgaaaccctagcatccccttgtactaccagataatgatattatatatgtgtacgtacgtagtccataatccatatatggagattggcaaggtgtaagatatgctagctagctgtacgttcattgtactactgatatgatgaccatagtaagctcatatatgtttgcccttttccctgccgtgcgtatgatggtgaaaccaatgagagtacttatctcacattataagaagagataagaagttgggaataattgaaattcagctgttaagt

SEQ ID NO: 52225 - DNA, 360 bp, Oryza sativa
  Clone ID: PAT_MRT4530_54541C.1
atggatgggcgcggggcgacgtcgtgggcttggatggggtgcgcggtggcggcggcctggactggctgcggcacggcgattgatgccgcgtgcccgctcgtcctctgcctacttggccttaaccaaggaagaagaagaggaacggacgtagtcgggcatgcgaacgtcgccattgtttcatgtcaaaaatgcctcgccgtcggccgccgacggccgactgccctccgcgcgcagcagccggcggcggtggagcagtcggtgaacaccatccggttcctcgccgtggacgccgtggacgcaagctctgccctcgccgcgcaacccatctccctcgccgcggcacctcgtccacctgtctga

SEQ ID NO: 52226 - DNA, 577 bp, Oryza sativa
  Clone ID: PAT_MRT4530_54542C.1
gcacgaggcgaaacacgaggcaatgcggcccagccgccgccgccacccgctgccgccgctggcacctggcctgctactgctcctcctcctccacgccttggcgccgccgccggctgccgcggcggtgggcgtgaactggggcttctcctcctcccaccctctcccggcggcgcaggtggtgtgcggcctcctcctccccaactccgtcccccgcgtcgcgcctcgccgccgcctcccccgacgcgctcgcggcgctctcgggcaccggggtcgcggtcaccgtcggggtccccaacgagctcctccgccccctcgccacctccaggaaggccgccgccgcctgggtccatgacaacgtcacccgctacgcctccggcgtacggttcgagtatgttgctgttggagacgaatcatttcttctcaaccatgggcaacagaatcaatcttttcttgtcagtgcagcagcaaatattcaacgagcattggttgatgcaaagttatccaataaaatgaaagtagttgtaccttgtagctcagatgtatatctgaacacatcggctttgccttctaaagctta

SEQ ID NO: 52227 - DNA, 321 bp, Oryza sativa
  Clone ID: PAT_MRT4530_54543C.1
gcgtaacttacctggcaaaaaagcggggaagtaaagctaggggtgaaaagaaaggagaaacataccctagccgtaccgatcgatgcagaggacgccaccagcggctattcgtgaggcgaggcgtccgggaccactatcgccgctggtgaagctgcttctggtgcggcatcagcgttctgggacgccgaccgggccgaagaggctgtccgtgctgtgtcgcatggatcgcctgagggcacagatcaaagccctagtgtggatgatgcaaaaaagtgggacttatatcctgcaaagacatatagtgcggtttacaaacgatca

SEQ ID NO: 52228 - DNA, 607 bp, Oryza sativa
  Clone ID: PAT_MRT4530_54544C.1
tcgatcatattcagaaacctaagtactttaaaatttgctgaagggtttctggagttgagttaggtgctgcgagaagtaacagagaggggaaagacataaaagagctgctggaacaggttgcatctttgaaagatacaatagcacgaaaagatatggaaatcgaacagcttcagctccttaaatccaaatctcccaattcaatgacagacagaaatggcagtaacttgctgagacaatctacttcctctactggtttgtcatcacttcccgtggcaagccaacagaaccaacagctatcaggatccgttgaagctgaagctgaagataatgcatctgacgatggttgctcagtgggggaaactgagtattctcctgctggtgcttcagaaacatcagcagaacgagcgcataaagcgccatcaagaataaccagattctttctcacgaagaacgggcagccatcaacttctagaccaaaaccaagggaggttgttccgaaaactcaaggtagcatgagacctggaactgcgcaggcgacaggaggatccttagccaagccttccaaaagacggtagaaatagaatctgacgaagcatccatgcaagtt

SEQ ID NO: 52229 - DNA, 1367 bp, Oryza sativa
  unsure (1)..(1367): unsure at all n locations
  Clone ID: PAT_MRT4530_54545C.1
atggctggctttccgctgatcacatcagcgatcacttgcgcagtgggcatcatcttcttctccgtttgctacctgcatccggcaccggtcgccgccttgtacttcaactactccaccttcagccaggacgacgggaacaccatcagactcgaaggcgacgcctccttcggcgacgggtggatcgacatcagcgccaacaggtacggccacaggggacacagcaaaggccgggcatcgtacagcgcccggccgatgctcctctggagcagggacaccggcgaggttgccagcttcaccacgcgcttctccttcaacatcaccccgcccaaagaggacggcggcatcgacaacaagggcaccggcatggccttcttcctcgccgcctacccgtccatgctcccgagcggggtcgatgagctcggctacaacatcggtctcaccgaccaaggcccggacgccgtggcgactggcgacagccggttcgtcgcggtggagttcgacaccttcaacaacaccatggtgcacgaccccgacgccacctacgaccacctcggcatcgatcttcaccctcgtcgggaacatgacgccgtcgtcgagtacgacaacgtctccagcatcctggccatgaggctgcacctcggctatgggcttagtggcccccgtcaccggccggattacaaccttagctacaaggttgacctcaagagcgtgctgccggagctggtctccgttggcttctccgcctccacgaccacatcctntgagntgcatcagctgcattcatggtatttcagctcatcgttggaaccaaaggccgcggtgcgtggcagagttgtagcgggagccaccgttggcacggtaatgttcgtcatactcctcttcgccatggtagcagtccttgtacgacaacgtcagagcaagaagagggagacagaggaggcaaagaacggaggcatggatggcagcgacgacgacgatgacgacgacggcgagaccatcgtagagatcgagatggggacggggccaaggcgatttccatactacgaacttgtcgaggcgaccaagagtttcgcggcggaggagaagcttgggcaaggcggtttcggcacagtgtatcggggctacctcagagagcagggcctcgccgtcgccataaagagattcaccaaagattcctccaagcaaggcaggaaggagtacaagtcagagatcaaggtcataagccgtctgcgccaccgcaatctcgtgcagctcatcggctggtgccatggccacgacgagctccttcttgtttacgagctcgtccccaaccgtagcctcgacatccatctccacggcaatggcaccttcctcacatggccaatgag

SEQ ID NO: 52230 - DNA, 2712 bp, Oryza sativa
  Clone ID: PAT_MRT4530_54546C.1
atggggacggtgaacggcgagtacgaggacttcgatgcggccaatcggcgtgcggaggtgatagattggctcggcgggttactgccggagttcgatttgccgttggattcttcggacgaggagctgcgggattacctcattaacggagaagcgctatgctatgttgcggacaagctcatgcccggtgttctggaggggacgtggggtggttatgcatcggaccaacggtcaaatgtgaagaagttcctctctgttgttgcagagatggggctgccaggctttggcgtgaaggatcttgaggagggatcaatgtcttctatagtggagtgtctcttggctttaaaggataatgtggctacacaattgggtggtcatatttctaacagcactgctaagactccaatcagaaggaaactggaacttcgagaaactgatggaccggtgctttcagttgccacaccagggaaaagataccctaagtcccagcaaagaagccctcttctttcaggacaaaagatcaatgaggttgtccaatttaagcatggaacctacacagatcttcctgctgctaagatctcagagatgctgcattcaaatagtttagataatgcccctacccaatcccttcttagagttgttaatggcattctggatgaaagtattgagaggaaaagaggagaaataccacatcgtgttgttcatttactaaggaatgttattcaggagattgagcaccgcattggtattcaagcagatcacattagaaatcaaaatagcatcatcaagacacgggaggataagtatcgttcaaaaattaaagcacttgagacattagtaaatggaacaaatgaagaaaacgagatggcaataaatcggcttgaggtagttaaggtagagaagtcaaaaattgatgagaaaagaaaactaggagagcaagacatgattcggctgatccgtgaaaaggagaatgcggagaatataattgctagcctccatcaagagatgcaagtcatgaataggatgcatgaacaattccgtgagcaaatggaaacaaaagctaggcagatggaggaacacttgacactaagagctaaggaggctgagttttgtcttatgcagtccaaaaagaaagttgaagaagttgaggctacttcccaattaaagtcacaactctggagcaaaaaagcaaacatttttcagagttttatgaataatcagaaactttctatcaaggatataaagatatcatctcaatccattaaacaagaaatgtatgcccttcaaatgacatggagggatgaaatatcaaatattggacatgacctaaaaggtttagtagatgctgctgaaaattaccataaggttcttgctgaaaaccagaagttatttaatgaagtgcaggaattgaaaggcaacatcagagtatactgtcgtgttagaccatttctccctggccaagatgggaaattaactgcaattgactatattggtgaaaatggcgagattcttattgcaaacccctccaagcaaggaaaggaagggtatcgaatgtttaagtttaacaaagtgttcggtacacattcctctcaagctgaagttttctccgatatccaacctttgattagatcagttcttgatggattcaatgtttgcatttttgcatatggacaaactggttcaggaaaaacatacacaatgagtggaccagggacatcaagagaagactggggtgttaactatcgtgctttaaatgatctgtttgatatttctctaagtaggaaaaatgcattctcatatgagtcaaatagagcagttggatcaacagctctaaatgaaaggagcagtcgctcccacagcattctaactgtgcatgttagaggactggacgtgaagaatggttctacttctcgaggatgtctacatctgattgatctcgctggaagtgagagagttgaacgatctgaagcaacaggagacagattaaaagaggcacagcatattaacaaatctctctctgctcttggagatgtcattttttctttggcccagaagaatgcccatgtgccatatagaaacagcaagctaactcaagttcttcagagttctttaggtggacaagcaaagacactaatgtttgttcaaataaaccctgatattgaatcatattcagaaaccataagtactttaaaatttgctgaaagggtttctggagttgagttaggtgctgcgagaagtaacagagaggggaaagacataaaagagctgctggaacaggttgcatctttgaaagatacaatagcacgaaaagatatggaaatcgaacagcttcagctccttaaatccaaatctcccaattcaatgacagacagaaatggcagtaacttgctgagacaatctacttcctctactggtttgtcatcacttcccgtggcaagccaacagaaccaacagctatcagtggtcacactgactccactagctgatactgggcttgcaggatccgttgaagctgaagctgaagataatgcatctgacgatggttgctcagtgggggaaactgagtattctcctgctggtgcttcagaaacatcagcagaacgagcgtatgtactcatcctgttttcctttatctcctgtgctaaaccatcgtgcgcttgtgacactagtggagaactaatgattgtcccggttagattaagaaccggtacttaa

SEQ ID NO: 52231 - DNA, 257 bp, Oryza sativa
  Clone ID: PAT_MRT4530_54547C.1
aagggaataccaataacacctcccaattctaaccaatccctcttcctgtttaaattaaggttttttcctttccttaaaattggaaaaggccggtttggaaacctggtaatttttccaaattaaatttaaggttccttttcctaataataatgtatatttgaactttgggaatatttttgcccttgtaaaatatgtttttttttccattgaaatatgaatacagtggtattacttttgtgttaaaaaaaaaaaaaaaa

SEQ ID NO: 52232 - DNA, 364 bp, Oryza sativa
  Clone ID: PAT_MRT4530_54548C.1
cccacgcgtccgatatatattttaaaaaaaaaaaaaaaaaaaaacaaaaaaaaaaaaaaaaaaaaaggacgaacaaaaaaaggggggccgattttacggtcccgggcttgcgggggcgtccttttaaaggaaccaaacttcaatcccgtgccttggacgccattccttttctttggggttacaaaatcccgtttcgtaggccgctgtttttgacctgccttaattggaaaacccttgcagttccctaacttaagggcatggcagaacaaaccgttttgcccagttggggtttaacttaaaaggcccatcccaaaggccttttcaaacagtttttaactcggagtgtcaattggaaccccccttt

SEQ ID NO: 52233 - DNA, 1393 bp, Oryza sativa
  Clone ID: PAT_MRT4530_54549C.1
tttttttttttttttcccagaggagtgtcatccctttccggcccctctcgggtcccgcgagaccctgcctgttttttcttttctttttttagagaaggctagccagtatgatcagtattcagaaacagcaaaaacaggtacatggtcaattgatcaaaggccaaaagaattaaaattcctgaacattgaggactcatagatagattgatttgccgctacacaaaagcgtactactaccaatactagagctatccactcatagcctaccacccaaccccaacccaatattgagaatattcatggtccgatacagcaacagtataaagctctgaagtcatatttaattaaatgataaacaatatatagaacttatcattcttgaggtgtggccgtcatgagtttattccaatcatattattagaaaacagtaggcaccgcacgtgaggctcaggcgtccacgggaactgccgacggcgcagcaggggcatgcaggatggccttgggctcgtgctcttccttctcctcgtcctcctccgcctcggcctcatacgcgtcacgttcctggacccagagctccgcgaactcgcagttcttgtactgctcgaaccacggcccgccggaagtgtagtggatggcgcgcggcgccgtcccggccgtgtcggcggggtcgacgcggttgtgccccacgaggaagttccacacgaagggcacctcgccgatgtcggcgtcgtccagccacatgaagcggtgcaggtacgcgccgctctgcgtgctcacggcctcgggcgtcagcgcggcgcggttctttgggtgggcgcagttgaagagcaccatggacgaccagttcttgcgcgggtacaccgtctgcacggcgccgtccatcttggtggcctccttgggcgcgtagtcgtggtgcacgcacagcaccgcgtagcgcgggtcggccatgcgcgccagctccgcgacgtcggcgacgaagaggaagtcgcagtcgacgaagagcgcccagccgcggtagccggccaggtggggcgtcaggaagcgggtgaaggagaactcggtgctctccgtgggcccgcgctcccgccagtacagccccgcagaccggagctcctgctgcacgatcgggatcacggccaccggcacggaggagcgctgcagcagggagcgccggcacacgcggtacgcgatgtcctcgcgcgagtcgtacccgacgaacacgcggaacgtctcagcggcctgcacgtcgccggcgccagctacagggccagtcatcacgacgtcgttggtaggcgtgaccgacatagtatttgttggtgatatataagcagaaggttagtagtactgtttgctagcttccccgcaaaaaaagaaaaaaagagtagtgtttcgc

SEQ ID NO: 52234 - DNA, 335 bp, Oryza sativa
  Clone ID: PAT_MRT4530_5454C.1
aaaaaaaaaaaagaaaggagaaaaatgaagcatgaaaaagaaaagaaaattaatatgaatactacgaaagaatgaaaaaaaaagtttaaaaatgaagagtaagatattatgaaatgatagagggggacggggggcgggtattaggtgttctgctttacggagtcaggcttgcgacgtttatttttttttagggcactgtaaatttcagtaggtgtggatgtattttcaagtgatcagccttggtaagacgtgggactctcacaattgatggctctttctccagaatccacattgcgcacgcgggtttaaaaataaaagggcttgcggtttttacc

SEQ ID NO: 52235 - DNA, 1191 bp, Oryza sativa
  Clone ID: PAT_MRT4530_54550C.1
aaacccaacctgatttctcaattccagcattagagaaggctagccagtatgatcagtattcaaaaacagcaaaaacaggtacatggtcaattgatcaaaggccaaaagaattaaaattgctgaacattgaggactcataaatagattgatttgccgctacacaaaagcgtactactaccaatactagagctatccactcatagcctaccacccaaccccaacccaataaacaacagatttgaaccaattcgatgcaaaattgcaacgcaatgcggcacaatgaattcaattggattcgattcaattcccctcctcgtctttctccttctcgccgttggccatgacgatctgctgctgcttctgcttctccttgtcggccttgagctcgtcggcctccttgatccagagctcggcgaagtcgcagttcctgtacctctcgaaccacggcccgccggaggtgtagtggatggccttgggctgcgtggacgggtcggcggggtcgaccttgttgtggccgacgaggaagttccaggcgaaggggatctcgccgatctcgtcgtcatcgagccaggcgaatcggtggaggaaggcgccggtctgggtgctgacggcgtccggggtgagcgcggcgacgttcttggggtggccgcagttgtagagcaccatggacgaccagttcttgcgcgggtacacggtctggatggcgccgtccatcttggtcgcctcggcgggggcgtactcgtgcttgacgcaggcgacggcgaggcggtggtcggggtcggaggaggggaggcaggcgaggaggccggcgatgtcggcgaggtagaggaagtcgcagtcgacgaagagcgcccagccgcggtagccggcgaggtagggtgtgaggaagcgggtgaaggagaactcggtgctctcggtgggcccccgctcccgccagtagagccccgccgcgcggagatccggctgccggatggggcggacgtcgacggggatggaggcgtggcggagcaggctgcggcggcacacctcgtacgcctcgtcctcccgcgggtcgtagccgacgaacacccggaacggctcctccgccgacggcgacgagaccgtctcatgggtttcctgtgcgctaaatataaggcaccgcctgcatagggtcactgccacacatcgtagggtgactgcctcgtgggccat

SEQ ID NO: 52236 - DNA, 475 bp, Oryza sativa
  Clone ID: PAT_MRT4530_54551C.1
ccaacctgtacgtagctctacgactgatggggggagtactggatccttcaattcaatcattctaacaccagtacattcttgacgtgatgatctgcttacatggctatgcgtttgctacatctaaagactgttatctgtcataagaagaagctgggacaccagtagcagatgaggacgcatactaccttcaagacctagacattgagagcttattcacgacattcatgatgatgcattggaagatcatagagcacacattcatgttacgctcatactaatggagaacatggaactttctgtttatcctgtcatataggaacacttgcgctcacactggacagaacttgacataattatgattacataacagagtacaagtcattcgtcttattggtccgtgcctaatatgacaccagatgagaagacattagtgggtctttttacactgtctcacacaaagaaccagttactgcct

SEQ ID NO: 52237 - DNA, 1202 bp, Oryza sativa
  Clone ID: PAT_MRT4530_54552C.1
atggtgcaaatgggtgcaaagcgaagtcacggttattctcttcgtatcgccttggcagcgatgggggcgcgctttgatgttgcactaagccatcgagcggttaacacagcactgtggtgtaattttcttgtcttttcgttgaagtttggtgtatggctttcaacatctagtcatgttatgctagctgagctagtgcactcagttgcagacttcgctaaccaggtgctaccattgtgcatggagttcaaaacttatggaattcgcaagtatgatgcaaatccccctgagaacatccactatgctgcattagtgattggtgggtccttcctaattgaaggtgcttcactgctggttgctataaaggctgttaggaagggtgcagcagcagaaggaatgagtatcagggactacatctggcgtggtcatgatccaacttcagttgctgtcatgactgaagatggtgctgctgttacaggtcttgcaattgctggagcatctttggtggctgttcaaaccacaggcaatgctatgtatgatccaattggctccatcattgttggcaacttactgggaatggttgctatttttctaatccagagaaacaggcatgctttaattggaagggctattgatgatcatgacatgcagcgtgttcttgagtttctgaaggctgatccggttgtagatgctctttatgattgcaaaagtgaggtgattggaccaggattctttagattcaaagctgaaattgatttcaatggagtagtcctggtgcagaattatttggaaaggactggacgtggagaatgggcaaaacagttccgggaggcttcattgtccaaggatgatacggagttaataagggtcatgtctaactacggtgaggatgtagtcgaagctcttgggtatgaagtggatcggctggagtcagagatccaaaagattgtgcctgggattaaacatgttgacattgaagcacacaacccagaagggctttcactttagagtaacaattttgtagatgtggatatattctccattcgattggtctcacttgctgtcaattccaacacaattttttgtatgacattggtattcatcctcagcgattttgctgttggcttgttgccatgtaagaatgataagcttataacttgttgcagagaaagggagtagttgagcgcggaaaaaaaaaaaaaaaa

SEQ ID NO: 52238 - DNA, 1308 bp, Oryza sativa
  Clone ID: PAT_MRT4530_54553C.1
atggccaacgtcgttttctttctcccggcgccatctccgcaaccatgccgagctaccgtgcttctgggcctgattgaacgaggactggagaccggaaaatgggcgctgtcgtcagatgctggaaggaacagcgattctgcgttctacctcgttcagaggggcaagagcagagcagggttgacgatgttgactggattcgtcaaccgcttctcttccgtgtcaagacccgaaaggttggctggaaaggtggccgtgatcaccggcggcgcaagcggcatcggcgaggcgacggccaaggagttcatccgcaatggcgccaaagtcatcatcgccgacgtacaagacgatctcggccacgccgtcgccgccgagctcggcccaggcgcggcctacacccgctgcgatgtcaccgacgaggcgcagatcgcggcggccgtggacctcgccgtggcgtgccacggccgcctcgacgtcctgcacaacaacgccggggtcacgtgctcctacgtggggcccctcgcctccctagacctcgccgacttcgaccgcgtcatggcggtgaacgcccgggcggtgctcgccggcatcaagcacgccgcgcgcgtgatggcgccacggcgcgccggctccatcctctgcacggccagcgtggcgggcgtgatcggcggcgaggtcccccacgcgtacagcgtctccaaggcggcagccatcggcgtggtgaggtccgccgccggcgagctggcgcgccacggcgtgcggctgaacgccatctcgccgcacggcatcgcgacgccgctggcgatgcgcgggttcggcgacgtgctggcgtgggcggacgccgagagattgaagcgggtcatcgaggaggacatgaacgagctggagggcgcaaagctggaggcggaggacatcgcgagggcggcggtgtacctcgcctccgacgaggccaagtacatcactgggcataacctcgtcgtcgatggcgggttcaccgtcggcaagcgcctcaacttcgcgcatgcttgagttcagaaaatccgaaaatttgacttccatgtggactttgttttattggaataataattcagagtttgtgtattgattaccagtttgttgtttagatttggtaatagggaaataaggataatcttaatccagaaactatcaattagtttttatacttgacatgtcataaaaatcatctatagaaatttatgtatctaataggtgttttctttaaaataaattattattccattacatctcttctctcttctttcatccacatttctcatcgtttttatctct

SEQ ID NO: 52239 - DNA, 599 bp, Oryza sativa
  Clone ID: PAT_MRT4530_54554C.1
attcggctcgagcaaagctcagacccaaaccttttctctgctcctcatccattccacaccaaaaagtaacagttgcagtttcggagggaaacacaacacaaaaagccccctccccccaaagcaaatcacctttttttctttcagttattcaaaaaatgttcgccgaagagaatggactcaagggagaccctagactccaagccatttcccaagccatcagagtcgtccctcacttccccatacatggaataatgtttcaagacataacgacattgttgttggatcacaaggcgtttaaagacactgtcgacatttttgtcgatcgttacagagacacgcacatttccgttgttgccggaattgaggctagggggttcatgtttggtccctcaatagcgttgggcattggtgcaaagtttgttcctttacgcaaaccacggaagcctgccaggggaagaaattcaaaaaaaaaaggccctaaaaaatggaccggatggctggaagtggaaggtgggggctgccaaccccgggaaccggccattaacaatggagaactgggtggccacaggtggaacaatgtcagcaggagtaaaacttct

SEQ ID NO: 52240 - DNA, 231 bp, Oryza sativa
  Clone ID: PAT_MRT4530_54555C.1
attccccgagcgccgcgcgcctcgacctcccctggctccctccacgagccggtgccccccggatggactcggctcgctcgcttcacgctcgtggatgatatgaacctagactcagcttgacctcctggagcacgctcggaaggatgacctacccagatccggatcgccatgacgaggaatacgggctggagcagtgtaataggtaaatttggatgaaaagggacctgagag

SEQ ID NO: 52241 - DNA, 346 bp, Oryza sativa
  Clone ID: PAT_MRT4530_54556C.1
atggtgctagagccgtgggatatgagggagggagggaggtgggacaacatcgaaggcgagagcatcaaatgtaaagtggttatcacacagaagcgacggtggcgtctcggcagaggtatcagagaagatgggtgcacctcaccactgctcggttataggaagagaagggttggaatgaaggaggccagtttggtgggccttgctagtactgtcgaggcagaagaaggctatgcacagggggtcattggtggtggtggactggtgggtgaccgggagggggatggggattgcgtcagcggcggtattggggtgaaggaaaggagaaaggaggcagtagagttggggg

SEQ ID NO: 52242 - DNA, 180 bp, Oryza sativa
  Clone ID: PAT_MRT4530_54557C.1
tcgttgaaaggaaacctctcctcttctccttcttgcgccgccaagacgagtcgcgattgaacacgcgagtggcgtccatctccatatgatgagcacgagcacgcgataggatcatgactgccctaaggcgtcattgatctcggagaagtgcattgtgtgataagaacgccacccacaggg

SEQ ID NO: 52243 - DNA, 106 bp, Oryza sativa
  Clone ID: PAT_MRT4530_54558C.1
atggaaaaggaggatccaaactttggatctaaacacaaccttactacagtagtaaccgagcagatccctactttctgcaagaggcttaatacggagtactataaaa

SEQ ID NO: 52244 - DNA, 685 bp, Oryza sativa
  Clone ID: PAT_MRT4530_54559C.1
ggggaataatagcaaggctgagtacaaccaccgtactcagcaagccacaccaacgatgcagacgtgcaaggggaacacaaggacggcagtgggcggtcccctcttgcgccgcggtgaatccggcagctggacaaccggacaccccggccgacccaactccatcacgcccaccctcgccaccggtgcctaggaaagggtcgagctatacttcagatcaagcagttacccactcccgcttgtggaaatggacctcgctgacgtcatcaagggggaggggcggcgccggcaagcgggcccaccggtcagcggcacaagggcgccggtccaccgtggatcggaaccaccgaggcggtccaccgccggtccacgggaaccgacggctcggatcggcccaaagccgatcggacggccacgaggcggcgcggctggggcacgggcacggcacagccggcctggtcgagcgatagcgcgcggcggcgtgcggccagacgaccgccggcgacagcggcgcgtcgcggcagcggggcggcggaaaggatggcggcgactggcacgagaggcggcgggaacggcgttccggcgacacccgaccatggcggagacgcggccgagggccggcggggccctcgagatgacgaagccgaaggaggtggcggcacaagtcggcgtcgaccggagaggcggc

SEQ ID NO: 52245 - DNA, 328 bp, Oryza sativa
  unsure (1)..(328): unsure at all n locations
  Clone ID: PAT_MRT4530_5455C.1
cgcagagctcacaagcccaagtcgcgtcgcaccgaagcagagtatagaaggagaggagcgtancgccgtcaggcgtcccatcgagggggcggcggggtctaagcttcagaaggcgatggtggcggtggacgagagcgagttcagccaccacgcncntttnntgggcggtgttcaacctctggccgaccattcgtgccgccggtgctcgtgctcaccgtgcagccgttcctccccctcggctacgtctccgccgcctccttcggctcccctctgggcacccccgttgtagccccggagctgatcaaggcgatgcaagagcagcagcagc

SEQ ID NO: 52246 - DNA, 399 bp, Oryza sativa
  Clone ID: PAT_MRT4530_54560C.1
atctggtcgatcgcccataaccgcgggcacggctattcgaatagttttactctggccagaggtgcacaactgaacccacaagacacaatcaaccggcatgtcaccgtgcctggccagacacgtcaccatgtcgagtgattgtgacaagacccttcatattaccccctctgatcaagcacaccacacctcaggtttcacccccactccccacaggcagcgggtagtcccttctcgtgcctaggcgaaccagaaagacgcataggctgttgtagggcccatctgaattccatcacgctcacccttgcttggatgcgtcagccagagaaaagctatacttcaagtcaggcagttatccattcccgcttgtggcaatcgctgtatgtcttctagggtttcccg

SEQ ID NO: 52247 - DNA, 890 bp, Oryza sativa
  Clone ID: PAT_MRT4530_54561C.1
tcaggccgacaggtgggacccgtgggccccacctgtcatcttcaacctccagcccgggccggcaactgccatggccgccgaaaaccgcccacgtcgccaccattcccgggctcctcgagccctctctcgcgtgggaccgggagccatccctcttcttcacctcctcccccgtttttcccaatttttggcgccgaatcgagccccactttcgccacgatgtcacccacgtcgccggccgttgccgcttcaaatccgccacgtccggccacgatttctcctccccgagcctataaaaatggtccccgtgccatcctcccccttttccccaaaaattccgaacccgctgcactcccaaccgctctgcccttgttgctcttgcgctctgtcgctttccggcgagctccggatggacgccgacggacatgaagccgccgccgcgccgcaccgcttgcaccggcggctccggtgctctttgccacaccccggccaccgctccgttgccacaaaactccgccgaaacaccacatccaccgagcacccgagccacagctgcctctcgtcacctccagacgcgcgccaccaccgctcccgtcgctgccgcgctgcgctaccaccgccatcggcatcgccggtcctcgccgcaccccggcccctactccgtttgcggccccgccggccctcggccgcgtctccgccatggtcgggtgtcgccggaacgccgttcccgccgcctctcgtgccagtcgccgccatcctttccgccgccagccgcctccctgtggtcgtctcgccgtcgccgtcctcggtgagaatccccaccggcccttctcctttttttttccctcctccaccactccccgtgcccgctgccgcgacgcgccgctgtcgcc

SEQ ID NO: 52248 - DNA, 915 bp, Oryza sativa
  Clone ID: PAT_MRT4530_54562C.1
atggcctcctctgcgtcctcgcaaagcgcgtcctggcactcagtgcaccgcagccgggacgccgccgaggcgaaccatctcggcatggcgcaacaggtggggaggttggcggtggcggtggggcagggccacctgccggcgtgccgccgccgcgccgcaccgcttgcaccgtcggctccgccgctctttgccgcacaccggccaccgctccgtttccacaaaactccgccgaaacaccacctccaccgtgcacccgagccacagctgcctctcgtcacctccagtcgcgcgccaccaccgctcccgtcgctgccgcgctgcgctaccaccgccatcggcatcgccgttcctcgccgcaccccggcccctactccgtttcccctccctgcccctggaacgccgccgccgcgttcaccatctctctccgccgccaccgccgagtacagccgcgtcgcgccgcctctccggtcgacgccgacttgtgccgccacctcctccggcttcgtcatctcgagggccccgccggccctcggccgcgtctccgccatggtcggccgcctccctgtggtcgtctcgccgtcgccgtcctcggtgagaatccccaccgtcccttctccttttttttccctcctccgccgctccccgtgcccgctgccgcgacgcgccgctgtcgccggcggtcgtctggccgcacgccgccgcgcgctatcgctcgaccaggccggctgtgccgtgcccgtgccccagccgcgccgcctcgtggccgtccgattcggctttgggccaatccgggccgtcggttcccgtggaccggcggtggaccgcctcggtggtcctggtccacggtggaccggctcccttgtgccgctgaccggtgggcccgcttgccggcgccacctcttccccgtcggatga

SEQ ID NO: 52249 - DNA, 1231 bp, Oryza sativa
  Clone ID: PAT_MRT4530_54563C.1
tcaaggggaaatgtgcgacttgccttgcttcttcactttgatcttccgaactcttttcctcgcgaccgcggacttccgaaacgacggaaactcgctgacgtcatcaagggggaggggcggcgccggcaagcgggccccaccggtcagcggcacaagggcgccggtccaccgtggaccgggaccaccgaggcggtccaccgccggtccacgggaaccgacggcccggatcggcccaaagccgatcggacggccacgaggcggcgcggctggggcacgggcacggcacagccggccgaggacggcgacggcgagacgaccacagggaggcggctggcggcggaaaggatggcggcgactggcacgagaggcggcgggaacggcgttccggcgacacccgaccatggcggagacgcggccgagggccggcggggccctcgagatgacgaagccggaggaggtggcggcacaagtcggcgtcgaccggagaggcggcgcgacgcggctggactcggcggtggcggcggagagagatggtgaacgcggcggcggcgttccaggggcagggaggggaaacggagtaggggccggggtgcggcgaggaacggcgatgccgatggcggtggtagcgcagcgcggcagcgacgggagcggtggtggcgcgcgactggaggtgacgagcggcggctgtggctcgggtgcatggtggatgtggtgtttcggcggagttttgtggaaacggagcggtggccggctcggggaggagaaatcgtggccggacgtggcggatttgaagcggcaacggccggcgacgtgggtgacatcgtgggcgaagtggggctcgattcggcaccggttttggagggggaaagtgggggaggagagtggaggaggtggggcgacgcggtcccgcggtcggggcgagcgcgcgggtggaggaggaggcggaatctgcggcgacgtggggaggccgtggcggcggtttcggctgagggagccggaggttagggatggccctgacaggagtctcttcagaagaatagcaagcagagatgataactgttctgataaacaaaaaggcaaatatgatgacatagatgagctggaagatgttgcacaagtagataagcagctcgaaagatatcaacgagatactttaagggcaataagacctcaacaagtatactgcatgggattttttgagaataagaatgggctatatagaatatcttga

SEQ ID NO: 52250 - DNA, 3394 bp, Oryza sativa
  Clone ID: PAT_MRT4530_54564C.1
atggcagcggcggcggtggccacggtgagctccgcgagcggcatcctcgcgatgctgcaggagccggcggaggagctcaagctgcacgcgctcgccagcctcaagtccgtcgtgcacctcttctacccggagatctccaccagcatccccaccattgagagcatgtatgaagacgaggattttgaacaaaggcagctcgctgcacttgttgtttctaaggtattttactaccttggggagctaaacgatgcactgtcctatgcacttggtgctgggcctctgtttgacatttccgaggattctgattatgctcatgctcgtacaggaaaagcattggacgagtatgccagtttcaggacgaaagcttctaaaggcgccgaggaggaagaatgcgggggccggagattataggcgatagtggagaggattctggagaagtgtattcttgagggtgaagatcagcgggctgtgtgcatggccgctgaatgcacagcacttgacaaactttcggggcttgtcacttggaattgcattgacagtttatggcagggaagaggaagctgacaccttgattgaacaaatgactagagatcaagatcccatactccgttatggtggttatgtaagatataccaaacattgccacatccagattacctgagtatttgccaatgcttaatgttcttgggcgagcctgaaactgtggcaaacatattggacaagctgctttctggaagcttggttttgtcctgtacaatgagcctgagcagatttgatctcgttgaaaacgaaaatcaagctttccttttgaatgtgaggaatcgtctggcttcacaaactcctgagtctaaccctgatagtggatcggctttaccggatgatcaagctgctaatgcgggtacgggcagcacagaaccagctggggatgttcagatgagagatgacacagctacaccaaatggtagttctcacacagtagatccaaatgaggtagcacgtgctgataggcttgcgaaaataaaaggaatactgtcaggggagacatctatccagttgacactgcaatttttgtatagccacaataggtcggatcttttaattttgaaaacaataaagcaggctgtggaaatgaggaacagtgtttgccacagtgcaacaatatgtaccaatgcaatcatgcatgctggaacaactgtagacaccttcctaagagagaatctggagtggttaagcagggcaaccaattgggctaaattcagcgcaaccgctggactaggtgtcattcacagaggccatcttcaacaagggcgagctttgatggccccctacctacctcaaagtggtgccgttggtggtggtagtccatactcagaaggaggtgccctatatgccctgggtttgattcatgctaaccatggtgaagggatcaaacaattccttcgtgaaagccttcgcaataccagtgctgaggtgatccagcacggagcctgtttgggccttgggcttgcagctttgggaacagcagatgaggagatatatgaggacataaaaaatgttctttacacggacagtgctgtggctggtgaagcagctggtattggaatgggcttgcttatggttgggacagccagtgagaaggccagtgagatgcttgcttatgctcatgatacacagcatgaaaagattattaggggtttgtcacttggcattgcgttgacagtttatggcagggaagaggaagctgacaccctgattgaacaaatgacaagggatcaagatcccatattacgttacggtggcatgtatgcattggctctagcctacaggggaactgcaaataacaaagccatacaccagctgctgcattttgctgtatcagacgtcagtgacgatgttcggaggactgcagttatggctcttggatttgttctatacaatgaacctgagcagactcctagaattgtgtccctgctctctgaatcatacaacccacatgtccgttatggtgctgctttagctgttgggatatcatgcgcgggaagtggattaagtgatgcaatttccttgttggagcctctcacatcagatgttgttgactttgttcgccagggagctctcattgctatggcgatggtcatgattcagactaatgaatcctttgattctcgtgttggaacattcaggcgtcaattggaaaagatcattcttgacaaacatgaggacaccatgagcaaaatgggtgccatactggcttctggtattctagatgctggtggcaggaatgtcacaatcaaacttctctcaaggaacaagcacgacaagcttactgctgtggttggccttgctgttttcagtcagttctggtactggtatcctctcctgtattttattagcttggccttctcgccaacagccttcattggactcaactccgatcttaaagtaccgaagtttgagttcttgtcacatgctaaaccatccctctttgagtatcccaaaccgacaacgcaacagactacgacttcagctgtcaaactgccgacagccattttgtcaacatacgccaaggcgaaatctagggcaaagaaggatgcagaaagcaaagctaaccaggagaaagcaaccgaagatgcttctggctctagttcaagcaaggccaccaaaactcaggagaaggatgccgatgcaatgcaggttgataacgcggcggagaagaaggctcctgaacccgaaccaaccttccagatcctcacaaacccagcacgcgtcatccctacccaagagaagttcatcaagtttatcgagggcagccgatatgtcccggtgaaacctgctccatctggattcatcctcctccaggacatgcagccaaccgaggcggaggtactcgcactcaccgatgccccctcaactgtggctgcgaccactggtagcgccgctgctgccacaggccaacaggcctcatctgccatggctgtcgacgacgagccgcagccaccacaacctttcgagtacacctcgtgatggtagaaatgtaggaggcttgtaatagagatctggactcgcaaatcctttctttcctactgtatacgttgcttattcttttttgagtatgtaatgcgcggaaatttgttgctggaaaaaaaataactgatgaatcgtccgtagagaactttgatggagattatacgatgggtcttttgagttggggtaaagacaggcaaaaaaaaaagcaacctgcatcgcgtcctgtgatgctttgaacttgcaatgcttgtattccatcgttttccaacgataaggtatcagaacttgaaatgcttgtattgcattattctccaacgctaaggtgtcatgcttgtattgcattgttctccaaaaaaaaaaaaaaaaa

SEQ ID NO: 52251 - DNA, 797 bp, Oryza sativa
  Clone ID: PAT_MRT4530_54565C.1
acaaaactccgccgaaacaccacatccaccgtgcacccgagccacagctgcctctcgtcacctccagtcgcgcgccaccaccgctcccgtcgctgccgcgctgcgctaccaccgccatcggcatcgccgttcctcgccgcaccccggcccctactccgtttcccctccctgcccctggaacgccgccgccgcgttcaccatctctctccgccgccaccgtcgagtccagccgcgtcgcgccgcctctccggtcgacgccgacttgtgccgccacctccttcggcttcgtcatctcgagggccccgccggccctcggccgcgtctccgccatggtcgggtgtcgccggaacgccgttcccgccgcctctcgtgccagtcgccgccatcctttccgccgccagccgcctccctgtggtcgtctcgccgtcgccgtcctcggtgagaatccccaccgtcccttctcctttttttttccctcctccgccgctccccgtgcccgctgccgcgacgcgccgctgtcgccggcggtcgtctggccgcacgccgccgcgcgctatcgctcgaccaggccggctgtgccgtgcccgtgccccagccgcgccgcctcgtggccgtccgatcggctttgggccgatccgagccgtcggttcccgtggaccggcggtggaccgcctcggtggttccgatccacggtggaccggcgcccttgtgccgctgaccggtgggcccgcttgccggcgccgcccctcccccttgatgacgtcagcgaggtccatttcctttgtaaaaataaataa

SEQ ID NO: 52252 - DNA, 1647 bp, Oryza sativa
  Clone ID: PAT_MRT4530_54566C.1
tcagtcaaaccgcccgccagctccagctttctttctagccatcccagaatctcgggacgagattcctccctcgcccgttttcccctctctctctccccgacaggtgggaccggaggccccacctgtcatcttcttccccaatctccgtcgccccaactgccgccatggccgccagtttcgccccacgacgccgtggctcccgcgctccaccccgccccacaagcgcgtgaaatcgatcccctccacctcgtccacctttcccccccactctccccgcgaaaatcggcgccagttaacccctccaccaccccacgtcggcgccccacttcgccggccgattccgccacgtccggcctcgatcccgccttcccgagctccctcgctctccccacgccgcacccacgcgctgccacacttcggcaaactccggtcgccgtttcccgccgcgttagtcgccgccgcgccgcgccgcttgcaccgtcggctccgccgctctttgccgcacaccggccaccgctccgtttccacaaaactccgccgaaacaccacatccaccgtgcacccgagccacagctgcctctcgtcacctccagtcgcgcgccaccaccgctcccgtcgctgccgcgctgcgctaccaccgccatcggcatcgccgttcctcgccgcaccccggcccctactccgtttcccctccctgcccctggaacgccgccgccgcgttcaccatctctctccgccgccaccgccgagtctagccgcgtcgcgccgcctctccggtcgacgccgacttgtgccgccacctcctccggcttcgtcatctcgagggccccgccggccctcggccgcgtctccgccatggtcgggtgtcgccggaacgccgttcccgccgcctctcgtgccagtcgccgccatcctttccgccgccagccgcctccctgtggtcgtctcaccgtcgccgtcctcggtgagaatccccaccgtcccttctcctttttccctcctccgccgctccccgtgcccgctgccgcgacgcgccgctgtcgccggcggtcgtctggccgcacgccgccgcgcgctatcgctcgaccaggccggccttgtgccgtgctgtgcccctggccgccgctcccctcggccgcccgatcggctcgggccgatctgggccgtccacgtggtggacgtgcccccgaggccacgtgtggacttggtccaccgtgcgccctccccctttgactcgctgacgtgtggggcccgcttgccggcgccgcccctcccctttgctgacgtcagcgaggtccgtttcagtgcttaccacaagcgggagtgggtaactgcttgatctgaagtatagctcgaccctttcctaggcaccggtggcgagggtgggcgtgatggagttgggtcggccggggtgtccggttgtccagctgccggattcaccgcggcgcaagaggggaccgcccactgccttttgaggggtgggggtgaaacccatccctgtatccccttgcacgtctgcatcattggtgtggcttgctgagtacggtggttgtactcagccttgctattattcccccttttcagaagtgtagtgcttctgagattttttcgcattgacgaaaaatagaaatttttttatattttcgt

SEQ ID NO: 52253 - DNA, 1305 bp, Oryza sativa
  Clone ID: PAT_MRT4530_54567C.1
aagaacttcagaccgatctctctttgcaatgtggtctataagttgtgctcaaaagtactcgccaatagactgcgagtgttcttggatgagattatctctgcagaacagagtgcatttgtgcctggaagactaatcacagacaacgtgctagtggcctatgaatgcactcactatctaaagaggaagaaaggaaaaacgggggcatgcgcagtcaaacttgacatggcgaaagcctaagatcgagtggaatgggactatctccaaggtacgatgttaaaactaggatttgcagaaagttttgtgcgaattatcatgagatgcgttacctcagtatctttctctgtacgggtcaatggacaactttcgaacccgttcaagccgtcgagagggattcgtcagggggacccaatctccccatatctcttcctactgtgcgctgaaggtctctcctgcctcttaagggtggttggaccggtgcatcttgccagaggtgtgcaggttgggatacacgctccatggatttcacacctgtttgcagacgactgcattgttttcttagaagcttcgtagagaggggcttgacggttgcaagatattcttgacttatacaaccgaggatcaggacagttggtgaacagagataaatcagcgatctttttcagtgctaactgcgataatgcatgcaaacgggaggtaagagaagttttacatattgatatggaagcattagcggagaagtacctaagcctccctactgccttggggcgggcaacaaaggacacctttgaatttatgccaaccaaaatcagaaatctagttggaacatggagtggccgtgaagcaagttgtgcaggtagggatgtgctgttcaaatcagttgctcaagttgtaccgacctatcccatgagctgcttcctaatcccaaaggatacttgtcggaaaatgaaatcaatgatagcgaactactggtgggggagctcggcagatagcagacgcattcactagcagcgatgggaactactgactaaaccgaaagctgatggaggcatggaatttcgagatttgagattgttcaacctagctatgttaggtaaacaaggatggagactgatcaaaaatcctaattcactatgtgcccgagtgttgaaaggcagatactatcatgagtcagagttcttacaagccactcggaagaaacattcaagccatacttggagagctatattagcgagaagagatattctgttcaaggggcttgtgcgccgaattggtgatggcaattcaacgaggatctggcaagatcgt

SEQ ID NO: 52254 - DNA, 355 bp, Oryza sativa
  Clone ID: PAT_MRT4530_54568C.1
cggttattgttaccaaccgggactaaagattaatatttagtcctaattatttgggaaaatttgctacaggacaccccaaaatcgtgtaattggctgtgggacaccacaaaatcttggctttgcccacggacactacgaaagttgtgaaattggctgtgagacaccggaggcaatattttataatttccgaggcaaaagaggtcagaaaattttctaaatgaccaatctacccctgcgcgccgctacctctaagcctgactgggtctggtcgaaccagacccagccggcgctgtttccatcctccctccctccacagcccgattcccgattccccattcccaaacctaacccctag

SEQ ID NO: 52255 - DNA, 402 bp, Oryza sativa
  Clone ID: PAT_MRT4530_54569C.1
atggagctcgacctgtcctacaaccgtctcgacggccaggttcctgtccacggcgtgttcgcgatcacgaccgggttgaggattgccgggaacatcggccgcgcactgcggcggcacggcgcagctcaggttgccgccatgtccagccccgggcaactccacccgacgagctcatcttttcctcaagattgctctacctgtcgtcgtcgtggccctgtgcatcgccgtgatgttcgccgcggtccggtggcgccgcaagatcaggaatttgagaaccagaatccccgctgctcgcagcgtgctcaacggaaacctcgccgccgctcgtgctccgcgccgccgccatcgccggcctggcgcgcggccacctcctgctcgcgctccgcgccgccgccgtcgtag

SEQ ID NO: 52256 - DNA, 398 bp, Oryza sativa
  Clone ID: PAT_MRT4530_5456C.1
aggaaaaacacttccatgggggattcattggccccaagagggaacagggggaaaaaaaaattcacaatttcccccccagtttgggcgatgtttcccaaggaaaaggggcccatgcaaccaaattatggattacaacccaactaggaagggcccccaggttagggggggtttcggatgaaaaaacttattacaacccgcaagggcctaatatcccgggtttttccaaaaaaacaccagggggtttttttaaaaagaggggaactggtaacacaagggggttcaatttttggcccccctgaaccaaacctttgggggccgccccccccccccccgagaaccccctggttttaaaccccctgggccccccccccccccaaacatttgggggccaaatttta

SEQ ID NO: 52257 - DNA, 639 bp, Oryza sativa
  Clone ID: PAT_MRT4530_54570C.1
cccacgcgtccgcaagagcaacgcaaagcaaagaacagatacttcttctctccacctgcctcgcaagcttcttctgtttcttggatctcacctcgccacgccattgacgccataaggagcttgtgagaggtggtagccaagaaggaggaggaggagatggggttcgtgctggtgatctcgctgcccttcatcttcttctccatcctgctcggcttcggctgctacttcctcggcaagcacaagggccgcgaggagatgcgcaccggcgtcggcgcccaggtctacggcacgccgctgccgccgcccggcgtcggagcgccgccgccggagccgttcacggcgaagaaggacggccccgagaatctcgtctgatcagcctcggctgctgctgctgctgaatcggctcatttctttttcttgctatactgtactgttcgtgccgcggtggtgtacatgaagtggttaatttggttgttcttcatgttgagttcagtgtgataatttgtaatcacaatctatgtgtttctttttttcttttggtaaaatgggttcgaatccaaaatttgtaatcacaaattcgcaattagcgcccagacaagtgatttgattgattggctaaaaaaaaaaaaaaaaaaaaaa

SEQ ID NO: 52258 - DNA, 623 bp, Oryza sativa
  Clone ID: PAT_MRT4530_54571C.1
ttctctttgccagcttgaagaggtttggagcaatgtcttttaggcacagtccctcaagccagttatctttccaaaaaaaaaaatttctttccatacccaatctggatcttgttacaagcttgaaacaactggatgtctcgatcattgcaaggtagttccatcttgtcccatggcctggattggtcctgccagcgtgttaacagtggaatttggtaagccccgaagtcaccatcggcttagagtcagtatcggcttcaaaacctagaatcggccgatgagaattatcaagttgtcaatagtcggattctttctatattcgcctgccttttgattgccaataagggtttcatcagagtttcagccgatgaaatgacatcggactttcagccgatgtatgttttaacctttaggtcagtgcttattctatcatattgttagccaatgggtttctactggattatattgttgttttgttacattatcatcagccgattgtctttatttacatcaagtgtcagattatacataaaccatatagccgatagctcaaaatcctattgctatcgactggtatcggcatcggttggaattactccatcggcttgtcagccgatcgggtcatt

SEQ ID NO: 52259 - DNA, 714 bp, Oryza sativa
  Clone ID: PAT_MRT4530_54572C.1
atgtggttatgtagccctgcccctcctccatcgcctgcccctagccgccctgagccgcgccgacgtcgccatcgtcacctgccgccgcgcgccgtcgccccgcgccgctgccgcgccgcgtcgccgtcaccacgcgccgcgcgccatcgccgtcgccgtcgcgtcatcgcctggtgccccgcgcccctgccccgccgcgcgcccgtcccatctccgctgccgcgcgcgcctcacgccccgagccgccgcgccgccatcccgccgccccgcgcgcccacgcgccccgtcaccgctcgtcccgtcgccgtgcgcgttccatcgccgcctcgagcccgtgccacagtcgccgtcaccatcccatcaccgcgcgccgagcctcgcgccgccatcacgtcggcgcccgtcgcgtcaccgtcgtcgcatcaccgccctgagcccccgcgccgccgtcgtgtcaggccggccaccccttcccctctctttcttccccctctcccctataaatactccacaccccctctccatttcccccactccatctccctctttctcccctcttccctctccaccgagccaccgccttggtgccgccgcgccgccaccctcgcgccgctgcaccgccgccttcgtgccaccgcgccgtgcgccgtcatcgcaccgcccacgcaccgccgcaccgccgccttcgtgccgccgcgccgtgcgctgtcgtag

SEQ ID NO: 52260 - DNA, 276 bp, Oryza sativa
  Clone ID: PAT_MRT4530_54573C.1
atgcaggagtttcaggacctctttctttacaacctctcgtatcgcattattgagtcgttgttgaggttccctggagggagtactctcaagaagacgttgagtctcgtcttcagaaagcttgtcactgattatgataggggcttctctgtcattgtgcaagaaagcatagcgttccgcttcttccttgatgaagtcagggacttcattttccagaagggcctcgggagactcgtgagggggaactgctctaacctcctccgcagactcaatctctag

SEQ ID NO: 52261 - DNA, 2714 bp, Oryza sativa
  Clone ID: PAT_MRT4530_54574C.1
agattgagtctgcggaggaggttagagcagttccccctcacgagtctcccgaggcccttctggaaaatgaagtccctgacttcatcaaggaagaagcggaacctagtgagactctcgaacttccaatcatggaactgccacctcgacctccgtttgagcttaaacctctacctgaaggcctacgctatgctttcttgcacaatgacagagaagcccctatcataatcagtgacaagctttctgaagacgagactcaacgtcttctgtctatgttagaaaagcatcgtgttgttcttggctattcccttcaagacctcagagggattaatcctgcactttgcactcatcgtatccctattgaccttgagagtactccctccagggaacctcaacacgactcaataatgcgatacgagaggttgtaaagaaagaggtcctgaaactcctgcatgccgggattatttaccccataccatacagtgagtgggttagcccagtccaggttgtgccaaagaagggaggaatgatggtcgttgcaaatgctcaaaatgaacttattctgcaacgaaccataactggatggaggatgtgcatagaacaaggctacgaaaaaggatcattttccgctacccttctttgatgaaatgttggaacggctggcaaatcattcctttttctgtttccttgatgggtattgcaggtatcatcaaattcccatccatacggaggaccaaagtaagactacgttcatatgtccgtacgacacatatgcttatcgtaggatgtctttcggactgtgcaacgctcttgcatcttttcaaacgtgcatgatgtctattttctcgaatatgatcgaggacattatggaagtcttcatggatgacttctctatctatggaaggaccttcggtcattgtctgcaaacgctcgaccagctgctcgcgattgtttttgctatcgataagtttagatcttacttgatgggacgtaagtgataatttacactgatcatgctgctctaaaatacttgctcactaagaaggatgctaaaccacgcctcttaagatggattttgctgctccaagaatttgacttagaaattaaggataaaaagggagtagaaaattctgtagcagatcatttttctaggctgcacatcactgacatgcaggaataactgataaatgatttcttgagagacgacatgctgatgacggtacgtgactccaacccgtggatggaaacatagtgaactacatggtatcaaaatacataccaccgggagaaaatcaaaggaagttgaaatacgatagccgccgtaacatatgggatgagccatacctatatagggtctgctccgttggtttactaagaagatgtgtgccgactgaacagggacttaagattatagaacgatgccatgcctcaccttatggtggccattatggcgcattccgcacccaagccaagatttggcaatgcggtttcttctggccaacgatgtatgaagattcaaaagaattcgtcagaagatgtccaagttgtcagaggcaaggaggaatcactgctcgtgatgcaatgcccctcacatacaacctgcaagtcgagatattcgatgtttggggtattgacctttttctaagtcatgtaactgcgagttgcaagtttattctggtggcagtcgactatgtctcgatggtcataagtgacggaggttcgcacttcattgacaaaaccttttgagacctcctacgagacatgggagtgaagcacaacgtggccacaccttaccatccacagaccagcagtcaagcagaaacgtcaaataaacaaatcacgaatattgtgcaaaagacggtcaacaaaatgggaacaggataaaaggagaaattgccagactcattgtgggcataccggacagcatacaagacacccattggaatttctccctatcagattgtctacgggaagtcatgccaactccctgtagaacttgaggacagagcatattaggccatcaggaactggaatatggactttgaaggagtaggagaatggaggatgatgcaaattgctgaacttgaagaatggagagagaaggcatatcacaacactaagatatacaaagagaggatgaagcgctggcatgataagaggataaaaatcaagaaattcaagcaatgagacaaactgctgatgttcaactcgagggttaagcttttcggccacggaaaattgcgcagtaaatgggaaggaccgttcgacgttatcgacacctcttcgcacggggcaatcacactctgcgacgactcaaataacatatttaaggcgagacgtcttttccaagacgatgacaaggccactccgcctcctgctgagcggtatgtgggcaccctctacaccaaggcaggggatgaggagctccacaactacatcacacccaccgccactccatccacccccaaggaggattggttttgcattcggagagtgcgaactcccggcggtaggtatggtaaaggcttgctccggccgttgacggcatcggagaaggaggggcagcggaatcccgttgccctccacctatgacggtgaagcgtcatttgacgccccccacttgctataaataatgtgactcattggtgttaaccccaatgtttgccaagatttgtttttgttttgtttaataaagatcaggttttgaataagtgtgg

SEQ ID NO: 52262 - DNA, 450 bp, Oryza sativa
  unsure (1)..(450): unsure at all n locations
  Clone ID: PAT_MRT4530_54575C.1
acaatatatgggagtaaaatttggacctgagaaagctacaacactaaacacttttagtgcaatgaagactggctttaaaaatatagataatgatggaaatattggaccaatcccaagccagaaagcacaaaagcgtgtgactgattatttaacaggtcttagggctaaatatccaaatgattggcaacaaagagacctagatgagaatgtattgtacagcaccaatggtggcttgccacatggtcgcgtacagatagcgaatggacctgttaggaaggctaatattttggctgtggccaaatcaacaaatgttcgacctgccaattcaattgctttccaaaatatggctcaacaaactcagaatatggctcgacaaaatggaccactactccgggggatcatacatgcgcaaaaacagggaccgacttacagttgtttttggacttttgn

SEQ ID NO: 52263 - DNA, 648 bp, Oryza sativa
  unsure (1)..(648): unsure at all n locations
  Clone ID: PAT_MRT4530_54576C.1
gaattgtaatacgagcantataaggcgaattgggtaccgggcnccccctcgagttttnttttgatattttnntgtccagaacgcacaaaatcatatatnntnctttatcaccagctatgttgttttcaaaacatttcatnattcnttanttgtntagatcactatcctcgttgcatgcaacacaggggncggtgtgatcctactanctatnaggcaagccagctaagcntactactggccggcggcgaaaatgctgcactgctggggctcaacccggnacatcnacggcngctgcgccgcgtnctgcctcaccctggtcagcctcacgcgggtcatccccggctgctnctgctgctcgccgtagtanccctcctccgacgaccctcgccgtagtaccctgntccgacnangaccctcgccgncgtagtactccgacgacgacganaaacagccttgctccaggggcatcggatgctctcctcgtagctcctcaccatccggcngatggngtgcatcggactcgcggtcacttctgcnctgctggaacactgcntctcaggccaacgccccggcngnggaaatcngtggaactctccggcggtaactgcggtcacactgcgnaccntcacggnntctgcntccccggnt

SEQ ID NO: 52264 - DNA, 563 bp, Oryza sativa
  Clone ID: PAT_MRT4530_54577C.1
gtgtgtttagatggccctgaataatcgagcgatggacattctcgatgtagagctggtaacagagcttgaaaacgcgccgactgcaacatccatggatggtccgtcagaaagggtgaactccctgatttcgctacttaaactcgggctgctctgctctggggaaatgccattgagtagaatgtcaaccaaagatatcatcaaggagctgcttgtaatcaaaagggcactcgcttaagaaagcttttttttaagaggaaggtcacaacttaagaaggcttttgagaagcaaaacatgccaaattatgtgctcttttttattattcctgatgtatgtgcgattctctttaatttttaagacaaactcatgaatgcatgggtttcaaagaacaaaagaattgtactggtgtaatatgcgatatagattttctggatcacggtgaaaagatgttgccgctgatactctctttttcctgattgaatatttgtaaagctacagtacctgtttgagtaaacaagctgaacttcacatgtatcgaaaatgcggccttaattttccttttttt

SEQ ID NO: 52265 - DNA, 255 bp, Oryza sativa
  Clone ID: PAT_MRT4530_54578C.1
atggacagggctggagccaagcatgggggaggaggccgacgacgaggaaggggggatagcgaggaggacgaggtctcggcggcggccggtggcgcggtgctgggatcggaggcggagatccgagaggcgaactcgtcggaaggggataaggggttcatccggtcatgcaacagccggggagatggcaacaaggtgtcaaggtcggagctcaagcagcagcgaagtgggcagttatggctgcgcctccacagatag

SEQ ID NO: 52266 - DNA, 1360 bp, Oryza sativa
  Clone ID: PAT_MRT4530_54579C.1
caatgtacttgctctgatcggccaagcttaatcgccgcgatatttattaacttatatttattaatttatttaatttatggagtccaatggcgtcggcggcggcgcggcgcggccgctcacggcgtcgaggcggctgctggcgcggagcgcgagcaccacggcgtcgcgcgccggcggcgccggcgcgttcgtctacgatgggatgcgcccggcgccgctcttctcgtcgaccaacttcgcgcggtccctccgtaaggcggcctcgttcggcggcggcggcaagaagcagtacagcgccgacgacgacggcgccgtcgccgtgaaggcggcggcgccgccgcggcgggcgctgagcagcaaggagaacaccgtgcacgagctgggtacggccgcggcgaggggcccgtgggagccggcgaggcggccgaggcggagctcatcgggggggtcgtcgtcgccggagaacgccgggagcaccagaggatcggccgtgctcagggacatgatgacgcggaggaaggaggagcccgagaaggaggaggcggcgcaccgcgcgcgcatgctcgccgcgcgcttgctccagtggcgcttcgccaacgcccgcatggagaaggccatggcccgcgccaccgccgccgccgagaacaagctgttctacacgtggctgcgggtggcggagctccggaacatccaggcggcgaagcggatcgtggcgcagcggcggcggcagaagctgaagctggcgaggctgctccggccgcagctctcgctgctcgcgtcgtgggactccctcgccaagccgcacgccgacgccgtcgacgacctcggcgccgtcctcgccgccgcctgcaccgcgctccccttagccgacggcgcccaaggcgacatggagagcttgcacgaagccatgttcgcgtgcgtgggcacggtgaacgacatcgaagccaacgccgacatgttcttcgccacggctggggtgacgagcagcacgctggaagaactgtcgacgacgataaagcaggaggtggagggcctgcaggaagccatgaagctggcaaggattgtcactagcttgcaggtgcaggaagtgagcctccgggcaaacttgattcagattcaggcaaagcagaaggttgacatgggagcatctgtcccggcgattgcaacttctggttggtgtttctgatcatcaaagtacacggagatggagcagagtgtcaatcactcggccattatataaattaagatgcaaagagtactaatgctagtaccagcgtcacggactgaccggtgatctgagccggctttctgatgttttattgatatgtccggccctaaacaggtaattaaaacataaatt

SEQ ID NO: 52267 - DNA, 1718 bp, Oryza sativa
  Clone ID: PAT_MRT4530_5457C.1
cacgagggcgggtgacatatattatgcagctctcgtgggcatagctcgccagccaagaatgagctgaagctctcgtgcgcggcgcggccatgaaggcgtcgtcgtcgtcgcaggggcagagcccgaggacgccgtcgccgcgcgccacctccgccaccgccgagcacacgcggtcctcctcggagccgtggctcgtggcggcggcggtggcgagcacctgcgacgactcgtgcgtcaacgacgtcgagaacttcgcgcgcaccgtcgccgccgccaagtctaggcagctggtgggctcgtcggcggcgtcgcgccccgacatgctcgcgtccgtgctgtcccactacgccgccaagtggctccccgacgtggtggccgcgtcgtcgtcgtcctcgtcgccggcgacgtcggcgtcggggcggttcctgcccccggagagccccaccgccacgtggctcaagaagcggctcctcctggagtccctcgtcgccgcgctcccgcctgacccgccggctcccgccggcggcggaggagcggccgacgacggcatcacgtgcgacttcctgctcaagctgctccgggcggggagcatggtgggcgccgacgcggcgctgctgcaggagctggagtccagggcggcgcggcggctggaccaggcgacgctgggcgccgtgatgataccggcgttcgggcacgggtacgcgtgcgggacgctgctcgacgtgccgctggtgctgcgcctggtgcgcggcttcctcaaggacgccggcgccggcgggggcggcgccgccaaggcaggcggtggcggaggcgccgccgccgcgagggtggcgaggctggtcgacgcctacctcgccgaggcggcgctcgaggccgggctgcggccggccgagttcgaggagctcgcgcgcgccgtgcccgcgcacgcgcgccccgccgacgacgcgctctaccgcgccgtcgatacctacctcaaggcacacgcgagcacgagcaaggaggagaggaagtcgctgtgccggctgatcgacgcgcggaagctgacggcggaggcggcggcgcacgccgtccagaacgaccgcctccccgtgcgctccgtgctgcaggtgctcttctccgagcacggcaagctcaaccgcctcgccgagctcagcggcggtgcctcctccttcggcgcgcccagcccggcgtttgacctccccggcgcccgctgcccctccaagcgcgaggtgctcgcccagcaccacgagctccgccgcctccgcgaggacttcgcccgcctccaggtccagtgcagcgcgctgcaggctcaggtggacaggctgagcacggagaggaggcggcgcggcggaggcggcagcggtggcggcggcgggttcttcaagtggagcacgttctggttcggcggcatgagcgccgacgtcgcgcgggtggaggactccgagagcggcatcgagcggcggacgccggcgagcgggaagaagggcaggggcggcgccgccggcgccgccgccgcgacgccgacgccgaaatggcgcaagtcgatgtcatgagaggatctgaaattctgaagccaaagctgatggctaagtgggtcgttaatctgttttactacctttaattacagtcagttacctttctgtctgaactattgtttgtggtgaaaccattcagataaatctgctcacttgagtgcataaataaatctgtgatgttct

SEQ ID NO: 52268 - DNA, 551 bp, Oryza sativa
  Clone ID: PAT_MRT4530_54580C.1
gcgctcttcttctccctccaataattctctcccctctgctgctgttgaccaccaccaccaccaccagcaggagcagagagcaccatgtccatccaatagatccccatgcttgcgcaccactcccgggcacattccgatcgaggaggaagaggaggaggagggttggccactttcatgccttctatctgtttgtggttgaagttaaaaggtccacatgaccgcctgcgattgtattgatgaacccttgcacttgcacggtctagatgaccaccttctgtaataggtatcattaacccaaggttgctatttgcagaggcagtgaagacacactttatagacctagtcgtctttacacaggattcgtgtcctatgttatcgtatttttgggtctcgggacatgtcgtcggcagagcttcatacgtttatgcatcccagtaaaattgcatgttagaaggtaattcggacccctgtgatcagtatggtttgaactttccttggctctaaagtgaaatagataatgcacatgcccgaactagttgtgtgaaaagaaa

SEQ ID NO: 52269 - DNA, 418 bp, Oryza sativa
  Clone ID: PAT_MRT4530_54581C.1
ctggagtacaatctgtgtgttcgattgctgtctacttcagccgtcattggtacttttctcccacaacccctttctaggatattggagcctgacgcaccacattgtcgtaaaatcagagcttggctaccgccgccgacagcccatgccttcgggatccaagcctccacgtcctcgagcagctcttttggcttctccatggcggcaaagtgaccgcctccatcggggcgcttgtagcgaaccaagttggccaaacatccagcccagctgccagggaccgggaacagctctttcgggaagaaagagtagccaagaggcttgacgatgtacggtggaggaggcctttcgctcgcgaaaagcttgatatcacaacggcgaggcgactctttgctgctgccttgacccctgtacgggtagatgc

SEQ ID NO: 52270 - DNA, 251 bp, Oryza sativa
  Clone ID: PAT_MRT4530_54582C.1
aaaattataatttaaataagggtaaaaaatggtaaaaaaattttattaatgaaagagaaagaacaaaattaaaagctttttacgtttaaaatggaaaatccgatttaaggaccgggccaaggggggagacaactttgaaaataccaaacggtatttgagaggggaacaattttccatatagatagagtataaaagaaaggggtatttatggaaaattctggataaggtagaaaaaaggaatttgttgagaa

SEQ ID NO: 52271 - DNA, 363 bp, Oryza sativa
  Clone ID: PAT_MRT4530_54583C.1
atggtggagctgaaacaatgcttcaacttcaacttcggggatggtagtggcggcggcactcgagacctctcatcacggatgcgatcgaggacagcaacggcggcggcagctcccgagccctcccgcgcggatggcatcgagtatagcggcggcagcggcgactgcagacagcagcggcggcgacggcccccaagcctcccgccgcagatagggccgacgatagtggcgatgacagtggctcctgaggccttcgcggaggttgtcgatgacggcggtaacgacggtggtggtcgacgacaatggtggagagagagaaaggggaaagagaagagaggggagggaggtgaagatgaaactgacagc

SEQ ID NO: 52272 - DNA, 533 bp, Oryza sativa
  Clone ID: PAT_MRT4530_54584C.1
tcccggtcgaccacgcgtccgggtctcttccttttcttcttctttcttcgggaaccctctcgcgtgcggcggcagcacgaggctcggctcggcctcctcttccgcaccctcctccaggagcgcgagatccgagatggggaacactgcatctggggcgactgaagcttcagattcgacggacaaaacagaacaagctcctccagctgacacaaaaccaaaaaagaagatctgctgtgcttgcccagacaccaagaagttgagagacgaatgcatcgtgcagcatggtgaggacgcctgcgggaagtggatcgaagcccatcggcaatgcctgagagccgaaggtttcaacgtctgatgccatgcccccatcataggcatagcaaagtgatattttgctcttgtcataatccgctttcgatcctgaaccaacatgatgaataaaagattctgttagatctctaggatgaactcgctgtttcactttcggaaaaggggacaagtcactgaacatgccaatttgcagagggcatatg

SEQ ID NO: 52273 - DNA, 260 bp, Oryza sativa
  Clone ID: PAT_MRT4530_54585C.1
catgcgcgcgcgcgcaagcgcgggtcctctatagttgcgcgcgcccttttttttttttgtttttttttttttttggtggtttttttttgcacagggaaaaatcatgttttgtttcccgaaagagctaatattctgacaaaaggttaggcatgctattggacaaccgccaacaacaaacgaatagatttgtacaacactgaagaacaaaggaatttgcccaacagcacattacaattttgacagaaattaaggggtgaaac

SEQ ID NO: 52274 - DNA, 736 bp, Oryza sativa
  Clone ID: PAT_MRT4530_54586C.1
cccgggctgcaggaattcggcacgagggcagagaagagcttccgctcccgcatgcggcatctgcctctgcccccagcagcagcagcagcagccgccgcgccgcgcgaagcatctcctcctcctcctcctcctcccgccgcgcgagcgctgagccctactgctgtcgcctttgcccagatcccgtcggtggccatggcggcgagggcgcaggcgtggctgttcgcggccgcgctggtcatcttccacggctccgagtacgtcctcgccgcggccttccacggccgccgcaacgtcaccgccacatcacttcttatcagcaagcagtatgttttggcaatgagttttgcaatgttggaacacctgacagaagctcttctcttccctgaattgaaggagtattggtttgtcagttatgttggtttagtaatggtgattattggtgaagttattcgtaaacttgctgtggtgacagctgggcgttcctttacgcatgttataagaattcactatgaagaccaacataagctgattactcatggggtgtataggcttatgcgtcatcctgggtattctggctttcttatatgggcagtaggaacccaggttatgttgtgtaatccattatccacagttgcattcacattggtgctgtggcgattcttttcaaaacggataccgtatgaagaatttttcttaaggcagttctttggtcgtgatacgaagatacgcacagaag

SEQ ID NO: 52275 - DNA, 637 bp, Oryza sativa
  Clone ID: PAT_MRT4530_54587C.1
cccacgcgtccgcccacgcgtccgggttggtcggcgaattgcacatcttggggcgaccgatcggcggccggcgggcgaagcaaccaaggcccaaaagggagggaaaaaaccttggttgtgtgtgtgccgccgcgagcccgtgacggcgccctccggcacgcgatagggaggatgccgtactgcgtggtcagccacggcgacccatcggcggcggcggcggcggccggcgaggagggagatgtgcggattttctaccagagatacggccatggcggcaccaaggtgctcctcatcatcgggttcgcggggacgcacgagtcgtggggcccgcaggtgaagggcctgacgggcgccgtcgagcccgtcgacgaggagtcccccgccggcgacgatggcgccgccggggagggcgccgaggtctgctgcttcgacaaccgcggcattggccggagctccgtgccgccgcacaaatcgcagtacaccacggtgatcatggcgaaggacgcgctagcattaatggatcatctagggtggcggaaagcacacgttttcggtcactccatggggtccatgatagctttcaagttggccgccattgcgccggagcgtgtcgcttcgctggcgttgctcaacacca

SEQ ID NO: 52276 - DNA, 1857 bp, Oryza sativa
  Clone ID: PAT_MRT4530_54588C.1
atggagcgaccgagcgcgctagtctatggctcgagcggtggcgcatttggagggaattgggctattgggcctaattggtcagcgcaggttgcgtgggagaaaggagaaaaagcgatggagagaggaaggaggttgggccggcgggaggaagaggaagatggcccgtttggcacagctatagctcctaactccaacttaaatggagacggagttgtgccaaacagtccagatcctccgttttttggagtggagccggcggccttgcggtgcggcggggcggaggcccgggcggcggcctcgcggcagcggggcggaggcccgggcggtggcctcgcggcagcgggtggaggcccgggcggcctcctggcggcgcggcggcaggcggcgctgcggcacggcggcacgccggcggccggcgcgacagtggctggcagcctggaattctacagctatctggacatgctttctcgacttaaaaaacagtacaatcccccgaactctctaattttcatgtccaagccctacccagagaaaaatggctcttacgcatttgtgaatgggattgagattgtccccacgcccgacatctttacaacactatcacctataccacctaccaatggcaaccccgatccatctgatatagattctatgatcagtttccaaacgatgtaccgcctcaatgttgggggcatgacaatcagtccacaaggtgattctatgttctatcgttcatgggagaatgattccccatatatatatggttctgcctttggggtcaccttcagcaaagatagtaatgtcaccatcacatatccaagtactatgccaaactatatcgcacctgctgatgtatatggaacagctaggtcaatggggccaattgcacagatcaaccttcactacagtcttacatggatcttaccagttgatgcagggttctattacctcctaaggttccatttttgtgagatcgagtatcctataaccaaggtgaaccagaggtcgttcttcatttacatcaacaaccagacggtacaggaacaaatggatgtaattgtttggagtggaggaattggcataacaacatataccgactatgttatcgtcacagttggttctggtcagatggacttgtgggttgcacttcaccctgatctttcaagtggaccagagtattacgatgcaatactaaatggtcttgaggtcttcaagctacaggacattggaaaaaaaagtcttgctggccttaaccctccacttccaccacaaccaaagtctgatgtgaaccctaaaggggccaacccagacattgacagcacccatgtcagcacagttgtgaagggaactttcggatatcttgatcctgagtattatcggaggaagcaacttacccaaaaatcagatgtctactcttttggggttgtgttgtttgagatcctatgcgcgcgccctgcagtgaacatagagcttcctgaagagcaagcaagcttgcgtgactgggcgctatcttgccagaagaaaggcatgcttggcaaaattattgatccacatctccatggagaaatcagtcctccctgccttaggatgtttgctgattgtgcaaaacaatgtgttgctgatcgcagcatcgacaggccgctgatgagtgatgttctttggagtctggaagctgcactgaagctgcaagagaatgcagagaataacaaaaaattcagtgaagcaacaacatcgtcaaagagaacaccagacttgataactatcatgggtactgacaaaccatcgacctactcaacaatgagcatcaccggacaaaagatcatcttctctgatatgatgcacccacagggccgatga

SEQ ID NO: 52277 - DNA, 630 bp, Oryza sativa
  Clone ID: PAT_MRT4530_54589C.1
atggcgtgggatgacaggagttgcaacgctgatttccgcggagagagtgggagaagagagcggggaagtggggcgacgcgatcccacgggcaggtgacccgtcgtcgtggtcccaattgccggctacgagcagctagaggcggcaaatgcagtggcggccttaggttcgtggtggcgacagggtttcaaagagatggggagcggcgtgagcagcacgagagaggacacggggagctcaagcaacttaggaaaatgagagagggaggtgcggggatggattttataggctcgggaagcggtgaggagctcgggtcgaggcggcaacggccggtggagtggaggcggcatcgtgaggataggggagttgcggcgccgatttccgcggagggagtgtgggaggagagtgaggacgtggggcgacgcggtcccatgggcgggggcgagagcacggggcagaggaggtggacgagcggtgcggaatcggtagcggagtgggcggcatggcaggtcaaccggctggaggttgaaggagagcctgacaggtgggccctacttgttggcgactcttggaaggggagggacgcattgtgtacttggaaggaagaggaggcaaatgggctgacagcctag

SEQ ID NO: 52278 - DNA, 1605 bp, Oryza sativa
  Clone ID: PAT_MRT4530_5458C.1
atggcggccgcggccggatcagttggaggcgacgaccaccatcaccatcagcaggcgaggtacccgctcgacgccgggtcgtaccggctgctgtgcaagatcgggagcggcgtgagcgcggtggtgtacaaggcggcgtgcgtgccgctggggtcggcggtggtggccatcaaggcgatcgacctggagcggtcgcgcgccaacctggacgaggtgtggcgcgaggcgaaggccatggcgctgctgtcgcaccgcaacgtgctccgcgcgcactgctccttcaccgtcggtagccacctctgggtggtcatgccgttcatggccgccggctcgctccactccatcctctcccacggcttccccgacggcctgccggagcagtgcatcgccgtcgtgctcagggacacgctccgcgcgctgtgctacctgcacgagcagggccgcatccaccgcgacatcaaggccggcaacatcctcgtcgactccgacgggtcggtcaagctcgccgacttcggcgtgtccgcgtccatctacgagaccgcgccatcgacgtcgtccgcgttctccggcccgataaaccacgcgccgccgccgtcgggggcggcgctgagctcgtcgtgcttcaacgacatggccgggacgccgtactggatggcgccggaggtgatccactcccacgtcgggtacggcatcaaggccgacatctggtcgttcggcatcacggcgctggagctcgcgcacggccggccgccgctctcccacctgccgccgtccaagtcgatgctgatgcggatcaccagccgcgtccgcctcgaggtcgacgcctcctcctcctcctccgagggctcgtcgtcggcggcgaggaagaagaagaagttctccaaggcgttcaaggacatggtgtcgtcgtgcctgtgccaggagccggcgaagcggccgtcggcggagaagctcctccgccacccgttcttcaaggggtgccgctccagggactacgactacctcgtccgcaacgtgctcgacgccgtccccaccgtcgaggagaggtgcagggactccacccagctctgcggctgcgcccgcggcgcgcgctgcgtctccccgtgccgccacgccagcagcggcagcaacgtcgtcgccgccaagaaccgacgcatcagcggctggaacttcaacgaggagagcttcgagctcgaccccaccgacaagccaccggagcagcagcagcagcagccatgcttccccttccaccacgacaacgacgacgacatggtcgagcacgagcaagaacagcggcggaggcaggatggcaacgatggctcaagcgacgtggcggttccccacctggtgaccatcttggggagcttggagatgcagagggacatggtgatgcaggtgctagaaggcgatggcggaggcggcggcgagacggcggggagggaggagatgctggttgggtacgtgagggagctggagaagagggtgcaggagctgagcacggaggtggaggaggagatggccaggaacgcgcatctgcaggagcttctccacgagagggcttgtgagaatcacacggattcatctcacacatcagggagtcgttga

SEQ ID NO: 52279 - DNA, 2412 bp, Oryza sativa
  Clone ID: PAT_MRT4530_54590C.1
atgcaacttgatagcaataatcggagttgggatggggacactagctccacgtttgcaccatcagtgaaagggcttgcagctagagcttcatatcaagacccttccctcccatctcttgtcccttacatgacatcccgcatcttcatttcaaattacacatattccttcccagttatcccaggccgcatgtttgtgcgacttcacttctatccagtggcatatggcaactatgcttctagagatgcctactttggtgtcacaaccaacaatttgacccttttagacaacttcaatgcttcgcaaacagctctagctgcaaagtatgcctacatccttcgagaattctcgctgaatgtcacttcaggtagcctggacctcacctttttcccatccacgcagaatggctcttacgcatttgtgaatgggattgagattgtccccacgcccgacatctttacaacactatcacctataccacctaccaatggcaaccccgatccatctgatatagattctatgatcagtttccaaacgatgtaccgcctcaatgttgggggcatgacaatcagtccacaaggtgattctatgttctatcgttcatgggagaatgattccccatatatatatggttctgcctttggggtcaccttcagcaaagatagtaatgtcaccatcacatatccaagtactatgccaaactatatcgcacctgctgatgtatatggaacagctaggtcaatggggccaattgcacagatcaaccttcactacagtcttacatggatcttaccagttgatgcagggttctattacctcctaaggttccatttttgtgagatcgagtatcctataaccaaggtgaaccagaggtcgttcttcatttacatcaacaaccagacggtacaggaacaaatggatgtaattgtttggagtggaggaattggcataacaacatataccgactatgttatcgtcacagttggttctggtcagatggacttgtgggttgcacttcaccctgatctttcaagtggaccagagtattacgatgcaatactaaatggtcttgaggtcttcaagctacaggacattggaaaaaaaagtcttgctggccttaaccctccacttccaccacaaccaaagtctgatgtgaaccctaaaggggtatctggtggagggaaatcaaagggtgctgtcccagcatccatacgtggagccatgggtagcactgccactatgcttatcgcttgtttttctgtgtgcatcatctgcagactaaagaaggtagcgaagcattctttcatgactgataaaaagtgcatgacttatcgaactgaattctaccattcaccatcaaatctttgtcggaatttcacctttgacgaaatacaagttgcaacgagaaactttgatgaaagccttcttcttggtagaggtggatttggggatgtataccgtggagaaatagacaataatggcgaaaatgtagcgatcaagcggagcaacccattatctgtgcagggtgttcatgagttccagaccgagattgagttgttgtccaagcttagatattgtcatctcgtgtctctaatcggatactgcaaggaaaagaatgagatgatattggtgtatgaatacatggcccaggggacacttcgggagcacctctacaacagtaataagccatctttaccatggaagcaacgcctcaagatctgcattggtgcagcccgagggctgcattacctgcatatgggtgcaaatcaaaccattatccatcgtgacgtgaagactgccaatattctattggatgacaagtgggtggcaaaggtttcagactttgggttgtccaaggccaacccagacattgacagcacccatgtcagcacagttgtgaagggaactttcggatatcttgatcctgagtattatcggaggaagcaacttacccaaaaatcagatgtctactcttttggggttgtgttgtttgagatcctatgcgcgcgccctgcagtgaacatagagcttcctgaagagcaagcaagcttgcgtgactgggcgctatcttgccagaagaaaggcatgcttggcaaaattattgatccacatctccatggagaaatcagtcctccctgccttaggatgtttgctgattgtgcaaaacaatgtgttgctgatcgcagcatcgacaggccgctgatgagtgatgttctttggagtctggaagctgcactgaagctgcaagagaatgcagagaataacaaaaaattcagtgaagcaacaacatcgtcaaagagaacaccagacttgataactatcatgggtactgacaaaccatcgacctactcaacaatgagcatcaccggacaaaagatcatcttctctgatatgatgcacccacagggccgatga

SEQ ID NO: 52280 - DNA, 1404 bp, Oryza sativa
  Clone ID: PAT_MRT4530_54591C.1
atggtgaggatcgggactatgttcagggaggaacataggtctagtgcggtcaggataccatgtgaaaaggtgactagagtcaggattcttggaggtcaacttcggtcaacggtggggaccgggactaaactcagggagaagttgaggtccaaatggtcaaggataccgggtgacgaagttgaatacaagatggcacacggtggatggacaccgtgtgtgagagatcttcgcaacgggttttatgaggtccgtggcttggactgggaggagcagcagtggctcggttggatggcaggccgagtcggcccaggcggccaggagaccgagtgcgagctggcgaaggatcggcggcagggaggcgatctaaccggcggcgtgcgagcggtccgaccggcggcgacaggactacgtcgagatttccatcgatttgaggctcgcaatattttattgagtgggatttctcgttcggattttgatcgtgcttcacattttcaaactgctcatgagatttggaacgctttgaaaaattttcatcaagaaacttcaaatattaaagaacttcgtcgtgatctttttaaaaaggagtacattaagtttgagatgaaacctggagaagctttggatgactatctttctagattcaacaaaattttgagtgatcttagatcggttgattctgcttatgacaaaaattactctcaatctgaagtttctcgtcactttttgaatggtcttgacatgtctatttgggagatgaaatttacatcaattcaggagtctgtcgatatgtctactttgattttggattcactttacacaaaactgaaaacacatgagatgaatattctttctcgtaaaattgattctaattctagtgctttggtttcttcctcgacttctttggatgttggtgcttcttcatcaaattctactgttcttgctttgattaatgccatgtccgatgagtacaggaaaagaggtggaccaaatcgttgttttgaatgtggttctacggatcactttcgttcacgatgtcctaagcttgggagaggcaagaaggaagatgatggtagagttttggagaatgaagttgacaagaagaagatcacgaaggagaagaagaagaattgcatgcagtggctaatccaagaattaataagaacttttgatgaatcggaggatgaagatgagagcaaaggtaagcaagttgttgatctagcttttattgctcgtaatgcaagttctgatgttgatgaatctgatagtaatagtgaagaaaagcttagttatgatcaattagaatatgctgctttcaaatttgctaaaaaacttcaaacatgttctaatatgcttgatgagaaggatcacactattgagattctaaatgctgaattgatagattaa

SEQ ID NO: 52281 - DNA, 1491 bp, Oryza sativa
  Clone ID: PAT_MRT4530_54592C.1
atggcgatggctttctggcgacgagcggcggcaacagaggggtggacgggcttcaacttggtgctgcgatgccaccagaagaaacggcgaggttcggcgaccacgggagaagcggcaaagctttgccagagatcaaaacatggcgacggctcggccttcacggtgacggagtacattaagtttgagatgaaacctggagaagttttggatgactatctttctagattcaacaaaattttaagtgatcttaaatcggttgattctgctgatgacagaaattacgcacagtctgaggtttctcgtcactttttgaatggtcttgacatgtgtatttgggagatgaaagtttcatcaattcaggagtctgttgatatgtatactttgactttggattcactttacacaaaactcaaaacacatgagatgaatattctttctcgtaaagtcgactctaagtctagtgctttggtttcttcctcgacttctttggatgttggtgcttcttcatcgaagtcttctattctagctttaattaattccatgtctgatgagcaactcgaacagttcgaggaggaggtcttggttttggttactaacaagttttatcgagctatgaataatgttatgtacaggaaaagaggtggaccaaatcattgcttcgagtgtggagtggttggtcacatacgttcgcattgtcctaagcttgggagaggcaagaaggacgacaatggtagagtcaaggaagatgacgtggataagaagaaggtcacgaaggagaagaagaagaattgcatgcagaggctaatccaagaattcataagagcttttgataaatcggtggatgaagatgagagcaaaggtaagcaagttgttgatctagcttttattgctcgtaatgcaagttctaatgtggatgaatctgatagtgatagtgaagaaaagcttagttatgatcaattagaacatgttgctttcaaatttgctgtgaaacttcaaacatgttctaatatgcttcatgagaaggatcacgctattgagattctaaatgctgaaattgatagattaaaatatttgattcctaatgatgatgaattgtcgcaaaacaaaggtgttttggttgattgtgaaaattgtgaaaatttgacaaaagaagtttcttatttgaaaagttctttggaaaagttttccgatggtcaaaagaacctcaacatgattcttgatcaatctaagcaaaaatcagcttttggttcgaggaacacggttatactgacactgatcagtcggtcagaccggccagcgttagactgcagaaacagtcttgacgacaaggacgtattcgatgtgagcaaaaataatgggtgccaaatccttggaaacagtcttgacgacgaggacgtacccggaataattgagagaaaaaaaagtgacttgaggtcagccttggtcaatggtgaggaccgggactatgctcagggaggagcagaggtctag

SEQ ID NO: 52282 - DNA, 878 bp, Oryza sativa
  unsure (1)..(878): unsure at all n locations
  Clone ID: PAT_MRT4530_54593C.1
gccggcgcttcacctcgccctcgtccggccgccgccgcgagccagctgggaggtgcgccgccgcgaccggagatgtgccaggccgccctgccctttcgccgtgaccgggggcacgtggaggcggccggccgccggggggttgcgcggccgcccgcctgcaccaccgcgccgtcaggcctagcagccggccgcctccacgcggtcccggttgcggcggcagggcagggcggcctagcgcctctccggtcgcggcgacgcgcctcccagctggctcgcggcggcggccggacaagggcgaggtgaagcgccggcatacgcagaccttagggcagtggcaaagccaggatttagagatgggcgggtgccatctacgagacgtggtaactcacttaaggttcggtgaacagtgatattgtagcgttgatgtatgatcgctaactcgacatcatatatgttataacaattagctagaagagagaatgagaacccatagatcataatttgccaatttaaacagtttgttccatgattttaattggagtcttgcaatcatttttaaaatgataaatcagttaactaagtcatttcgtaagtcctatatatatagctaggcagttatcctatatagttagtctcatctgcaactaatgatgtaattaatggctagattataagggctaattatcctttggagaagagatgggaggggaggtcacataggggttagggggggtgttggccgtccctggcccctacggtggcttcgccactgccttagggagaggcgaagttgagtccgtttcaggctacgccggtgtacgcagacgagagcgaggctaagcgcgtnctgtgcgcatgtgggctttctgttaggctga

SEQ ID NO: 52283 - DNA, 321 bp, Oryza sativa
  Clone ID: PAT_MRT4530_54594C.1
gtattttaaaaaaaagagaaggcgaaaccccggatgggacgctatggacgacgccgccctccaccgccgctcgccggaagaacgcgccctcctctccccggcgctctgcgaccgcctcgtcaccaccaagccctactcgtagaccaccgcgccaccgccgccgacgtcgaaggcgtatgctaacaccaagacgttcttgatctacaagtgggaacccgactcccacacaactaaaccccacctaaaagactacaaggaggagcctcccgactgcggtccgggggggctcgacctgcagctaaagatcaaaaactaacagga

SEQ ID NO: 52284 - DNA, 102 bp, Oryza sativa
  Clone ID: PAT_MRT4530_54595C.1
atggaggtccaaagcggcaggacggacttctgcgaaggattgaaccgtaaggcgatcagggatcgccagtgcgggccgaggtcaattgatccaagtgggtag

SEQ ID NO: 52285 - DNA, 195 bp, Oryza sativa
  unsure (1)..(195): unsure at all n locations
  Clone ID: PAT_MRT4530_54596C.1
ctcgccgnncgtctctcgggtctcgcgtgcgagcggcgactcatnnggcggagtaccatccacctagtaccatggtggttctacatccccgggtccctgctctgtcagtcctaggattggggcttacccgatgttacccggctccctgcgtgtgccgtggcgttttggtgaatgcgtcctagtgcgtcctggccg

SEQ ID NO: 52286 - DNA, 482 bp, Oryza sativa
  Clone ID: PAT_MRT4530_54597C.1
atggtgtcgtcgacggcgaggttgacctccatcgagtggagcggcggcggcgtccatacacaggaaaatgcgaagcggcaccgcggagagacggtcactcaatcgatcaggcccacaatgagttcatggcggtgcaacggtggagaaggccggccggcgcggcggtggagagggctggccggcacgggtgtggccggcgcggcggtggagaaggccggccggcgcgggcgcggctggcacggcgatggagaaggccggccggggcgggctctctcctcctccagcgcggcagggcgttggagagggctggccagcgcgggcgcgggcgcggcagctgaccctggggtggcggtggtggaggagggctggatctggccagccccctctctcccgggggacctcccccctccagcactacgttgggtggtggccgccggcacggaggcgggcatggctaggtgccggcgtggaggccgggcgag

SEQ ID NO: 52287 - DNA, 253 bp, Oryza sativa
  unsure (1)..(253): unsure at all n locations
  Clone ID: PAT_MRT4530_54598C.1
tgttgcgtgtgcatgccttcttggctgtttgcttttgtttgtgctgcccagatagatagnagggggaggagggaagaggaagttgtgttgccccncggtgtgtgtgtgtgtgggaatgtatggtgaaaagatggggctgcgccagtgcgctcatgcgccacgccagtgggtgtaaaagtgggtggacaataggaaatggcccataatccctgccccaataatnttatgaccctaaaaaaaaaaaaaaaaaaaa

SEQ ID NO: 52288 - DNA, 1491 bp, Oryza sativa
  Clone ID: PAT_MRT4530_54599C.1
atggctgtcggcgagggggagcagcagccgttgcacatcctcttcttcccgtttatcgcgcacggccacctcatcccggtggccgacatggccgcgcttttcgccgcccgcggcgttcggtgtaccatcctcaccacccccgtcaacgccgccgtcatccgttcagccgtggaccgtgccaacgatgcctcccgtggcaccggctcaccggagatcagcatcacgctcttccccttccccgacgtcgggctcccgccgggcgtcgagagcgttccgggcatctcctccaaagccgaacaagagaagatagccgaagcgttcctgcggtttcgcgagccgttcgaccggttcttggccgagcaccacaccgacgccgtcgtggtcgacagcttcttccactggtcctcggacgccgccgcggaccacggtgtcccgcgcctggcgttcctcggcagcagcctgttcgcgcgggcctgcagcgacagcatgctgcgccacaacccggtggaggcctcccccgacgaccccgacgccgtcgtgtccctgccggacctgccgcaccgcgtcgagctgaggcggagccagatgatggaccccagggagcgggagggcgagtgggccttcctccagctcgtgaacgccgcggaccagaggagcttcggcgagctgttcaacagcttccgcgagatggagccggactacgtcgagcactaccacacgaagctcggtcgccgcgcgtggctcctcgggccggtggcgctcgccgccggcaagggcatggcggagaggcaggacacggacaccgactccggccgcctctcgcccgacgaggaacgctgcctgcggtggctcgacgggaaggcggccggctctgtcgtctacatctccttcggcacgatcgcccgtctattggcggcggagctgacggagatcgcccgcgccctgcaactctccggcaagaacttcctgtggatcatcacccgcgaggacaccgacgcatcggagtggatgcccgaaggcttcgccgatctgatggcgcgcggcgagcgcggcctcgtcgtccggggctgggcgccgcaggtgctcgtcctgaaccaccccgccgtcggcgggttcgtcacgcactgcgggtggaactccgtgctggaagccgtgagcgctggcgtgccgatggtggcgtggccgcgttacaccgaccagttctacaacgagaagctcatcgttgagatgcttaaggtcggcgtcggggtcggcgccagggagttcgcgtcgttcattgaccatcggagccaggtgattgccggcgaggtgatcgcggaagccatcgggagagtgatgggtgaaggcgaggaaggcgaggcgatgaggaaaaaggtcaaggagctccgcgagaaggcgaggagcgcggtgaaggagggcggctcttcctacgacgatgccggacggctgttggatgagctgatggctcgccggagctccggcacgtcgtga

SEQ ID NO: 52289 - DNA, 505 bp, Oryza sativa
  Clone ID: PAT_MRT4530_5459C.1
ccgtttccttatctcactcccgcttgtgtatccgggtgcggaatctcaacggcaaaaacctagggtttgctcttccaaatccccaacaccccatcccccacctcagacctccacttccatctctccaccacccaccctctgcagcgccgacgacacctcctcctccccatcgccggtgaagaagacgcggaggattgcacacattgggcttgtgatacaggaaaaatgctaatctacatgccctgaagatttacactaggaccaccttacaagatgcgaatggtcttgatggagtgcattgccttgccaagattgatggctcttttggtgacaaccttgaaaattttgtcctacttagtttggaccaataattgtgctggtggttaaacatgttttctcagggatttgctgggttccatggagaactgcaggccatcttactctgctgccaccgtttgttttgaaacagtgttgctcgattatatgtcagtaggatggttggctc

SEQ ID NO: 52290 - DNA, 1388 bp, Oryza sativa
  Clone ID: PAT_MRT4530_545C.1
ttttttttttttttagataatggattagattaaacccggcctctacaatcttccggtcacataaacggacgcgtgggttttttttgaaaacaataccagtagtagcttttagcctttaaagttatcccggtgatttatacatttcagccaaatatttcacaataaacaaattatcgctaaatccatcgggttacggctgagatccttgagacttatctctatctacaattaattaacctgggtgtcaagaaaagcttacatatattttgtgctcatggcataaagctgacctccaaatgtcatatgtcatccatatcaagtggacagcataaacaacgctgtaatatagaactcacgaggcgttgaatgagcaaaactgaccagcagctgggagactgggaaaataacagttaagcaatccactatcatttaagttctcggtatgtttccatgacttttgatgcttagctcacaatctgcttagatgattctgccttcaaatcttcttccgttggtgcagcagatttattctttttggcattgtcatctttgaacatcacgttaatggatcttcccatcaatttcgtgccattgaaggtagatatggcagcctctgctgcctcttttgaggaaaaggaaacaaatccataaccagcagatcgcctcggacttgtggtatggaagacaacttcaactgattgaacacctggggttgatgcaaataattcacgaagatggcgagatctcactctccacgtcagattacccacaaaaacgctgtgcttcggcatgggagctgatggcacaacatactgcttctttctcgatctagtaaagtctaccttaattgttctatcatttagagtagtcgaatttagatggttgagtgctgaaagagcctcctcttctgaacccatggttacaaacgccaatcctctgtttctggtcgaattgtacatcgagagctcgacatcgacgacagagccgtgcttcccgaagagcgcgcgcatgtcgtccgccgtgcagtcccaggggatgttctgcgcgatgagccgcgtcctcggcccctcgggctcttccaccaccgcctccgcctccgccgccggggccaccgaggcgctagcacagcaggcagcgaaggcggcgcggctaccggacgaacaggcgaaggagacgcggccgccgtgaggcggaacggagtgcttggggaggcggagcagcggtgggtggcgcgcggcggggagcggggggaggcggacgagggggagagccatggcgatggcggcgtacggggcacgtgtggatatctgacacagagagcagtaggcaaacctcgcggtcgcgcgggaggtttatccaccagcctcgtgccgaattcctgcagcccg

SEQ ID NO: 52291 - DNA, 315 bp, Oryza sativa
  Clone ID: PAT_MRT4530_54600C.1
atgacgttgagagcggctggactgatggcagacggtgtggcgatgagggctccggatccgcgggaatggaggccaccattaggcggcgttagcagcggaggcgagggaggccctggagataagggccttgccggaataacacaccccaaattaacctcgatttcgatcgctagaggacaagtttgtagctactacggtggggtcggcttgtcggccaaagtgaagacagggatgtgttcaaagcgtccctttggcttctaccagcgcagcacgtacgactactacaatgccttgtgtacgataatcttgacttgt

SEQ ID NO: 52292 - DNA, 1821 bp, Oryza sativa
  Clone ID: PAT_MRT4530_54601C.1
atggtaatgccggcaccgccgaggggttgggacttctcccctggtgatgcagttcgagagaaagttcgtcttcgatttcgttctccggtgcatttctctttgaagttcagccctatgcactaccggttagctgttgatctcctgagagctaatttccggttaaccaattcttctgtggctttggctttaagagccgccattggtggttctcctgcggatctcaatgtccagcatttgttagaccggagtttttcttttgatgttttctctaagcaagttggtctatggatttatcgtcttagatctttttcctgtgatgatttttcccttcgcttttatctctggagaaatgggggtcctaattggcagtgggaatttgagtcttggagccgtgattgtgctgaggagtgggcattggtgccttctaagaagaggcccactaaggcccatcaacctgtggggaagtttccgaaactgagttctgaggataacttagtttggagatctaaatcttctccggccaaaaagacggcggtttctccccatataccttcctctcccaggaacactgttcaatctaatccgcaaaatttcccctcgcttgcaatggctgatctcaaccctaccccgcaatgttttcttcgtcaagcgcaagtggttcatcaaggtggtaacttgcgtgtgccgcgtgttgatctcaccatcccacagcatccgcctcgaagacatgaggatgtttgcatcaccattgtagagccggccatccctgagcatgaatgggatcatcaccgggcgcttatctcggattatatctttgaagtacacatgtatgaggttcgtactgcttaccgtcacccttcgacagttggtatgttccagcttcgttcagtcatgcatagagatgccttagtaaactctccccctgctgcatatgatgggatgcatactgttgagcttgtgaagcatgaccaagggcagaactggcgtgcttgccactttaatcgagaaggctggtttcttctcttggatttcccgctagattttgttgatcgtcaccatataaatctagcgcttgatagagatcagatgttgggaagagtgtttgtgagagcaaagtatagggatcttgactctgtcccccgaaagatagtgttacaggaacctttgggtaatggtggtggagatggagattttgcaaacatcccacctgaagatgatttacctcctgctggaccacagcctgggcctaatgatgataatgccgatgacccagatgatggaaatatttggcaactaggacatcctggtaatcaggggggaggtggtgtttgggatgatctcgtgcaacagcaacaggctgcggaagcagaaatagaggatgcttggggtcaggatcacccaatgggccaggtcgaagaaaactcggggcaattgattatcttgcctaatcaagaggagcaggagcttaatctgattgatcaagagcaacaagtgcagctgtttctggccaggctcaaggatatagctgacagggaaggaccaaagcacccatctttttatcctatggcaggattgctggagaaaattgaccatctatgcaaagctaaagaaatcatgcaggcagctcaaattcctagccccacatctctgccattcagttcccctttcatgaccctggtactcctaaagcggaaggcaatgtttgatcatgctcctcctgtagtaaaaagagcacattctagctgggctttattgtcttccccctctgatgatgggcattctgatcaggagattttagatgttgcacctttgcaagcctag

SEQ ID NO: 52293 - DNA, 2181 bp, Oryza sativa
  Clone ID: PAT_MRT4530_54602C.1
atggtaatgccggcaccgccgaggggttgggacttctcccctggtgatgcagttcgagaggaagttcgtcttcgatttcgttctccggtgcatttctctttgaagttcagccctatgcactaccggttagctgttgatctcctgagagctaatttccggttaaccaattcttctgtggctttggctttaagagccgccattggtggttctcctgcggatctcaatgtccagcatttgttagaccggagtttttcttttgatgttttctctaagcaagttggtctatggatttatcgtcttagatctttttcctgtgatgatttttcccttcgcttttatctctggagaaatgggggtcctaattggcagtgggaatttgagtcttggagccgtgattgtgctgaggagtgggcattggtgccttctaagaagaggtcagtgcacaaaagttctaaggttcagaaagacaaatcttatgcccaagctgttcaacaaagagacgtctcggttaaattcgtgtttcaatgtttgaaggcccttctccaggagagaagatcggttttcacgagacttcaagggttgaaggttcctattgccggtgaaactctggcgaccaagacggtggagccaatcacgaaggatgatcctatttctctgcgttacttgaattcaaatttcttgccttcctgtgtgcgttgtttggataagggccatattgcttctaattgctctgggcctgttcggtgtcattcctgcctggaggctggtcatatgtcctgcttctgtgccactaggcccactaaggcccatcaacctgtggggaagtttccgaaactgagttctgaggataacttagtttggagatctaaatcttctccggccaaaaagacggcggtttctccccatataccttcctctcccaggaacactgttcaatctaatccgcaaaatttcccctcgcttgcaatggctgatctcaaccctaccccgcaatgttttcttcgtcaagcgcaagtggttcatcaaggtggtaacttgcgtgtgccgcgtgttgatctcaccatcccacagcatccgcctcgaagacatgaggatgtttgcatcaccattgtagagccggccatccctgagcatgaatgggatcatcaccgggcgcttatctcggattatatctttgaagtacacatgtatgaggttcgtactgcttaccgtcacccttcgacagttggtatgttccagcttcgttcagtcatgcatagagatgccttagtaaactctccccctgctgcatatgatgggatgcatactgttgagcttgtgaagcatgaccaagggcagaactggcgtgcttgccactttaatcgagaaggctggtttcttctcttggatttcccgctagattttgttgatcgtcaccatataaatctagcgcttgatagagatcagatgttgggaagagtgtttgtgagagcaaagtatagggatcttgactctgtcccccgaaagatagtgttacaggaacctttgggtaatggtggtggagatggagattttgcaaacatcccacctgaagatgatttacctcctgctggaccacagcctgggcctaatgatgataatgccgatgacccagatgatggaaatatttggcaactaggacatcctggtaatcaggggggaggtggtgtttgggatgatctcgtgcaacagcaacaggctgcggaagcagaaatagaggatgcttggggtcaggatcacccaatgggccaggtcgaagaaaactcggggcaattgattatcttgcctaatcaagaggagcaggagcttaatctgattgatcaagagcaacaagtgcagctgtttctggccaggctcaaggatatagctgacagggaaggaccaaagcacccatctttttatcctatggcaggattgctggagaaaattgaccatctatgcaaagctaaagaaatcatgcaggcagctcaaattcctagccccacatctctgccattcagttcccctttcatgaccctggtactcctaaagcggaaggcaatgtttgatcatgctcctcctgtagtaaaaagagcacattctagctgggctttattgtcttccccctctgatgatgggcattctgatcaggagattttagatgttgcacctttgcaagcctag

SEQ ID NO: 52294 - DNA, 767 bp, Oryza sativa
  Clone ID: PAT_MRT4530_54603C.1
gcacaaagccacggatcaggccaatgcacaatctcactcgctatcgatcaaaacagagacacgaaaaacgatcgcgcatggcaaggaatcaggtcggtcaatgtctatcacgaatcacaaagctctagcaacgtactgtgctactccctgaactcaacggctgcgcggcgccatcatctgttgctgttacgctagcatgaggtgcagcgccaccagctgctgctgccggacgagggcgctgacgtgctccgactgccgctgctcgtcggcgagcaggaggttctccaccatgagccgctcctcggcgcgggcggcgccggcgccggacttccggacggcgacgttgaaggccagcaccagcttctccacgtagaccacgtcctcctcgttccgaagcagcctgctgatggcgtcctcgacggaggcgaactgcgtcgtgaagtccgggttgcatgccttccgcgcgtcctcgtacgcgatctgctccgctgccgcgcgctccctcgctcgcgcctcctcctccgggtctgcagctgcggccttctccgccatcgcgcgcggcggggaggacaccggggccggtccagctccagccccggccccgccgaagccctgaatcttctgctgcagcggcgcgacgttcggctgcttccgcttgtgctgcctggcgggacgcgggcccgccaccatcgacatccccggcggcgaaggaggaggcgccacacccgctgcagcgccaccgaacccgatcccctgctgcttctgca

SEQ ID NO: 52295 - DNA, 1908 bp, Oryza sativa
  Clone ID: PAT_MRT4530_54604C.1
atggtaacgccggcaccgccggggggctgggacttctcccccggtgatgcaattcgagaggaagttcgtcttcgatttcgttctccggtgcatttctcttcaaagttctgccctacacacttccggttagttgatctcccgagagccaattttcggctaaccaattcttctgtggctttggctttaagagccgccattggtggttctcctgcggatcttaatgaccagcatttgttagaccggagtttctcttttgatgtttgctctaagcaagttggtctatggatttatcgtcttagatctttttcctgtgatgattttgcccttcgtttttatctatggagaaatgggggtcctaattggcaatgggaatttgagtcttggagccgtgattgtgctgaggagtggacattggtctcttctaagaagaggttggtgcacaacagttctaaggttcagaaagggaaatcttatgcccaagctgttcaacaaagagacgtcttggttaaatcagtgtttcaacatttgaaggcccctctccaggagagaagatcggttttcacgagacttcaagggttgaaggttcctatcgccggtgaaactccggcgaccaagacggtggagccaatcatggaggaagatcctatttctgcgcgtaacttgaattcaaatttcatgctttcctgtacgcgttgtttggataagggccatattgcttctgattgctctgagcctgtttggtgccattcttgcctggaggctggtcatatggcccgtttctgtgccactaggcctgctaaggcccatcaacctgtggggaagtttccaaaactgagttctcggaataacttagtttggagagctaaatcttctccggccaaaaagatggcggtttatccccgtatcccttcctctcccaggaacactgttcaatctaatccccaaaacttcccctcgcttgcaatggctaatctcaaccctaacccgcaacgttttcttcgtcaagggcaagtggttcatcaaggtggtaacttgcgtgtgccgcgtgttgatctcaccatcccacagcgtctgccccgacgccatgaggatgcctgcatcgccattgtggagccggccatccctgagcatgaatgggatcatcaccgggcgcttatctcggatcacctttttgaagtacacatgtatgaggttcgtactgcttaccgtcacccttcggcagttggtatgttccagcttcgttcggtcatgcatagagatgcgttagtaaactctccccctgctgcgtatgatgggatgcatactgttgagtttgtgaagcatgaccaagggccgaactggcgtgcttgccactttaatcaagaaggctggtttcttctcttggatttcccactagattttgtcgatcatcaccatataaatctagcagtagcttcttttggacaactttctttctggcttgatagggaccagatgttgggcagagtgtttgtgagagcaaagtatagagatcttgactcggtcccccggaaaatagtgttgcaggatcctttgggtaatggtggtggaggtgaatcatggactatttctatttttgtactagatggggattttgctgacattccacctgaagaggatttacctcctgctggactgcagcctgggcctaatgaggataatgctgatgacccagatgatggaaatatttggcaactgggacatcctggtaatcaggggggagggggtgcttgggatgatctcgtgcaacagcaacaggcggcggaagcagaaatagaggatgcttggggtcaggatcacccaatgggccaggttgaagaaaacccgggacaattgattatcttgcctaatcaaaaggagcaggagcttaatctgtttgaacaggagtaa

SEQ ID NO: 52296 - DNA, 1567 bp, Oryza sativa
  Clone ID: PAT_MRT4530_54605C.1
tttttttttttttttgacagaccatcatgaatgatgtatttttctcatttctatataaaagaataagatcatgagaagcgtcaaaatttccacatctcacagggtttgctgttcgtgcatgtctatcttatggcccatctgttcaatctccaaacaggagaaaatacaaaaggcacacatctcaactgtacagcttccgaatgctggcacaaacatgcaaatgatttcggtggcatgtttggaacacccactgggtctactgatctaggggtctgccagaagtcacaagttagaaccaccggcttatgtcagcactagttgaaatggaaaaaagaagggtttgtgtccatcttatggcaaagaatcaatttgagtgccaaactgccaattctatgctatgtgaatcctctgtattcataatctatgaaccgccaccactgttgataccgaagtagatcgtcttgcgactgaaggcattcatagcatagtcgactcggatttgaccaaggtctgtgttaaagtggattccatatccaaatccaacaccaaatcccggttttccttgtcgaagagctggattaccagggacatgacaagcagatcctaagtcactgccgcagtccatgaaaatagaaccctccagatgctttgccaaaggaaccgtatattcacagttagcaattaggcacagtcttcctgcaccaactgcaccctcaccataaccccgtacgctaccaagtccgcctattgcaaatgcttgatatggcgccatgtcccccacaatggaaccacctgtcaagctagtaaccaaaaatgttggccccaatttcatgcctttcgaaactgcacattttactctgttgaaggtcagagattttggtacaagtggcaatccttgttccatttggaggttaacttttaagaagctattatcattaacatctgcataaccagactcttgcttcaagataatcatgttatcatggaggttaccactgcatgttagaggaaagccatcatggtccctggctatggagcgtccctcgttattaacaggccggatatgctcgaatttaacactggttccggatgtccagtttgatgttgatggttcattaagctcaacaccaagcgacaatcgactaagatttatccctctgctccctgatcgtgtgaagttgtcagccggaaagccatgcaccgctatttccggtgtcattgtgtgctgattgctcaaaccagagcaagtaagaacaagtgtgaacagaagaatcaaataggtttcctgaatgacaaatgactgttgtgataaccattcaggccttggccgtctaaaggcaatgacagcattggattcattgatacccttatccaatatgacatctaacttctcgctcctcccaaataggcttggatgtttgagtgatatccttccgacgatttgcgagaaggtggcgccagagttcctcatgggcggcagcaggagcgcctcgcagagcatgtgggtgaggtcgacgtgcacatccaccttggctttccccgcattgacgctctgctgagctcccat

SEQ ID NO: 52297 - DNA, 416 bp, Oryza sativa
  unsure (1)..(416): unsure at all n locations
  Clone ID: PAT_MRT4530_54606C.1
ccaccctgttcatctcgcgtgtgtggcggtggtggtggtattctctctctctctctctctctctctctacttggtgaggaggaggaggagagtggtggtatcgccatcagagctcaataatactagtgcacgctcgccttgttttctagctcttgtcagcgaaccttcccccctgaaaaccccacccaccccctcccctcctcctcgtctgcttctcgctaccctctgtgtttgtgtttgggtttgtttgtttctctctctaggcctcgcgcgccgtgatcgatcgatttctggagtgatctgttgtttttttgtggagttgtgtgatctgggagatggctggagcggggggtgcggctaccgctgcancnggaggaggaggtgggggaggggtggcggcggggaaagtggaagtg

SEQ ID NO: 52298 - DNA, 755 bp, Oryza sativa
  Clone ID: PAT_MRT4530_54607C.1
ctgtacatgcagctgctcggctcggcggacagtgcagcaaacctgcgcatccatatagcattaagcagaatctgagaaatagcaatatcctgttaggagcatttaagcattttctgaacatgccatgtgcacataaacagttcaatacacaacataaccattaaatggtgcaaccatagtatcacttctttcctgacaagggcaccaccctgagagtaacaactggcacttgccagactcgtatctccacatcccagctaaaattgaaacaaaagctcctccaaaaacacaaaaaacaatgcaataataatcacactgttcttcctacaaatcttctgcagcctggattaaaatcatgaaggcctcagaagaaaatagtggatatccccatggcaaagcacccaagagctacccacgggcttaagcgttcacctattctggctgctttccaaaagaaaccacggaatccggtgcggtcgttgaggatggcggggaactggatcttgatgtaggtacaggtgcagatcaccagcagcaccacggtcaggaacgaattgaagttgaatagcgccgacatggcgctacccggccttccggcttccggcggcggctctcctccacgagcagagtagctgccgcagatcggtattggactattgcagagacccaaggtattcgcggcgtggccgggggaggaggcgtcgccgtggccaggagaggaggccggtcgggcgactgggtgagaccccggccgg

SEQ ID NO: 52299 - DNA, 6065 bp, Oryza sativa
  Clone ID: PAT_MRT4530_54609C.1
atggccggggaggacgaagcgctgtacgagatccgccgcctcgcgtcgggatcccacgaaatccttcgtgaaggagaaatcactggaacaagtggtgctgcaggaggagttctctcctatctctctttacagggtgtaagcaagctcaaggagaggtggactaggaacagcgcactgggttggagtaagaagaggagcaggataaatgcagcattgttgtttgtctcacgaaacgcagactatgtgggggtagctgttgggaatcgcataaccgtcttgaggaagggcgatgggtatgcttcaccttgtggcgtatatacgaataatgacaggatggctttttttacaaatggggcttggctggaggctcaaggcattttaggtgtggtggatgacttgaacacacttcatttgatcaaagaaaatggagaggcattaacaaggagaacaagcaatcagttgaagctgtcttatcctatcgttaatatagttgtgcatgatggctcaagctcggagaggccgggtttctacattttcacaagtgatggcatggttcataaatttgactacatgcaagatcatgaagcaaacctgcaaaaagttgccatattgattcaagatgcggtatcagctaagactcctcaattgccacatagtgtatcatgcgttgattatcaccaggatcattcattagtggtcttaattgggaatccaaatgcctttttaagctccaatggctcctctggagcttgttttctatatgtgttgcacttcaacggaaatctggaatttagtctttcgtttccaagtctgcagttggaagggacattttttcctcctaaggaccaagcaacttttgcttcatctgcaaaagtcagaatctcacctcagagcaagcatattgctacattggatttgaatggttctgtcaacatctttgtacttgctaatgacaaacgctctgcttcacttcatcctcccaggaatggtacacaactgagtgatgttaaggacatcagttggtggacagataatattctgatggtggtaaaggaaaaaggtagcattaacatgtacagcatcagtggaaacagggtagtttcagaagatggtcatgttctatctacaccacaactggaaaaggcaagagctgttgaaggatacacttttattttgcaatcaagccggtacgaaggaaacactacatttgaggaggtggatagtaactctatgcctaacctacaaaatgtttctagaaataatcagcgttccgagatggataaaataatttggagcctgatatcattctccaaaattacagtcccagaaaagtactctattctcatcagagggaatcgatacaaggaagctttggattttgcctgcaagcataatttagataaggatgaagttcttaaagcacagtggttgagctccgatggagatgttcatgatatagacacatacttggcaaacattaaagaccaagtatttgtattgtcagaatgtttgaacaaagttggaccaacagagattgctctgaaagccctactttcttttggccttcgtataacagaccgtttcaaattttcaaagttggataacagcattgatacctcagcatgggacagtcgcatcattaggcttcgtttgttgcgttataatgacttgctggagacattcttgggaattaatatgggaaggttctcagctgtagaatatagaaaatttcgtttgatgcctcttgtggaaactgctgttgctctggctgaaagtggcaaaattggcgcccttaatcttctcttcaagcgtcatccatacactatatcttttgacattttacatattttgtctgcaatcccagaaactgtttctgttcagagttatagtcagttgctacctgggaaatctcctcctagtgttgtgattttaagagatggtgactgggttgaatgcgaacaaatggcatcattcataaacacttgttctgatcagttggagaagaatggagagttcaaaacagaactacttctaaagcattctgctggcttttcatggccatcgattgccaaactttgtgagtggtacaaaagcagagcaagggacattgactgcttaagtggacagctggaaaattgtcttgccatgatagagcttggatgccaaaagggcattgtagagttggaaccattttttgatgatattaaatgtctttatgaagttgtatattctgacgagttgagtgagtttataatgaaccttgcgatgtgggaagatcttcctaactatgagaagttcaaaatcatccttaaaggagccaaagaaggaacagttgtccaacgactagaagaaaaggcaatcccttttatgaaaaagagatcacacttgatctttttgagtaatgaagaaaaacacagagaatcatacctgattagatggctgaaagaggttgcttctcaaaatgagctctccatttgcttggctgtatttgaaaatggttgtggagactcaccaattcatgggcttttcaaggatattgctgaaatgatagaaacagctgttcactgcatttatctatgctctgcaactaaccagtggaataccatgtcatcaattttatcaaagttgcaccataagatgaagcgagaaaaatctatgttggccagtgaagaagattataatttcaaagatgctaagcaagcccttggcacttgtgtggtttcttttgatgacatgcaatatgtgtgcactagaatcttatctggtctgagttctccaggggattcttattctcatgattcaataaattaccaacttgataatatcaaatctcttgatatgctggagaagaagctaaaagttgctgaaggccatgtagaagttggcagactgtttgcttattatcaggtcccaaagccaatacattttttcctgagcacacacttggatgagaagaatgcaaagcaaattatacggttgctcctgtcaaaatttggtcgacaatttatgctggtagaatttattagagggcttctaaaagctggtaagttttcactagccaggaactatctgggaggaacaagtgcagtttctttgtccatagaaaaagctgaaaatcttgttgtccaagctgcaagggagtatttcttctcggcttcaactttgtcctgtaatgaaatatggaaggccagggaatgcctaaacctgttacctaatagtataagtgttcaagcagaaaccgatataattgacgctttaactgtcagacttccttatctaggggtgactatccttcctgttcaattcagacagattaaggatcctatggagatcatccgaatggttattacaagtcagacaggggcatatcttcactttgaagagattactgatgtcgcaaaacttttagggttgaaaaatgaagaggaaatagctgctgtggaggaggctattgccagagaagcagtcgttaatggcgaccttcagctagcctttgatatctgtctaactttgactaaaaagggtcatggtgcagtgtgggatttatgtgctgcaattgctaggggtcctcagctcgataatctggatacaagtacccgtggcaagctgttgggcttctctctcagccattgtgatgaagaatctgttggtgaattattgaatgcttggaaagagcttgatgtccatgataaatttgagcaattaatgatttcaactggtacaaatcctcctaatttctcgactgatggctcttcaatcacaccacttcctgtccaaagcgtgcaagatatacttgacctgagagaagacattagtgatgatagaggcatagatcatgttgggattgttaaacaaatgctatcaaaagtttgcacagacttgtcaaatgaagatgcatataggcgggaatcttctttggcagaaagcaggaaactcttttccttctctgcattggaattgccatggcttttgaagttgtccaatgatgaagagcatgatggtaaaaaacagtctttgaagactgaccatcccatcaggagatatcaattttcaaccaaagtaaaagcaataaattgcattatacattggttggctgtaagtggcttttctcccaatgatgatctagtcatgtctcttgcaaagtctgtaatagagcctcctgttgacgaagaggactatgttcttggctgttccattcttctgaatctcatggaccctttcaatggagtgaaaataatagaggaagagctcaagaaacgagaatgctttcaagaaattagcagcattatgaatttaggaatgacatacagttcgctcaacagtttgaagaaagaatgctctactcctgagcagaggagaaatctgctgcttgagaaattccatgagaaatttacctcagtcgaatcagatgagttagaccagattgatgaagcaaatgccacattctggagagagtggaaagcaaagttagaggaggagagacgactggctgatcaagcaatgatgctcaaacaagtgttgcctgatgtcgacacatctcgattcttgtctggtgatgtcaattacatcaaaaatgttcttttctcctttattgattctgttaagctggagaagaaacatatactgaaggaagcagtaaaaatagctgagacctatggcttgcgacgaactgaggtgcttttacgatttttgggctgcgctcttctctctgagtcttgggataacaatgatattctgagtgaaatttctgaattccgtgatgatattgtcaactcagctaagggtgtgattgatatgatacattcagatgtctatccagagattaatggttataataagcaacgtctctcttacatttatgacatcctttcagcatgccactcatatctcgtccggtcaagtgagatagagttgacataccctgaacatgtccatacacataagttcgaaccatttcagtattataaggtcctagctgaagagtgcaagaaagtatctttcattgatggcttgaattacaaaaacatagctggattggataatctgaactttgagcatttcaatgaagaggtatgcaagaatatccatgcttcaactgtcagagctctggctgatatggtacaagctctcgtgagtatgtatgtcgatgtactggccaagggactcatatcacggcaaggtgtttacaagcattatgttcttggtttgctggcatctttagaaggccgcactgaagcaagatcagacaacatagactctgaaaagctgcaggcggtcctttctgaaatagagttgaactatgatagttgcaaggaatacatccaagttcttccagctacagatatttcatgcatcattataaggtattgcatgctatgttttccttgcgacttaacaagaaaccatccacaggagccttcatggaagaaacctctggatgtgttggtaatgctttggattaaacttattgatgacataccggtggagtcaatggatgcttgtccatatggaagggcagaatacttggattcaaataggttatctcactgcatgagggttttcagacagctattggtagatgataagataacagtgtgtcaaggttgggatgccatctccatgtatgtaaaaattggccttggtgatgaaatcccgatggagatttcatatttttgtcgatctatgattctttccggctgtgcttttgaatctgtagctcaagtataccatggaggacaggaacaattggaaaatgagagtgtagaccaagcaatcctttggatctcttagagctttacagtgctactctagatgattgtttgtcagatttgatcaagagtcctagtgagtctcagatattgttgcataaattgctgtcgtcactgagccgatcaacagagaaacacgctggcactcttgagatgattagatctggtgtttgggggaagttaatcagcttttctgaaaacatgcagctagacagccaattgagggtctatgctctgcaactgatgcagtgcatcacaggaagaaacctcaaaagccttcaaatgagctggtttccc

SEQ ID NO: 52300 - DNA, 796 bp, Oryza sativa
  unsure (1)..(796): unsure at all n locations
  Clone ID: PAT_MRT4530_5460C.1
ccggccgggacatcgcccactcgtcctttccccttcctcacgccgctcgcttccggggtccaaaccacaccgccatggatgccattccccatcgtcgtgtgctcgcgtaggcgtggaggcaactcgccccctcaaagaccgaggagcactggctgctcgtggaatcggtgtgcatagatctccccggcgccctatctcactcccgcttgtgtatccggttgcccaatctcaacggcaaaaacctagggtttgctcttccaaatccccaacaccccatcccccacctcagacctccatttccatctctccaccacccaccctctgcagcgccgacgacacctcctcctccccatcgccggtgaagaagacgcggagtgcgtgcccgccgggggacggacgggcactacaccaaccaggacaggcagcgaatatacaagcatgggacatttgcttgcaatttttcgaaccactttttgcaggattgcacacattgggcttgtgatacaggaaaaatgctaatctacatgccctgaagatttacactaggaccaccttacaagatgcgaatggtcttgatggagtgcattgccttgccaagattgatggctcttttggtgacaaccttgaaaattttgtcctacttagtttggaccaataattgtgctggtggttaaacatgttttctcagggatttgctgggttccatggagaactgcaggccatcttactctgctgccaccgtttgttntgaaacagtgttgctcgattatatgtcagtaggatggttggctcattg

SEQ ID NO: 52301 - DNA, 911 bp, Oryza sativa
  Clone ID: PAT_MRT4530_54610C.1
ggtctctccaatggctgagatacacacgttggagtccccagatttagagagaatttctattgtgaacccggctgggaaggttccatgccaggaattatcatgcagctggatggagcctcatcaactgatcttgcccctccagaatatatcgtgatagacactgtcatgacatttcagtacctgtaaatcttcctgatggggtccttgtttgttgctctaggtctaagatattaaattattcgttggtttggattgcacccctgtaattttcgaaatgtgaagatgaaatccaaggaggttggttgcaaaactccaatcaacaccaagttgaagaatctgagggatgccagctgtgccagccgatcaactcagtgctgggtgttattgcttctcccttaatagtataggtccctgtatattgtgaaagtaaaaaagcacttggatctcatctcgtatcattttctgatcgagaatagtgctagcttcatccagttattttgttaatttggcgaacttcaatcgctatttattgtaatgaaatgctaggttgttctctggggaaggtggtgtttacatgattacatctttgaaggtttcatttttatgcattctagttcatctgaactctcggataaatcactgatgtactttgtgaaagtattcctggaacaggtatggagctgaatgagggcttttggcaacactctgctcgagacttgctgatgggttctgcttcatccgtagtcatgggcacgaagttgatggaaagcatttgaagcattctgatgattctgttgttttgtttggttggactagttaaagcatgttagccctggagctattttaaattacatcgactgtacataaacttaccggtgaatgcagtacacacttataaaaaaaaaaaaaaa

SEQ ID NO: 52302 - DNA, 396 bp, Oryza sativa
  Clone ID: PAT_MRT4530_54611C.1
atggaagacaacgtggtccttgttgcccctgacttcagctctcacgtcctcctcatggcggccacggctcctttcactcctttgggctcctcccttcttttggccgcctccacccggccgtggagcctttcggtagttgaggagaagtgttcagccgtgctcgtggcggagtcggacctgctgcattgggtccagccgatgagccgggaaacgataacacttatcactctggctctggtttctaagaggttctacccctttgagggagtcttaggcgaaagccttatctggtcttccaggatcggcaacatcgaggcctgcgggcgctgtttcctccttagaggtgttgcattgtggactctctcccccttcgggcttttcgtgtcttctgtgtaa

SEQ ID NO: 52303 - DNA, 2407 bp, Oryza sativa
  Clone ID: PAT_MRT4530_54612C.1
cccgcacgctctgccgcgcgctccccgcggcctgctgtccccacgacaaaacaacccaccaaggcgagccggttcagcggttaccaagaatgaggaggaggaggaaaaaaaacataaaattaaggcagttcgttcgttccccactttggcctgctccaatcgccgccccccgccccgccgcctcgtcgcccgcccgagatccgctccgcgttgcctcccgccgccgccgagatagaggcatcgttcccagcattgggttccacggagaattgccaatttggatatctgatccaattgttagttggattgaccgtttcagagtgcctgcagttggctgctggattggtcaatataagaaaaaccgttggtttcggagatgatgccattgtgagtggaaatggattccgcgagaagttggttccagaagttccagccgagggacaaatcgaagagtccagcggtggctgccagtcatggaaaggatccaggaaagccaccaattgatgacgcgccatctagtgcaacaaaacagagggttgccgcggcaaaacagtacattgagaatcattacaagacccagatgaagtccctgcaagataggaaagaaaggcgctggatgttggagaggaaactacaggatgcagaggttcctgtagaagagcaaaataatattctaaagcatttggagaaaaaggagaccgaatatatgcggttgcagagacataagatgggggttgaagattttgaacttttgacaattattggaagaggtgcatttggcgaggtgcgtctttgtagagagaaggcgtctaagaatgtatatgcaatgaaaaagcttaagaaatctgagatgcttcgtaggggccaggttgagcatgtcaaagctgaaagaaaccttcttgcagaagttgatagtgcttttatagtcaagctctactattcttttcaagatgaagaatacttgtatctcatcatggagtaccttcctggtggtgacatgatgactttgcttatgcgcaaggacacactgacagaagatgaggccagattttacattgcagaaaccgtattagcaatagaatctattcacaagcacagctacattcaccggtatcaaataagtgttcccaagttttgggatatcaaaccagacaatctattgttagatcgcagtggtcacttgaagctttctgactttggattgtgtaaacctttggatagcagtaattttccaaatttgaatgagccagattatacatctacaaagggcaccaagcctttacctgatagtagcagccggttaagctcttctgctctaaagcgcacacagcaggagcaattgtcgcattggcaaaagaaccgacgaatgctggcatattcaacggttggtactcctgattacattgctccagaggttctgctgaagaaaggatatggaatggaatgtgactggttagtctcttatcttattgtaaactggagaagtcacttgaaattccctgaagaggcaaagctttctcctgaagctaaggatctcatcagcaaacttctatgtaatgttgagcagagacttggaacaaaaggagcccatgagataaaagcacatccatggtttagaggtctcccatgggaaagattgtatcagatgaaagctgctttcataccagaagttaacagcgagttggatactcagaattttgagaaatttgaggagaccggagcacaaattcaaagttcatctaagtcaggtccatggagaaagatgcttccgtccaaggatgcaaactttgttggctatacatataagaattttgaaattgtaaatgatgatgaggttgcaggaattgctgagttgaagaagaagagttccaagtcaaagcggccaactatcaagacattatttgagagcatggatgaagatgagcctgttcaaggaagtttcttaaatatgttgccccataaggaggggcaaccttcatctcactccaccattccaccagaacaataccaacctcgacataaataggataaggaggttttcaaaagtaaaacacagataattaaaacaagaaaaaaattggttccttttgatcttgtttcccgtccaagctttgtaaattctaaccgatgctttctcttctcaaattcttcatacaaaaatccctcctctgtccaaagagtggtgtttgctgtacgcggcgatgtttgtttggttccccgtgtgtttgggttacagcttcggtgatgatgggtctcaggttacagctagtgtatacttgctaccatttctgacgggcatgtgtattgcaattaaattcacccctcttttgttctgccttcccagggctcttaattagcttgtaacatactccctccgtcccataatataaagggattttaagttttt

SEQ ID NO: 52304 - DNA, 255 bp, Oryza sativa
  Clone ID: PAT_MRT4530_54613C.1
atgaaaactttgcgcatttttatagaggacttttatgttctatcaatccctgcacggaggcggcaccaggagacagtcatgcaaaatgaaaacgactatggctatcagtacaatttctcaatggggctggggctggcgatcgggcgaacgagaggctgggacgcgtcgtcgccgacggcaccgagtttggctcaggcgcttggagagttttggttgtcggcgacggcgatagcgcatggaacgaaggaaagctaa

SEQ ID NO: 52305 - DNA, 3256 bp, Oryza sativa
  Clone ID: PAT_MRT4530_54614C.1
tctctagggtttagccccccccgcgcggcccggctcccccgctctgcccacgccgttgccgccaccatgccgctcaggttgatgccgctcaggttggagatcaaggtgcgccactggctcgggctcggcgagcccgattccgctagatctcggatcctgtcgagtctttactccgggagcgtgtgcatctgggactatcagtcgcagacaatggtgaagtcatttgaagtttcagaattgccagtgcggtcagcaaaatttatttcacggaaacaatgggttgtagctggtgcagacgatatgttcattcgtgtctacaactacaacacgatggacaaagttaaggtttttgaggctcatactgattatattagatgtgttgcagtccatccaacacttccatatgtgctttcatcatctgatgacatgttgataaaattgtgggactgggataaagggtggatgtgcactcaaatctttgagggacattcacactacgtgatgcaagttactttcaatccaaaggatactaacacttttgcaagtgcatctcttgaccgaactacaaagatatggagtttgggttctccggatccaaatttcacactcgatggacatcaaaagggtgtgaactgtgttgactacttcactggtggtgacaggccctatttgatcactggttctgatgactccactgcaaaggtctgggattaccaaacgaagagctgtgttcagacacttgaaggacatacacacaacatttctgctgtttgtttccatcctgagcttcctataatcattactggatctgaagatggcacagttcgcatatggcattcgacaacttacagacttgagaacacgctaaactatggtcttgaacgagtctgggctgttggatacatgaagggttcaagaaggatggtaattggttatgatgagggaactataatgataaaaatgggacgtgaagtacctgtggcaagcatggataccagtggaaaaatcatttgggcaaaacataacgagatacagactgtgaacatcaaaactgttggtgcaggctttgaggttacagatggggaaagattgccattggctgttaaagaattaggaagttgtgatctttacccacagagcttaaagcataaccccaatggaagatttgtcgtagtttgtggagatggtgaattcataatttatactgcattggcttggaggaataggtcatttggatctgcattggagtttgtttggtcatcagaaggagagtatgctatcagggaaagtacatcaagaataaagattttcagtaaatcatttcaggagaagaaaactattcgccctacattttcagctgaacgtatttttggtggaatattattggcgatgtgttccagtgatttcatttgcttttatgactgggctgactgtagactaatacgccgcattgatgtgaatgtcaaaaacctttattgggctgatagcggtgacctagttgcaatagcaagtgatacatcattctacatactgaagtacaacagagatgtcgttgcgtcttatctagaatctggaaaacctgtggatgaggaaggcgttgaagatgcttttgagctgcttcatgaggttaatgagcgagtgcggacagggatctgggttggagactgctttatttataacaattcatcatggcgcctgaactattgtgttggtggcgaggtcaccacgatgtatcacttggatcgccctatgtacttgttgggatatctagcgaatcaaagccgagtttatcttattgacaaggaattcaatgtcatggggtacacattacttcttagtttgattgagtacaagacacttgtgatgcgtggggatattgaacgtgcaaatgatattttaccatccataccaaaggcgcaatataataatgttgctcatttcttggagtcaagaggtatgctggaggaagcacttgagatagctactgatgctgattacaggtttgacctagctgtgcaacttggaaaattagaagttgcaaaggctatcgcgatggaagcgcaaagtgaatctaagtggaagcagttgggtgaactggctatgtccacaggcaagctagatatggcggaagagtgccttgtgcaagcgaaggacttaagtggcctgttgctactatattcatctcttggagatgctgagggaatcgagaagcttgcttctcaagcaaaggagcatggcaaaaacaatgttgctttcctctgtctctttatgcttggtaaattggaagattgcatacaattgctgatagacagcaatcgtatacctgaagctgcgttaatggcacgttcttatcttcccagcaaagtttctgagatagtagcaatatggagaaatgacctcagtaaagttaatccaaaagctgcagagtctctggcagatccttctgagtatccaaatttatttgaagactggcaggttgcacttactgtagaaaagaatgttgcttctcggagggtccattatcctcctgctgatgagtacttgaaccatgctgaaaagtcagacatgactcttgtggaagctttcaaaaggatgcaggtcattgaagatgaggaaacagaagatgcactagatgaaaatggagagcccgatgaagaggttttggaagagaacaaagtggaggagagcacagatgaagctgtcgaagttgatgctgatgagcctgaagagaccgttcttgtaaatgggaaagagggtgaggaacagtgggtgctaactgaacatgagtaatcgtcagcctaaaagaattgtttgtgctaactgaacatgagtaaggaccaaggatgctgtgccgttttgcattggtgatgctgtgccgtttgagctttgatcttatcatatccttcaactgaactccaaactcaagacatggaagcatgcttgtccaatggtatcaatccagaccggcttcttttttgctgcaatataggtgattctttcgtcctgcaacattttcatacccactcttcacgtcctgaaatcagtgggtttgggtgcagagctggttgtaacgaagggttttcttaataatttctatagagatgtgtagtatatgccacattaccatagccatcgcatgtcttctaggagatcaaagttttcgttggccatccactgtaatttcatgttattggacaaagtttacatgtagcatatgattgtggtgttaaaagctttccgtgtataaaaaaaaaaa

SEQ ID NO: 52306 - DNA, 116 bp, Oryza sativa
  Clone ID: PAT_MRT4530_54615C.1
ggcgaatggcagtgttcatctctccagatctgtctgaaacagttggcttgcacggtatcatgctggatttttgtaggacaggaagtaagcctcttggcaacgacatcattcaggag

SEQ ID NO: 52307 - DNA, 660 bp, Oryza sativa
  Clone ID: PAT_MRT4530_54616C.1
atggctcgtgctgggctaacccacaagcaggaatccgaagagggaggccagctgattggagtcgtacgccggcgagggagggagcgccacgcgctggtcgtgtacggcggcggcggcggccttcttctgctgtacctggtgccgcatagccacgccagccgttgctccgccatcgcgccagccgccgctcctgcacgagtgcgccaccgcgtcgcgcgctgccctgcgatgcatcgccggccgcccgcatcgcgccgcacagttgccgcgagccgcgccgtccactactccaccttcgcgctagccgccgctcctgcacaagtgcgcctaatgccctgtgccgcgggctgctcgtatcgcccaatgcccttcaccggccgctcgcatcgcccgctgccctatgccgagcagccacgccggtcgttgctccgccatcgcgccgaccgccgctcctgcacgagtgcgtccctgcgtcgcgcgccggccgcctgcatcacgccgcacggtcgccgcaagccgcgccagccgctgctccaccttcgcgctggccgctgctcctagacgagtgtgccatcgcatcacccaccgccctctgtcgcgtcgccagtcgcctgcatcgcgtgccgcgttgcgccgcacggtcatcgcgagccgcgccat

SEQ ID NO: 52308 - DNA, 393 bp, Oryza sativa
  Clone ID: PAT_MRT4530_54617C.1
tttgtttttttttttttttttttttttttttttttttttttttttttttttttttttttttttgggcccccaggggggggaatagggttttccaaaaattttttaaacttacaaacaggttaaaactaacggggtgggccgggccccctggagacaatttgacttttgagcagtcggataggcccactggtttaaaacaatccaatcagagcattgcccgggaaaaactttaagggccccggaaaatagaaattgaaatgaaaaaataatgggggggggggcaagaagtaacgggggttgaaccttttaaaacaccaaagcctcttggggaaaccggggggagggcccttgggttttttggaaaccgccatgggtttgggggttttgcccaaa

SEQ ID NO: 52309 - DNA, 780 bp, Oryza sativa
  Clone ID: PAT_MRT4530_54618C.1
atgaagcttcaagctttcctgaggacaagaacaaaatttgtagcaaggcgcattgcccgagaggagggaggccgccactccggcgcccacgcgccggcccccaaggtcgccgcgccggtgaccgcgcccgaggtcggcttccgcgccggcgccagtgcccaaggccgcctccaccccggctcccacgcgctgttccccaaggccgccgccactccggcgcccacgcaccagcccccaaggccgccgctgctccgcccgccccctccccccacccacgacctcgactcccgggggctctccgccgccgctttgcccacccgccgccgctccggccgccgtcgccactacttcctcggacgacctcgactcccgcgggctctccgctgccgcctcgccggcttcgcgcgctgccgctcgggccaccgtcgccccgccgacttcgcgcgccaccgctccggccttgtcttgcagactgcagagcaggggagagaagagagaggattaaggatgacatgggggccccgccccccggggccgcggttaccgcgccccggcggtaagcacggttaccgcacggtaaccgcgaagctgatggtccttggctggcctaatgacaatgattcgtcgcggttgcttgagagggcaatgtccgtgcaagatgacttgttgtcattggcactccccattgtgtcgctgctctctagcgggctcttggccaatgggtatggcgccacggtcgtcactctgaaacagagcatggggatgaagatcagtttctga

SEQ ID NO: 52310 - DNA, 342 bp, Oryza sativa
  Clone ID: PAT_MRT4530_54619C.1
ggatgaatggagtagagctgctcatgtcaagaggctgttcggtgcctgatgatggaaggctccggtgaaaaattggaagttacagggagtgctatcagttgctgttacaagtgaacactggtttcttgtgaacaccttaacgcttgttaagaactatatgtacttcaattccttttcatacagacttgtctcttagcatttgatagtatcacttctcttttggtacttggtacttactataaatggtaatttgaacctttctagttccatgatgggatgaagaggtgctggctgatagtgtggtcaacatccaagttgctgttgcaaaaaaaaaaaaaaaaa

SEQ ID NO: 52311 - DNA, 352 bp, Oryza sativa
  Clone ID: PAT_MRT4530_5461C.1
aaaatgaggatcgtcgcggaaacagagtaagaatcggctggagttcggatcagctacgatcgggatcggctaagttcgagtcagactgggttaggtgatacagccgattcggacaatacgatttggtgtacgacatcgggttgagttgatatgcttcaagatggttgccacacatggctagagtcctagccgattggctatcctttataggtttaaccgcggtttctttgtcttcgtttgttgttgattgcaggatcaaatcaagtggcacgcttgcatacccgaaggcgagttttggacctgcactggagtttttcatcaacacgcttttggcacgcttggtgggacccat

SEQ ID NO: 52312 - DNA, 2664 bp, Oryza sativa
  unsure (1)..(2664): unsure at all n locations
  Clone ID: PAT_MRT4530_54620C.1
tttttttttttttttttttttttgatccaaacagnggccgtggttaacatatcatcatcatgcaaaatcaagttcggtacaaacctaattatctaaacagcagaaaaagatatatttttcgcccctaatttttcacaaaagctaaaatgattcgacttttggtgaaaaattagggtcgaaaaatagaaaatattttcttccttccaatatctaagctaatcgatcacctgcctagcttatggccgagacctcttcatggtcatggtcagaggcggcgcagcaggaggaagaagacgagcaaccagcttcctcatccccaccgccgccgccgccgccgcattgctcagccgcagtggcggcggcggtgacactggtggcgccattgctggtggtgctggtgctcgcggtgctgcagctggtgtcactggtggtggtggttgcggcggcggtggtggtggtggtggtgtcggaggaggaggaggaggggacggcggcgagggcgaggaggaggtcgacgaaggcggcgacgatgagggggtggttgtgcttgccattgacgcggaggtaccaggagaggagctcctccagcgcgtcccagtcgcggaggccgtgcgccgccaccatctcctccatggacgccctgaagtccccgtacgggtcctccgactccaccgccaccgccacgctctcctccaccagctgcgacgacgacgtcgacgacgacttgccggggagttgcgccgcctccgccgccgctttctctttctcctcctccgctggtggtggcggcggtggtggtggtggtggccgtcgtggcctcaccgtggcgaggatggagttggtggcggccggccggcccgggccggcgtcgaagaagaatctgtcggtggaggtccggcggccgaggctgcggatgaccgcctccgaccactcctcgtcggccgccgtcgtcgtggagaatctgtcatcgtcgtcgtcatcctcaccggagaaggcacagccgtcggcgacggcgtgggcggcgtcggcggagtcatcgaagggcgagtcggcggcggcgacggccagcctggagaagagggaggtgaggccacccttcttgcccattggatcgagctcgagagaggaggaggtggttgaggcgatggagagatggagaggaggtgaggtgaaatggaagtgcaattaaggagatggagtggtggtggcctggtgggagggaggaggaagaagaagatggggagatggggcccgtgggtcggggacgggtgcagcggcggcagcgggggacgggcacgacggcggcgggggacagcgatggcggcggtgggggatgggcgcggcggcggtggcggcgtcgacgggggacgggcgcggcggcggcgggggacagcgacggcggcggcgacgggggacgagcgcagcagtggcgggggacggcgacggcgacgagtgagcaggcctggtgcgtggcggggctgccgacggcgcgcggggtggctaacggctcctccaccacggcgaggggcgcgcgccgcgcggggtggcctctctctccctctcccgctcgcttctctccccctctctctctctcctgtcgtcggcggccgcagagtcgtcgccatcgtggatctttgcggggccgccgacggtgcgcggggtggccgacggctcctccaccacggcgaggggtgcgtggggtggacgacgacgaggggcgcgcagggtggcctctctctccctctcccgctcgcttctctccctccctccctctctctcccgtcgccggcggccgcaaggtcgtcgccgtcgcggatcttcgcggagccgccgatggcgcgcggggtggacgacggcgaggggcgcgcgggggagaagcacctctcggcggaggatgaggaggaggaggagtgggcggaggccgccactccggcgcccacgcgaaggcccccaaggtcgccgcgccggtgaccgcgcccgaggtcggcttccgcgccggcgccagtgcccaaggccgcctccaccccggccccctccccccacccacgacctcgactcccgggggctctccgccgccgctttgcccacccgccgccgctccggccgccgtcgccactacttcctcggacgacctcgactcccgcgggctctccgctgccgcctcgccggcttcgcgcgctgccgctcgggccaccgtcgccccgccgacttcgcgcgccaccgctccggccttgtcttgcagactgcagagcaggggagagaagagagaggattaaggatgacatagcatggcggcggagcagatgccgtaggcccagctccggccgacgtggtcctggacgtagacgagcacggtgacggcgagcagcgtgccgaggctgatgaagaagaagaagcggttgaagaagaggcccatggcggcgcgctcccggccgtcgcggtcgtcgaactggtcggtgccgaagccggagacgctggacttgaggccgccggtgccgagggcgatgaggtagaggcaggcgtagagcacggccatctgcaccggcgtcggctgctccccgggcggcgggcggaggtgggtgacgagggtggaggcggcgaggagggcggtgccgatggactggacgagggcgaagacggcgatggtgagtagcggccgagaag

SEQ ID NO: 52313 - DNA, 678 bp, Oryza sativa
  Clone ID: PAT_MRT4530_54621C.1
atggagcatgtggcgggaggggattggctgagctggtttaaatctgtctctctttctctcttgcatcacgcaggccgtagggtaccgctgacattcctgctgggagaggagaaggccgcgttggtgcaggcgcgattcgagcgcacgatccggcacgcgcaggtggaggtgtgcacggcgctggaggtggtcaaggaggccagcagcggtaggcatgtggagcagggtgcaattccaggaggacgcctagacacggctgggcagcggcaagggcatcagccacgtgctgaagggtgggtcgtgttcaagaaggccaccgtgaacatctccgtcgtgggtcgtcagcggttcaaggccgccggtggccagcagcgaagggggagcaggaccggcgaggggacgccgattccggcggtggcctgtgtgcgcgtgcaagttgagccggagccagaggagaggcccaaggttggtggtgcggcggcggcgcatggggaggcggcggaggaggaggtcgtgttcccgatggcgtggacgaacgacgacgagtcgtgcccggaggggacggtgccggtgcggcagacgacgaagcgcgacgtgctgaggtcgatgggcgttggttgcgccggcagcagaacgacgggctgcggcatcaaatctgaagagggacatcacatatag

SEQ ID NO: 52314 - DNA, 248 bp, Oryza sativa
  Clone ID: PAT_MRT4530_54622C.1
atgatggtggctcgtgaagaaagagcggtggttggcagtgcatggagcggtgaggcactcgagtatcttcccccttcccttcgcgtgaaagagaaatcccccgactcgtctcctccgctccttgcgcggttgcgccatctcgtggctgaacagggaggggagctgatctccatctggcgagcagaggaggggatcctgccatttgttgacagtgatcacttcgcccacaagtactttctgcctcaaga

SEQ ID NO: 52315 - DNA, 243 bp, Oryza sativa
  Clone ID: PAT_MRT4530_54623C.1
cgcgcgaaaacaggcgccgggacacttacccccccgacccgcaaataccctcccacgttcccctacttaaccttaacaaccgcccaccccgaggaattaccccgaatggcgaaaaataaaaccccgcgggtgcattccaccagtaccgagtctgatcgaggcgccgcctcccaccatccagccccgccaccaaattcgcgcccctacgtgacccgcaacaatctgggtaaacccccccattaa

SEQ ID NO: 52316 - DNA, 173 bp, Oryza sativa
  Clone ID: PAT_MRT4530_54624C.1
tcctattattccttgttggcaccccttcttttatgggaagtggagggggagttcccacgcctgcaaaaaaatattttctttcgaaaggggttcctgtatcaaagaggagcaaatcattggctttcgggtttaggggaatgtaccttgggtcagggacagggcttgcattttcc

SEQ ID NO: 52317 - DNA, 720 bp, Oryza sativa
  Clone ID: PAT_MRT4530_54625C.1
atgccggcgcacgggaacatgtcgtggggctgtgtattgtgggccggcaaggacgacaaggacgaggtggagatgctcaatcatggtggcggcctcgagacggtgaaggagcagctacagcgcgtgctggagcgcatcacattgcagtcgcaggcgcaacatggggacggggagctgcttgtccagtccaaaacggcaccaagaatattgctcctacctttcctgaatcttcctaccgtgcgtgagccgtccccagtaccagtactcaccacctacgcggtcgcccaccgcgccgtcgccggcgccggtcagcccctcaccgccgcctcccgttcgccaacgacgtcgtcgccgtcggccctatcccccgtcagggaggacttgcttggtcagaacaagaaggcagctgatgatatgagcagagttgctggtttggataaccaagggattgttggccttcagaggcaaattatgaaagaacaagatgaaggtcttgagaagctggaagagacagtcctgagtacaaaacatatcgctttagcagatgacttggaagatcatgttgatgttacaaactcgcgtcttcagcgtgtgcaaaagaggcttgcaattctgaacaagcgcaccaaaggtggctgctcatgcatgtgcctgctgctatctgtcgtcgcaatagtgatccttgctgttatcgtgtggcttcttatcaagtatatgtaa

SEQ ID NO: 52318 - DNA, 274 bp, Oryza sativa
  Clone ID: PAT_MRT4530_54626C.1
gggcacacgggctatcttccaagaggtagctctgcatgaacttccagcgcctggtgtaacgcaggatagtattggggcggcatggtaagatcgttcttctttctcttagtattctttcttcgtgtttttatatttgttggatagtcatgcaatgtataaagatcgtctccatccaattggggggaggtagcagcagaagtaggagtagatcggtatgtggtatgtagtattccagacctttacctgtgtgttgttggttgtgttaatttgctat

SEQ ID NO: 52319 - DNA, 1276 bp, Oryza sativa
  Clone ID: PAT_MRT4530_54627C.1
ccggccgggaccgtgcgtgagccgtccccagtaccagtactcaccacctacgcggtcgcccaccgcgccgtcgccggcgccggtcagcccctcaccgccgcctcccgttcgccaacgacgtcgtcgccgtcggccctatcccccgtcagctccgtcaaaggcacggagaaacgaacaaacgcgagagagaaaacaagaagaggaggaggagccgacgcaaccgaggccccagttccgattgatctccggttcccagatcggccagcaatggcttcatcttcggacccatggatgaaagagtacaatgaggcatctaggcttgctgatgatatcaattccatgattgccgatagagggtctcttccacaatcaggcccggaaattatacgtcacacatcagccattcgaagaaaaataactattctttgtactagactggatagcttggaagcattgttgtccaagattcctccgaagtcactcagtgacaaggagttacacaagcgccaagacacgctttccaatttgaaatctaaaacaaaacagatggcaacaagttttaacatgtcaaactttgccaacagggaggacttgcttggtcagaacaagaaggcagctgatgatatgagcagagttgctggtttggataaccaagggattgttggccttcagaggcaaattatgaaagaacaagatgaaggtcttgagaagctggaagagacagtcctgagtacaaaacatatcgctttagcagtcaatgaagaacttaccctgcatacgagattgattgatgacttggaagatcatgttgatgttacaaactcgcgtcttcagcgtgtgcaaaagaggcttgcaattctgaacaagcgcaccaaaggtggctgctcatgcatgtgcctgctgctatctgtcgtcgcaatagtgatccttgctgttatcgtgtggcttcttatcaagtatatgtaaaatggatccatgacgtttgttcaacgcatcacttctgcgctactcatcaaaatgtgcagccttttaaagatgtaccatggttttcatctcggctttgttctcctgggtggaatggttttatcagtgtgtgtacgtcatatgaggccctggcatatatgcccaacaatatgtctgagactaccactcacgtggaatttgttggattgcaatgagaagtatatatatgtttttgtgtgtggaaaaaaaaaaaaaaaaaatttgcggccccttggcatgtgcatggaaaaaaaaaaaaaaaaaaggggcggcc

SEQ ID NO: 52320 - DNA, 522 bp, Oryza sativa
  Clone ID: PAT_MRT4530_54628C.1
attctctccagccaccctctcgcctcctcctcctctcatcatctcccatccttcctcctcctcaactcctctcctctcttcgcttcttctctcatgctagctactactactagcttctccttctcctgtcgcacggtgcggcggaagtggtagtagtagtagctttcttggtttaagcaaggatcggcgaggacggacgccggcggcgaccgagcttggggtgtgtgtgtgtaaagttgtcttctccggcggatgagctgttgtttcttggctcgcgcctccggcgtgtccggcttgttgccttccatgtccgcgacgctgcaataattcgcttccatatttgctgccgccatgccatgtatagccgcgctgctgatgcggccctccagccgttttaatgcgtgccaaatcctctccccgaggctcataaaaattattgaattgttgggatctgaggggatccgccggagttggtaggatcacggtggagtgattttggccagaggaagaagaagaagaaga

SEQ ID NO: 52321 - DNA, 284 bp, Oryza sativa
  Clone ID: PAT_MRT4530_54629C.1
ataacacttatatcatttgttttctaggggttttaacataacaaggggtgtccttactaccttacaaaacacaccaccaggggggggggagttaaacaggcacagccattttaaacagcacgcaaaggatcggcatcatgacagaaacaatagctgatgcaggttaccaccttgtgcttgaagggaattgccctgatgaccaactggctggaaaatggcagcaagggcggtgccaaagaaggggccaaccaaaaaaaaccaatgggcatccaaggattggcccc

SEQ ID NO: 52322 - DNA, 482 bp, Oryza sativa
  Clone ID: PAT_MRT4530_5462C.1
gacgtcgatccggtcgacacgcgtccgagtactgatgaaggcggatcactgatgtgatctgttatacgttgccactagcaaactttttgccagatattgtgatgtttgtttcttccaatccttttactttattcatattttgtttttattgtttttttttcttttttctttttattttcatttttatttatttttttttttctttttttactactattttttctttcttttttattctttttttaaatattctattctttcatatttttttctttctttttttttttatctatttattttatttttatatttattttttattttttttatttatttttatttttgatctcttttttattctcttcttttttctttctctttttttaactctttattattttttattgttcatttttatttattttttctctctttatttatttttttttacatttttttttttatttgttttgactatttct

SEQ ID NO: 52323 - DNA, 852 bp, Oryza sativa
  Clone ID: PAT_MRT4530_54630C.1
atgtcatggcacagggccggtgtcctgctgctaggggctcagtcctgcctacctgtcccggggttccggcctcttgctcaatttttcccaaactcagaagaggagttcctggaggatgaaggcttcggtatggccggcagcgtcacccgtcgtggtttggacatgactggcttcgtcttggagctgcggggcatgtgcgtggtcctagggtatccacatggagtggactaccaggccaggccgcttccggagcaggagggtgacgatgcagagccccacgctggttgggagagcgccgctcttctcgccatcggcactctttaccagcgatacccggacgagttgcagcacttcgcctaccgctacccccctcgccgcggaggagcccacgactacgccaccttccgggatgctagctcggaggatgacgctaccctcgtgcacctggcgtgcatggtggaggcgtacgacgcggctcgtatcgacttccatcagatggtgcgccgtgggatggtcgagaacaacatgaagatcctggagctgtgtcaagagaatctgcagctcaagaaggacctagacgcagtggaggcgcagctgcatcagctcaagatcgcccagggagaggtctgccgccccaagcgtcgccgtgtctgccgcagccagaagatcaccgcccgcaagagcacctccaggcccgagcttgttcgtcagtccctggcgtggacttgcttcgtcgagacccctcgtgccgagcccgcgcccgtggttccccaggagggggaagcctccagcgttggtagcacggaggatgcgctgttgctcaccttccgtcctggcccgtcgcagcggtag

SEQ ID NO: 52324 - DNA, 427 bp, Oryza sativa
  unsure (1)..(427): unsure at all n locations
  Clone ID: PAT_MRT4530_54631C.1
nntttttnttnattttttttttttttttttttttttttttttttttttgtttttttttttttttttttttttttttttttttttttttttttttttttttttttttttttttttggggaacggaaaatcaccctttcaaattaaagcagtttccgtaaagggtttcaatttttttttgaaaacaagaggttagtatccttttaaaaaatttgtgtgtaaaaaaccttttagacagaaccaagaaaaaaatttttggtaaaaggcccggcgaaggccaaaaaaaattttgccttggtttaatgggggggggaaaaattttttaatggggggcttttcttttggggttgactaatgaagggtatggcatccatttttccattggggggggatccgggggtggtgggtttcgagggggatttgaaggttt

SEQ ID NO: 52325 - DNA, 1053 bp, Oryza sativa
  Clone ID: PAT_MRT4530_54632C.1
ttaactgaactgtggaatagcatttttcagtatgtaatcagttgttatcctatagaccctctctgttgggtgcacagcatcgtaaaatacaaatgatgactcgttcctgcagatagggctcaatgcattgcacaacagtccgacttctctgagcccagtcccacaacatcctcgtgttatctctataaatccatatttagcgggattgtcgaggatctccttgaaagcttgataggcatccaagtagacaattttgcttccatggagtgagccttgcaatgctggaagtagcttttcaagtttagagttgtaggcctgggcatccctgttctgctcatccacacatgctctgtcaggatctccacttaacgtaatctgaaatggtgtgcagccaaatggtggaagacctgccaagcagaactgcctcccacccaggctaaacagttccttgacagaagcctgtgctatccggagtacactatcctggtattcacctatgttcatcttcttcctctttaaggaacgataataacgtgtgaagtcattggttcctgagctgataaatatcagggagttctctatgatcctggaagcctcctcctctccgacgatgttcctgagccggaggaggtactccttgaagaggttcacctgtttcgacattggcagggtattggacaagcgtgacgtctggtcttcaaatcctgaaccagccgacgcgaagttcaccccggtcatgatgtcattgttggacaggtccttctccaggaatggtggtgagaattctttgagctgcagcttctcattgaggaggtctggaacaagccggccattggagaacctccctgttggctttcttcctgggaagttcctgccgtaaggagcatggtttcccacagccaatgttgggatataattgttgttgccggtgtcgagaacggagtcgccaaagtagaagatagccgagaactttggctgagttctcttggaggtggaaatggtggtggtggaggaaaggaggagcactactaggagtagaatggtgtgcgccat

SEQ ID NO: 52326 - DNA, 2475 bp, Oryza sativa
  Clone ID: PAT_MRT4530_54633C.1
atggtgcgctgcggtggattgtgttatgcaaggggtattgtcacagcccctttccgagtttgtgtacctcggctgattcctggacgaggattttatgcacaaataagttcggaaattactagtgaatttccgggcgtgacaactcataaaaggagttcctggaagatgaaggctttggtgtctagctcgtgcctgccgttaagcacctgtggtcgtcgccctagtcttccgctgtttcccgtttgtctttgtgtgtgctgggccttcgccgcccatatggccggcagcatcaatcgtcgtggtctggacctgactggcttcgttttggagctgcggggcatgtgcgttgtcctggggtatccgcatggagtggactaccagggcaagcagctcccggagcaggagggtgacgatgcagagccccacgctgcttgggaggttactgcagtgatcctcactggctcacccgagaggacttcgttggcagtcaccgcgggtggagattccttctccgccgcttgccagaacgccgcactcctcgccatcggcactcttcaccagcgctacccggacgagttgcagcactcgccctaccgctaccaccctcgccgcggaggagcccgcgactacgccaccttccgggatgctagctcggaggatgacgctaccatcatgcacctagcgcgcatggtggaggcgtacgacgcggcccgtatggacttccatcagatggtgcgccgcgggttggtcgagaacaacatgaagatcctggagctgcgtcaggagaatctgcagctgaagaaggacctagacgtagtggaggcgcagctgtgtcagctcaagatcgcccagggagaggtctgtcgccccaagcgtcgccgcgtctgccgcagcctgaagatcaccgcccgcaagagtacctccaggcccgagcttgttcgtcagtccctggcgtggacctgcttcgtcgagacccctcgtgccgagcccgcgcccgtggttcctcaggaggatggagtctccggcgttggcagcacggaggatgcgctgctgctcaccttccgccctggcccgttgcagaagagaagtgctgctaccggtgatggcaaccaacccgtaggcagcaaccacaacaaccatggcagcccacctccacctcctcccccgcctccaccaccaccactagacaccaacaccatcctcacccaaatcatcgcccagcgggccaacatgatggctgctttcctccaccacatccaaaatccgccacaacataatgctccaccaccacccccacaacactctaaactcgccgagttcctccgcatccgtccacctaccttctctagctccaataaccccgtggatgctttggattggttgcatgccgtggggaaaaagttagacaccgtgcagtgcaacgatgaggagaaagtcatctttgccgctcactaactgcaggggcccgcatctctatggtgggaccacttccaggctacgtagccagaggggcagcctattacttgggcccgcttcaccgcctctttccagagaacccatgtgcccgtcggagtcatggcccttaagaaaagggaattctgagagttgaagcaaggcaaccgctccatgatggagtatttgcatgagtttaacaacctggcccggtacgccccggaggatgttcgtgaagatgaggagaagcaagagaagttcttggcaggaatggaccctgagctgtccgtgcgtctggtctccggggactatccggatttccaacgtctggtggacaagagcatccgcttggaagccaagcacaaggaactggagtcgcacaagcgtcgcttggcgaatttccgcaaccaacagggggctaaccaaagggtccgctacaccaatccctatccagggggatcctcctcgcagcagcagcagcagcagcaacctcgctccacgtcccgacctcaattcgtggtgcatgtcccacagccgcagcaacagcagagtcagcaagggactcgtgcgccccgtcctcctacgccagccgtgcagcctgttcaaggccgcagggacgctcaaggtcagcagcgtctgtgcttcaactgcttcgagcctgggcactttgcggataaatgcccaaagccgaggtgccagcaaggccaagcgcctccccgctccaacaacggtggtaaggatgtcattcggggtcgtgtgaaccacgtgacggccgagaacgtgctgacaactccagacgtcatcgttggtacgttcctcattcattccatccctgctaccatttttgtcacgtcccaaaacgactctaaaatacatcctctaaattatgcctagaataattaaaatccgtgtgaaagccttcaacaaataaaatccctaacctcgccggcgccattaatggcggccgggtcttccgcgcccgtttccccctcctccggccgccctctctcacccccaacccta

SEQ ID NO: 52327 - DNA, 870 bp, Oryza sativa
  Clone ID: PAT_MRT4530_54634C.1
aaagtggaaaaaagcgggggaaaggagaaaaagagaaggggaaaaggaaaaaaggagaaaggggggaaaaaagagaaaagggggacgagaaacggagggcagcgggtggaagggggaggaaaaaaaaaagtgaaagagagtacgaacataaacgaaaaaaggcaggggaacaggaaaggaaaaggggaagccccaaaaaatcgtcagcggagaacagaaactccaacgaggttacgacgactgagaaggggcggacgaggacggcggcgacttggcgatgacgacggcggccttcccgagcgacggcgacggctggaacggcgggcggcgcacggcctggagcggcggcggccgacggcaaagctagggccccacggcgctagagctcttccggcgacgagaggcgaaggccaagggtggcggcggaaagagaagagcacggggatccttttaaaggggctcggaggcggccgtcgaaggccccccgccgacgccaaacggcgaaagaaacctcgcggctggaaaagagggaccccgtatccggaatcgaacttgattccaacgctttccaaagcgatttagccgatgattccaaagagaaaaaggtagaggagatcccgggagattgtttcccctcaaccaattcggccgtagaaggaaagaggcggccggatttggaagggaaacggcggcggcgcgaactagggtttcggcagcggcggcggctcggggaagacgaacctgacaggtggaccccacctgtcagcggcagcgggcgcgcgcgcggcagcggactgggccggctgggccgaggagagagagaagagaggttttgggccgactttcggcccaaagccaaaagaagacttt

SEQ ID NO: 52328 - DNA, 1140 bp, Oryza sativa
  Clone ID: PAT_MRT4530_54635C.1
tcagtccttttccatcacatcaaccttataaacttcaccgaatcccccctcaccaatcttcttgcttttgtggaagttatcggttgccacttgcagtgatgtcagagataacagtgctgacttgacactttcaaaatcctcggttctatcaggtctggagtctgcttttgccaatcttctcttcttacgcacattccagatacaaagggaaattgcagctacgatggcaactgtcactgcatttttgcagtgaaaaataatgagttcaagtacgtgaagaactcccgtaatggcaggcacaacatccggcgccggcgtgagcccgtcggccttgaccggcaacagcaccatcggtctgccggtatagaaggggcccggccccagctcggacctcagggagcagcgcgggccggagaccctcgcgccttcgccgttccgcgggaacaagaaccccttccaccactggtccacgaggccgtcgaggcagctccggcactgccccggcgacaggtccggcgagcactgcgccatggagtagatgttacggaaccccgggtcggtgcccacccgctggcccgtggcgaacagcctcgtggagttctccaccgcgtactgcacggtggcgttgaggagctcggtgaccgcgcggtcgtagcccgcgacgtcggtgctgctgatgttggtgccgctttggagggcgctgtactcgccggagttgtcggtggcggcgaggaagtcgcccttgtcggagaactgggcgtagcattcgttgtagacgaggatggcgtccttggtgcggttgcaggtcggccccgcgaccgcgtccctcgagacgttggtgccacagccggcgcagtcggaggagctcaggtcgccgcggcagagcaagaggccgtagacggtgtccggggcggagccgagggcgccggaggcgaagagggtgggcgaggaccccgaggaggcgttcgtgcggaggatgagcgcgaggttcttgaggttggtttcgtaggtgctccctgctgtgaacgtgccgccgttgccgcatttcggccacggctgggcggccagcgactcgaggagcgcgaccgccgcgaagaagagaacggcatggccgacagacgagcgtcggcgtcgcaacat

SEQ ID NO: 52329 - DNA, 104 bp, Oryza sativa
  Clone ID: PAT_MRT4530_54636C.1
ctagttgatccccgggctgcagttgtgcagatctgatctgcacgctcagcttgaatgatgtgaagtggctgcagagcatcactgtcgctgcctgatcctcgtca

SEQ ID NO: 52330 - DNA, 848 bp, Oryza sativa
  Clone ID: PAT_MRT4530_54637C.1
cgggtcgacctatcgcgtccgcttcattttactccttccccattaccggcaaattgctgcttagaaaaacctatcatcatatgtgaacccctcgtatggtgtgtctcccttaacaatctaatagcaaagtaatacctcacgacatctatttatgccatgggagagcaacatcgatcctatgtgttcctaaaaactcattctgaaggcattggtgagtggggatattgtctggtaaggatgaagctaatcagcaaatataattgattagcagagtatctgcaaaattatcttgagctttttttgtgctggcaaatgtgatgagttctactgcgagatctaaaactgttgtttctgaaaagaaacccctcatcaaattcgctctgaatgttccaagggttgcacaaacagaagcccttcctggatttactaaactgcttgcagcgaaacaagacaaatggattttactaaactgcttgtcgtccatgggttgcacaaacagaagcttttactgaactgcttgcagcgaaacaagacaaatggattttactaaactgcttgtcgtccatgctgcgtttgtttgtacatatgagacaacatctatatatctgctcctttacagactgctgcctgtaaatttatctatatgtaatgaacctatctatcactatccgccttgttagttccctcttgtgtgcttgatatttggttttctattcttcccctattgttgtgccctagctgtctacaggcggcgcgccattggcgcgtcccaccatctagtaatatcaatagtcaatacagacagggacagcctgttatcaggcactatcatccgtacattgctcgtg

SEQ ID NO: 52331 - DNA, 671 bp, Oryza sativa
  unsure (1)..(671): unsure at all n locations
  Clone ID: PAT_MRT4530_54638C.1
tnntttcncnntttttctttntttttttttttttnnttttttattggaatcttttttttttttttttttttgctcgaacggaagcagcatatatatatttctgcaagcagatgatgccctaaattgcgctaaattcatagcaaaccccgagtagtgattttttcacggcattatggccaggggttagcttagtaagaaaattacacgaatagagtacagaggtgtggttttggtttcagtaaggcatgacatggatggtgcggctgtcgtaggcggcggcgaggcccttcctttcctgctccatcctcaccgcccggagcagctcgccggccatccgcgacgtcgacggcgagcaatccccttgcatcaccacgagcagcttccccacggcctccggcgcggacgccactgcctccctcatcctccggtcgcctcccccggcgcagcaggacagccacagcactgccacggcgaactcgcgccccgccggcccgacccggatcatccgcccatcacggccgcgatacctccgccggtcgggccgatggccgtttgccatcggtgcagcgggcggcctctaccagtagccccaggggcggactccgccacggccgtgggcgccgccgcagacggcagcgcgagcgccgggatggcgcctgccggaccatcga

SEQ ID NO: 52332 - DNA, 594 bp, Oryza sativa
  Clone ID: PAT_MRT4530_54639C.1
ccccgggctgcaggaattcggcacgaggcactctgaatcaggtctcctagactgccaaatagggataacgatgaaaaatctatcaatataaagcaaccatggaatactaacattccttacaattttagcattaatccaatagtgaagaatgcggtttcttgtcatacggagcatgacttgcatggaaataggaagaaccaagcacttattggctttaattttgagtcagtaactaatccatgtgaagcatattgtgggagaagtacttcttcccttgatgagtttgaagtcagatctgcaatggctgtacagtccaatgctcaggcttctaaacagtttgattgttccagcaagcttcttcaatcgaagacaacaagtcatgcttatcttacttccccaggagacatctcagcacaaacaaatcttctagaaaatccttcgggtggggcattctgggagaaatcattagagtacactgctaaatcaatggaaatagctggagataccacttcatcatctgatatgccacttgatatagctattgacaagtgcattatacaagaagttttgctgcaatataaatatgtaagcagc

SEQ ID NO: 52333 - DNA, 316 bp, Oryza sativa
  Clone ID: PAT_MRT4530_5463C.1
cctcccgtctccgcgacctcgcgacggccctccaaaaatcctcccgcccgcgctgggccatgccaggacaggggaccgccaccgtcacgccgccacgagggtcgtcgacgccgacaggggaccgcccccccggggagcaagaagaggaagtgttgctccaagagaggagaaccagaccaaggacgaacgcttcgccacagcccatgcgcgctcgtagaccacccaccaaaaccagcgaaggatctgatccccacaacccaacagtccttttagttccctttcgtctccttgctttcaaaaaagaaaatctatacca

SEQ ID NO: 52334 - DNA, 2202 bp, Oryza sativa
  Clone ID: PAT_MRT4530_54640C.1
tttttttttttttttttttttttttttttttttttttttttttttttggttttaattttttacattcatacgggccaaatctttcaataccactataactggtgtacataaagtatttcatcagaagtgcagttcaactgctgaataagcaggtacagagctgaatatcgatggtttacaaattccctctccagcttatccagagtaggatcttatcagatacttctgagctgatatctcagcgttatcagaggacagctgaagtaaaagcttgagatatcaagtatcatgatgtctatgtacaaagccatgtttaagatctatcaattacataatactagcacactttgccgtacaccaacctacctatgttttcttagcacattgtacgagttctcatcaaccaaaagctgacgcggtgcaaatcatgatgcagaattgtggataaatctgagaacaatccatcagagttcagatgataaatcagaggacggtgaggctctgctggtgagtgcaggcctcatggtgaccaaagcagattcatttgcaccagctcttagagcaatcctgccagcttccaaaaatctagcaacagcatcctctgcatagcggtttgcttcacccacagtcatagtcctgccaatatctgggtaggtgttgagtacatggtcaccattgagctgagaagcaagctgaatcaactccacttgaaactctgacagagatgaatcttccttagggccaaacggttgcagagactttgtgacctctgggagtttctctggacaatcagttctgggtgttttccggattttgaagtagttctcaaaggtcccagcccatgcatccctctttgtcaggaagttagaatgtaaattaaatagcttctttactgttgcagggatggatgagtgctcatattgtgaggagtcctgcggcccatttggttcatggatcacagtgcgcttctcgatccatggtgagataaggaaagaaggcacgcgcactccaagccgatcaaacttgaagtagtaaggatcagggccaacaattccatcaggctgtggaaccccgacaaccggcgtaggcacatggtcatagaatccaccatgctcatcataggtgatgatcagagcagtctcgttccactgcggactcgctcgcagcgtctcatacacctccttgacgaacctctgccccctcgctacgtcgtgcgaggggtggtcatcgtttgcagggaacatctcgcaatcgaagtacctctgctcaatcaccgcgtaattcggcagctttccccacttggcgtgaagcttgaacttgaggctgtactggtggaacttgacgaggtgcttgaggcggcggaggctctggtagaagagcgtggccgggatgttctggtagtagatgccaaaggacaagccgttctcctcgaggctatcgaagatggtcttctgcgggaagccatggatgaggtccttgcgggcattgaaggtgaggccatgggaggtcgcggaatggacgtagaggcgattgggctgggtggaggtgggcacggaggcgaaccaccggtcgaacacggcgaactcgtcggcgagggcggcgtagaccggcacggactccggcttgaacccgctcatgacgttctgcggcatgccgaggcccatcccgcgggcgttctgggcgaagccggacatgggggccggcacggcggaggtgtcggcggagccgaagatctgctcgcggatgtcctcgaagccgtggccggggtcggagtcgacgtagccggcctcgtcggtgacgaagatctccggggaggaagggtcggaggcgttgaggcggttggattgcgtgccgttgagcccgtcgatgtcggggcgggtgcggctgagccacccgaggatgtggtcgaagctccgattctccatcaccaccaccaccaccgtcttgatcggcgagtggatctcgtgcttccgccgccgccgcttcagcccgcggtggtgcgtgctctccaggcagtgcccggacaccaccagcgtcaggagcagcaccccgacgagcagcctccccccgccgcgccgctccctacctcccccgcccgccatggcgccggcgtcaagctcgctccctcctcctcctcctcggcggcggcggcgaggagttggtgttcggcgagtggtttgctttgcttttgcgtgtctcctc

SEQ ID NO: 52335 - DNA, 1926 bp, Oryza sativa
  Clone ID: PAT_MRT4530_54641C.1
atggacgcgtcgatcggcgatccgaggctgacgtcggtggaggcggcgttcgagaagaacccgctgccgggcttcagctggctggtgacgccgcgggccatggccgtcgcggtgctactcgggatcgtcttctgcttcgtcggcatgaggatccagatgatgaccgggttcgtgccggcgctcaacatgcccgtcaccgtcctcagcttcttcctcctcaaggtgctcgccaggcagctgcagaagtggcgattgaccgtggtgcccttcacgcgccaggagaacatgttcctcatcacttgcgtcatcacctgccttaacctagccatcactggtggtttcgcaaccgctctcactggaatgggtactatagtggccaaaacacttgctgatgatctagatccaagagatattatcgactatataccaacaggaaaattgattatatactttttccttattggtatggcaggggtattgtctaatattccattaaaccagatcatgattatcgactaccaattactattcccaacaggatcggtcataggacaccttattaatagctttcacactcctgaaggtgcttatatagcaaaattctacattgatttctctgcaacatatattggtgtaggaatgatgtgcccacatatagtcaattttgggttacttttcggggccatcatctcttggggatttctatatccttaccttgaaactaaacatggggagtggtatcaaactgatagcccttcaaacttagacggactcaatggatacaaggtgttcatcagcgtgacactgatcgtcactgacggcctgataaactttctgatactcgtgacttcagctgcaattaacttctaccatataaggcaacagcaacagcaaacgtcagggctggccagctacatcagcaagaaccctagcatgaactacgacgaacgcaaaaggatcgagatgttcttgtccagcaagatcccaatgttcgtgccggtggcggcctacgtcgcatggacggccatcagcatggtcgcgatgccggccatgttcgaccagatcaagtactaccacgtcggcgtgctctacctcgccatacccgtggtcggcttctgcaacacctacgcgacggggctcaccgactggtcggtgtcgaacacctacgccaagttctcccccttcatcttcgcggcgtggatcgccaggccgggcgccatcgtcgccagcctcctcgtcagcgggatcaccatggcgtcgctgcacgtctcgtcgcaggcgatgcaggacctcaagtcggcgcacatgacgctgacgtcgccgcgcgccatgatcgccgggcaggtgttcggcgtggcgctcagctccgtggtcagcccctgcatcttccgcgcgttcgagaaggcggcgaagcccggggcgccgctggggtccaaggactccgtctacccgtgcccctacgccgggctgtaccgcgccatctgcatcatcggcatgggaggggtgaagggcctcccaaagtactgcgtcgagctctgcgtcatcgccgtcctggtgaccatcgccatcgacgccctggtgctggtctcgcagctcaaggggtggaggctccacctctacatcccgagcatgacggtgatcgcgctgccgttcttcgccgggtcgtacttcaccctcgacatgtgcctgggcggcctgctgctgctcctctggaagaagatcgacaccatgagcgccgagatcctgtcggccgccgtcgcagcgggcttgatctgcggcgaggggctcttcacgctgccatcggcgttgctcaacatgttcaaggtgctaccgccgatgtgcatgaagttcttgcccagtggacaagaggttgaggtggtggactcattcctgaacagctcgggaggaacagtacccaagacatga

SEQ ID NO: 52336 - DNA, 441 bp, Oryza sativa
  Clone ID: PAT_MRT4530_54642C.1
atgggcaactggcataataaacaacacatgggaatatcaaagatcattcgtagacagttcattggcgtcaggatgggcaaaaacaatgtgtactttttccgtgggtgcgggagcccgtgtgcgcgtagcccgaccctggaatctccgggggacatctatgccatgtgggccctacggccagaaaggtcgtggggcccacggggattgacgcaacgagtcctcggtggcggcttcgcggccgcctgggtcgctgtcggtgggcctcgtgggggtgaatgctggggcccactcgtcctcgttgtcctgctgtgtggggcccactcgtcgatgacacgtcggacccagcttggtgggcccgtcctagtagagctggacggtagtggttgccttttggcttcaaaccgaggttgctacccgcgaatcctcagccgtggatgttga

SEQ ID NO: 52337 - DNA, 2265 bp, Oryza sativa
  Clone ID: PAT_MRT4530_54643C.1
cggtaagagctagcaggaggagctttgatcgccaggcgccatggacgcgtcgatcggcgatccgaggctgacgtcggtggaggcggcgttcgagaagaacccgctgccgggcttcagctggctggtgacgccgcgggccatggccgtcgcggtgctactcgggatcgtcttctgcttcgtcggcatgaggatccagatgatgaccgggttcgtgccggcgctcaacatgcccgtcaccgtcctcagcttcttcctcctcaaggtgctcgccaggcagctgcagaagtggcgattgaccgtggtgcccttcacgcgccaggagaacatgttcctcatcacttgcgtcatcacctgccttaacctagccatcactggtggtttcgcaaccgctctcactggaatgggtactatagtggccaaaacacttgctgatgatctagatccaagagatattatcgactatataccaacaggaaaattgattatatactttttccttattggtatggcaggggtattgtctaatattccattaaaccagatcatgattatcgactaccaattactattcccaacaggatcggtcataggacaccttattaatagctttcacactcctgaagaatgcaggttatgactattttcaaagtattttttggtagtttttcttggtctatattccaatggttctattcttcaggcagtggttgtggattttcaagctttccaacgtttggactggaactatataaacgcagattctacattgatttctctgcaacatatattggtgtaggaatgatgtgcccacatatagtcaattttgggttacttttcggggccatcatctcttggggatttctatatccttaccttgaaactaaacatggggagtggtatcaaactgatagcccttcaaacttagacggactcaatggatacaaggtgttcatcagcgtgacactgatcgtcactgacggcctgataaactttctgatactcgtgacttcagctgcaattaacttctaccatataaggcaacagcaacagcaaacgtcagggctggccagctacatcagcaagaaccctagcatgaactacgacgaacgcaaaaggatcgagatgttcttgtccagcaagatcccaatgttcgtgccggtggcggcctacgtcgcatggacggccatcagcatggtcgcgatgccggccatgttcgaccagatcaagtactaccacgtcggcgtgctctacctcgccatacccgtggtcggcttctgcaacacctacgcgacggggctcaccgactggtcggtgtcgaacacctacgccaagttctcccccttcatcttcgcggcgtggatcgccaggccgggcgccatcgtcgccagcctcctcgtcagcgggatcaccatggcgtcgctgcacgtctcgtcgcaggcgatgcaggacctcaagtcggcgcacatgacgctgacgtcgccgcgcgccatgatcgccgggcaggtgttcggcgtggcgctcagctccgtggtcagcccctgcatcttccgcgcgttcgagaaggcggcgaagcccggggcgccgctggggtccaaggactccgtctacccgtgcccctacgccgggctgtaccgcgccatctgcatcatcggcatgggaggggtgaagggcctcccaaagtactgcgtcgagctctgcgtcatcgccgtcctggtgaccatcgccatcgacgccctggtgctggtctcgcagctcaaggggtggaggctccacctctacatcccgagcatgacggtgatcgcgctgccgttcttcgccgggtcgtacttcaccctcgacatgtgcctgggcggcctgctgctgctcctctggaagaagatcgacaccatgagcgccgagatcctgtcggccgccgtcgcagcgggcttgatctgcggcgaggggctcttcacgctgccatcggcgttgctcaacatgttcaaggtgctaccgccgatgtgcatgaagttcttgcccagtggacaagaggttgaggtggtggactcattcctgaacagctcgggaggaacagtacccaagacatgaccgatcgatgttgagatcaagttaatatatgcactcatcaaattaagattgactgttagtactccttaattggttaccacatctcggtggaaattaagtggtctatgaatcattattgatcattgtaaataatgatgcacgtatcgtattttacatatatatatgtcatgtaattgacat

SEQ ID NO: 52338 - DNA, 952 bp, Oryza sativa
  Clone ID: PAT_MRT4530_54644C.1
ctacttccgcctccgcctccgtctccgcggattcttcgagctcccggatatggctgaacccgaggtggtggttgccgcaggtggggaggcgatggaagccgaggcggcggagccggctgcggcgaatccgagtcagaagagggagagggaggagggggatgactccgccgccggcgctgctggcgaggaggcggcggagggagctgcggccaagaagcagaaggtggagggggagggggaggcgaagggagcggaggatgaggcgaagggggaggaagaggagggcgcgaaggaagaggaggcgaagccggtgaagctgggacccaaggagttcgccacgggcgtcgagatgttcgactacttcttcgccctgctccactcgtgggcgccgcagctcgagatcaacaaggttctcatgtatgagcatatggtgttggaagacctgctgaagaaaggccatgctgagtccgataggaaaattggagcaggaattgaagcatttgagatccgcaaccacccggtgtttcagagccgctgtttcttcgttcgacgagttgatggatcctctgatgatttcagcttccgtaagtgcgttgacagcatacttcctctcccggaggacatgaagattggcaataagtccaatggcaagaagggtggtggccacttcaagggcggtggaggtaggggaggaggacgaggtggtggccgaggtggcgggcgtggtttccgcggtcggggtaggagaggcaactaaaggactcaataaaaccccgaaattttttgcatgcctaataccaatccttaagattgaggcattcatggcaacatgtgcttgtttgtctgccttctcctagagggactgatgctccactcacttgtgtactgtgaaagtgcaactatgataagatctcgccgatctgtcttcccataacaaaaaaaaaaaaaaaaa

SEQ ID NO: 52339 - DNA, 627 bp, Oryza sativa
  Clone ID: PAT_MRT4530_54645C.1
atggcggcggcgctgccgcggctgtgcgcgctggcgctccccttcctcgccgtcgccgcctgcctcgacgtcccgtcccacggcaccccaaagctaacaaacaaatgtgggcattgcaagaacaagctggattttggcaaagaatttgtatgctgctctgattgctctgacccaaccattctgatcaagcatagaaaaatgggttactgtaagagtggtgctgagctatcaatgcagttaaaaccacacgaaatctatcattgggttgctggaccatggatgaagtgctcctcgccatgcgatggtggtgtgcggtatcgtgatgttgcttgttatggaaatttatctgatgccacaatcaaacattatcctgtagatgatgctagctgttcagcagatgaaatgcctgcaagacaggaagcttgcaatgagcagagctgtggtgtcgacatggcagagcaaacaaattctaggaagaatggaatgtctggttggttggtagcacttattcttcttctagggcttggtgctattgggggcattgtatttacaagctacacttactacttgaggagaacctctggacgaaatggttttgtgtatgtcatgatggaagcgtattcttga

SEQ ID NO: 52340 - DNA, 525 bp, Oryza sativa
  Clone ID: PAT_MRT4530_54646C.1
ctttgttatggctttaagataattgatatcctaactagctcagctattgcacggcatactgcatctcttgctacttatgcgagaaacaaaatgctggaattgaagcatagcaatgagaaaaatgtttgcataatctatggacaagattttaaggcaaattatctgaaaatgggtccttcaatcacattcaatttgaaaagagaagatggcacatggtttggatatcgcgaggtggagaagcttgcctcattgtcaggaattcatttgcgtacgggctgcttctgtaaccctggtgcatgtgctaagtatgttggtttgtcacactcagatctagtttccaattttgaggctgggcatgttctgtgggatgataatgacgtaataaatggaaaaccaactggtgctgtgaggatatcatttggctatatgtccacaaacgaagatgcagaggaatttcttaagttcctgcagtcatcttttggtgccacacctgcagaattgaacaatggctacatggtgaatatg

SEQ ID NO: 52341 - DNA, 705 bp, Oryza sativa
  Clone ID: PAT_MRT4530_54647C.1
ggatcccgggctgcaggaattcggcacgggccgcaccctcccccaccgcatcccccttcgtcctcctcctctctcaatctcggcggcggctcgcatccccgacccgtctttccctccacctggcttgcttctcctcgtctgcgatgacctctcccacacaccatcctatgcctcctaccgtctcgtcgcccctctcccacttcgttgctgctcctaaccaaggatgcaccacctttagatctgatgttggaggctagggttggcttggcgtggttgcttgcagcacgacgcggatgagcggcggcggcgcaacagttgggagtggtcgccggtggggccgcgcggaggcagggtcgacgcgcagcgtgcgggcgtggcagcagcgcgcgggctttgacgctgccattgtatttgaagaaaaaaaaggccaggttgtatctcttatggtttgtggttgcaatggaacaatcgatctggtaaaaaagcttgccattgatccttctgctgataacactggctttgggcatggtcaagatggttcaaattgttgtagaagagctgatccagcaccgagcagtcagttgccatcaccaccattggttctttcattttttttaatattcacatagattattagctttaaaatgccatatcaccttttttgttgagtcctaggaaatttttgtctgaatgacatttatggaa

SEQ ID NO: 52342 - DNA, 450 bp, Oryza sativa
  Clone ID: PAT_MRT4530_54648C.1
tcgagagccaacaacgatcagcttcattctggttttggtttatttctaccttggttattttattaggataggaattaagcttggttaattattccgtctacccagatggtcaaaacaacaaggcaaccccttcttaaggaaaccaaaaaagggggtggcccaagggtgaacaacaagaccgtgaatttggctggaaggtttattcgcggggggattttcaacgggggcaagttccaaccaaaggtggcccggaaggggggccgtattaaccggggccgccgggggattcggaaaggcaaccgccggggagttaataaggaccggcgccaaggggatcttaaccgacgtaaacaacaacttgggccacgccgggggggcgaacttcggcccgaacgcaactaccgcccgctgcaacgtcgccaacaaggccaaggtggccgccgccgccaa

SEQ ID NO: 52343 - DNA, 339 bp, Oryza sativa
  Clone ID: PAT_MRT4530_54649C.1
atggctcgtatgatcatcacaggtgctgtagcatttcttttcctagcatcgttggtagcttcccagagtgccgacgggcctgtaccagctgttgagaactcactcttgagaacttacatagatatgcagcaaatccacaaccacaatgtcaaacagttctataatttgcaaccggcggcggcagagcccaattgctgcgtggacttccactcgtgggccaagaacaccggctgcagccctgagcagagcgacgactgcaacacatggtgccagtcacagtgccgcggcggcgagtgcaaaccccgcggcggccgccacttctgccactgcttctgttag

SEQ ID NO: 52344 - DNA, 307 bp, Oryza sativa
  unsure (1)..(307): unsure at all n locations
  Clone ID: PAT_MRT4530_5464C.1
ttgggaaatgctcnnttttgntgttntcgcaaacgattcntgtgnacggcctcatgaattctgtntnggttttcatncttcanttttacnagtntcgcaatntntgtgaaattananatangggnntngcncacntgcncatgcnatgcngtngtttttttttcctngnaatagtagnantagttgtatattanncatagnatcagattgtacngaaagcatgccagnaaatncgaaaaaatgtacagacagnattttgttcgnntcaagggaaaacttgttttaaanaaaaaaaaaaaaanaaaaa

SEQ ID NO: 52345 - DNA, 677 bp, Oryza sativa
  Clone ID: PAT_MRT4530_54650C.1
gcacgaggactgcgcggtgcggcgggccagcgcggtgtcgctcgccgccgacgtgctcctcgtccgcctctgctcgctctccatcctcggcctcctcttccgccacctccacatctcggtgcccgtggatcctcttgaatggcagatttctcaagagatggcgaatagtatagttgcatccttggctaacacaatcggagctgctgaatctgtatggagggtggctgcgactggacatgataagaagctctttttcaaggtggtttttactctgtattttctagcagctttggggagggtggtgtcaggcgccgcagttgcttacgccgcgctctgcatcttctgcctctacatgtttgcacaaagcactgatcttttcgatcagctcccttcttgggttcccgtaggaagagattctcttggcggctctcaggatacaacatgattctgtacatcagctagtttgtgtgtacgatcgactctgcaggtcaatatatagcttcttgaactgtatgtatagcatctgttgcttctttcacggctcacctctgcattgcagttgttcatggtgtcctgtaacagcagcatcacctctgtatatcatatgctgttgctagcaactttgtggaaaagaaaaatatcatttgtggttctaaaaaaaaaaaaaaaaaaaaggg

SEQ ID NO: 52346 - DNA, 393 bp, Oryza sativa
  Clone ID: PAT_MRT4530_54651C.1
atgaagattcatgcattattgtggaaattaaagctagaggacctcatcattgatgttgaaggcaagtttctcttactcgccaatgacccaaccgaagaaaaatcgaaatcacatgagatgcaaatcgcgcgggtataccgtggcgtcctcgtaggcgcgttgcacactagtactcctatacggataagaccacctccccatagccagaggcagggaccatggcgacgaaaaagagaaggagaaagaaaagggaaaggagaaaggaaaaaaattgagctggccggtgcggtggccgtggatttggggacagtggcctggatcggcgtggccactgtcccccggccgctcgccgccggcgccggtggcgctagcaaagctgcgtcgtcgaggctg

SEQ ID NO: 52347 - DNA, 525 bp, Oryza sativa
  unsure (1)..(525): unsure at all n locations
  Clone ID: PAT_MRT4530_54652C.1
gaaaagagacaacacgaatgcgaaaaaaagaanagagacatanaagngcctcgatgcgatacgatgacgagnagaatgacaatgcaaagcagaagatanacgacagagtagacgancnaatcgcaagntgncncacncagagaaagcgnagagatcgcgatgggcaagtcactgcncatgtccnggaacgtagcgaggccagcgatgaagccaggcnggagntcaagcgacgcgntcgcacatgtatggatcngcatggtaaccaggctacatgatccantncgtcgcaacgagngctcgagagcaacgaccagtcacggcggaaatcgaccatgcngccacagtagcgcggccatcagtacgctggaatgantgaccaggatgcccagancctgggatgctgcggcacaagtcgagctgccagccgcaccgatcgactaccacgcacacaactccacaatcgtctcttctcgctgactacaaccgcagancaccaaagcagcaacactcnactccatgcgncnc

SEQ ID NO: 52348 - DNA, 534 bp, Oryza sativa
  Clone ID: PAT_MRT4530_54653C.1
atggcgatgaggaagccgggggactggagctgcaggtcgtgccagtacgtgaacttctgcaagagggaggcgtgccagcggtgcggggaggcgaagctcggggtggagcggacggactacgccgccatgggcggcgggtgggaggtgaagcccggcgactggtgctgccgctgctgcgccgtcaacaactacgccagccgcggcagctgcttcaagtgcggcgccgccaagaacgactccgccgccgccgtcgcccagggctggggcttctccgtcgcctcccaggccggctggaagaacggcgactggatctgccccagaatggaatgcaacgtgcagaactacgctaacagaaccgagtgcttccggtgcaatttccccagatactacgggtctgatatgatcaatcttgggttaagcattggtgcctttgcttaccctgaagaacagagagaggaaggcccaattggtgttgcattgtcccctgtgcttcctttctttttgtccctggttcctgcatgggagaaagggtag

SEQ ID NO: 52349 - DNA, 288 bp, Oryza sativa
  Clone ID: PAT_MRT4530_54654C.1
cactcactagacgctcagcctcgcctcggccggagatgctggccccggtgggatcgtcggaggcggggctcgactccccacccagcaccacgacctacgcaaccatagacggcctctgcttctcttggccgaatccgaactctattaatgctagcttgccttccgtcctgttcctgctgactacggccacggaggcccgctgaggaggagggtggccgtgagaaccgcctcctagctagacgcagcagccttcgccgacggcagcacgccccagtggtgggtatgcat

SEQ ID NO: 52350 - DNA, 1327 bp, Oryza sativa
  Clone ID: PAT_MRT4530_54655C.1
gctcgaagaacacccccaaaacctcctcgttggccgtccagtgcggcggagagagagagggagggaggaaggaggccgccgcgcgatggggggcgacctgtacgcgctcgacttcgacggcgtcctctgcgacagctgcggcgagagctccctctccgccgtcaaggctgcgaaggtgaggtggccatgggtgtttgagcaggtcgacgctgccatggaggagtggatcgtggagcaaatgtatacccttcgcccagtggttgaaacaggatacgagaatctgttgcttgtcaggttgcttattgagattcggataccctctgcccggagatcatcggttgcagatgggcttagcatccaagaaatactggagaactggttaaaactgaagcccacaattatgagtgaatggaatgaagatagggactctctagttgatctctttggcagcataagggatgactggattgaaaatgacttgtctggttggataggtgctaacagattttatcctggaacagccgatgcattaaaattttcaagttcagaagtctacatagtcactacaaaacagggccgatttgctgaagcactattaaaagaattagcgggaatagaatttccctctgaaaggatatatgggcttggcactgggttggtgcagtattttttttattttttattttcacctgttaatcattttattgaatccgtgagtttatgctccagtccaaaggtaaaagttctccagcaactgcagcaaatgccacagcatcaaggcctgacacttcagtaagcccctattgatttaccgattaaatttgagtacgagatactattttctcttgaaatgtttctgttgaacaatatttccctcctcatcaattgcctggcacggaccttgctagctggaattgccctgtataacttttttgttttttcgtttttactccttgaactgatggtttatccttacactagaatggaaatccagtgagagaattattaaaaaaaaaagagcgaaacccacgcagttatctgccgcatgctgttcgctgctctgctcctcgctggctcttctggtgcccctcctgctctggtgcttgtcctctctctcgctacataccttcctctgttcgccctctctgtggcacctcctgtgcttgcgctggagagctggccacttccccagtccccactgctgctgacctccgactgatcctgcacaagcttcactctgtatgtgagcttctgcggatggcgatggaagggaactatgtggcggccatggggatgcgaaggctggagaactccatgaccttgatgc

SEQ ID NO: 52351 - DNA, 1026 bp, Oryza sativa
  Clone ID: PAT_MRT4530_54656C.1
atggggggcgacctgtacgcgctcgacttcgacggcgtcctctgcgacagctgcggcgagagctccctctccgccgtcaaggtcactccacgcgcttcttcttcctttcgccccgtttcttggatgggtccatccgttcgtgcattgatgatggctgcgttggttaggcaggctgcgaaggtgaggtggccatgggtgtttgagcaggtcgacgctgccatggaggagtggatcgtggagcaaatgtatacccttcgcccagtggttgaaacaggatacgagaatctgttgcttgtcaggttgcttattgagattcggataccctctgcccggagatcatcgctttatcagatgtttatgccaaggttatattgcaaggttgcagatgggcttagcatccaagaaatactggagaactggttaaaactgaagcccacaattatgagtgaatggaatgaagatagggactctctagttgatctctttggcagcataagggatgactggattgaaaatgacttgtctggttggataggtgctaacagattttatcctggaacagccgatgcattaaaattttcaagttcagaagtctacatagtcactacaaaacagggccgatttgctgaagcactattaaaagaattagcgggaatagaatttccctctgaaaggatatatgggcttggcactgggttgtccaaaggtaaaagttctccagcaactgcagcaaatgccacagcatcaaggcctgacacttcagatgaaggctgtgagcttggaggcggaggagctgttgctggtgcctctagtgttgatgaggaggttaggccattgggtttcaccagtttcgttgaggaccgtcttgcaactttgaagaatgtcattaaagagccagcactggaccaatggaacctctacctggtgaactggggctacaacacaccaaaagagagggaagacgcagaaggtatatcaaggatccaggtcattgatctccctggtttcagccaaaagctcaaatag

SEQ ID NO: 52352 - DNA, 254 bp, Oryza sativa
  Clone ID: PAT_MRT4530_54657C.1
ccaaattacagggggggcctaaaaaaagatggcctaaccccgcataactaacagaagggggcccaaaaccccatcagattacttttaaggggcctcaataatgggaacaacccccacaagagcgctgagtattacaggccctaaaaacacgggggggtgcatataaatgacacaccttaactgtaacatctttagcaccttctggccaagaggggcggtccttaagggccttttcctggtggctaatggggggg

SEQ ID NO: 52353 - DNA, 563 bp, Oryza sativa
  Clone ID: PAT_MRT4530_54658C.1
tttttttttttttttttttttttttttttttttttttttttttttttttttttttttttttttttttttttttttgtttttttttttttttttttttttttttttattttttttttttttttttttttttttttttttttttttggggggggaaaaaaacccacataattttttcccccccccctttattatcaaggaggggggggggggccttatcctaaaaccacaccttttccaggggagaaaaaccctttttcgccggcccccaaaaaggggggcaaaagaggggaaattttaaaaccggcccggggcccccaaaaaaaaacctttccaagaaggcaaaaagtcccccccccaacaaaaaaaaccgtggctggggggggggttatcccctgggaaaaaccaacaacaaaaaaaaaacttttggcccccttatggtcccccaacccgggggggaaaaggaagccccccttgcctcctttggggggcccccaaaattttaaaatgcccccccccttcggggagaaaaatattttattgcgcgggggggcccccccccctgg

SEQ ID NO: 52354 - DNA, 123 bp, Oryza sativa
  Clone ID: PAT_MRT4530_54659C.1
atggcgaagactatggagcaaagacagcgaagggcgaagaatcgcgttggtatcccgcagggtaacttcaccatgacaagtcgagcttcggggaggcccaaggggatatcccggtcgctctaa

SEQ ID NO: 52355 - DNA, 2136 bp, Oryza sativa
  Clone ID: PAT_MRT4530_5465C.1
atgaggttgactgctggacctacaccaataatccaactagaaaacgagcagtggccagtggagatgtggagcaaaacgatgctcgttgtgttcatcaatatcgtgttcatccactgccttagcgtgaacattggagcggcggtggccaaccctgcagccagcgatggccggttcgtccaccacggcttcacggcggaggacctcaccatggacggcctcgccgccgtcacgccgaccgggctcctcgcgctcaccaacgccacgtaccaaacgaaagcccacgcgttccaccctgcgcctctccgcttcctcaacacgtcgtcgtccgccgccgccaccgtgcggtccttctcgacgtcgttcgtgttcgccatcgtgtccgacgaccccaggttcaggaacaacgtcgaccatgggctcgcgttcgtggtctccccgaccaagaacctctccacggcgaacgccggccagtacctgggcctcctcagcatggccgacgacggcaagccgagcaaccacgtgttcgccgtcgagctcgacatcatcacgaaccccgagttcggcgacatcgacagcaaccacgtcggcgtcgacgtcaatagcctcaggtcgctgcaggcgaagaccgccggctactatgtcgacggcgacggcgcgttccggagcctgcagctcaacagccagaagccaatgcaggtgtgggtggactacgacggccaggccaagcagctcaacgtgacgctgtctcccgtgcaagtgcccaagcccaagaagcctctgctctcccaagccatcgacctctccacggtcatggccgaggagatgtacgtcggcttctcgtcggcgacgggcgtcgtgttcacgcaccactacgtcctcggatggagcttcagcttcgacggcggagctgctccctcactggacttctccatgctgcccaaggtgccacgagtgggtcctacacgtcggtcagtaatgctgtatgttgtgttgccgattgccagtgcactactgtttcttgttgcgtttgttctgggtgtcttcttcgtgagaaggtggcaccggcagtttgcggaggtgcgcgaagattgggaggttgagtttggtccgcatcggttcacatacaaggatctgtttcatgctacgcagggattcacagacaagaacctactcggtgcgggagggtttgggagcgtgtacaagggtgtgcttcccgtgtccaatacagagatagcggtgaaacgggtgtcacacaattcaagacaagggatgagagagtttattgctgaggtggtaagcatcggccgtatccgacaccggaacatcgtgcggctcctgggttactgtcggcgcaagggagaacttctccttgtttatgactacaagacaaatggtagtcttgacaagtgtttgcatgataatgctacatcaaccacactctgttggcccaagaggatccacatcatcaaaggtgttgcgtcggcattatcgtacctacacaaggattgggagcaagtagtgatccatcgagatgtcaaggcaagcaatgttcttctagacagcgagatgaatggactattaggggatttcggcttgtcaaggctacgggatcatggagccgatgcaaagaccacatacgtggtaggaactatgggttacattgccccagagctcatgcacacggggaaggcaacaccgttgacggacgtgttcgcgttcggtgtgttcctcctcgaggtcacctgtggacgaaggccgattggggaaagcgatagcaacgagattctattaatagattgggtgctgaagcattttcttagcggatccatccttaacgtggtggatccccggcttgcagggaggttcagcttcgaggaggtgaatcttgttttgaaactaggactaatgtgctcacatccattgcccaaggcaaggccaagcatggacaaagttgtgaagtacctcgatggtatgcttccagcaccagagctatcaccgacgcacatgagctataacatgatggagttgatgctacagaatggggttggttcacatagtttacccgtgtggtcctctttgttagataatagtgttggtacaatgtcatctgcttcggttctctcggacgggagatga

SEQ ID NO: 52356 - DNA, 429 bp, Oryza sativa
  Clone ID: PAT_MRT4530_54660C.1
atggacctcggtgactcatgtgtagggtatggcgacggggacggagatcctgaccagcgaaggagaacgtgcggagcggatgagggttgcagcgacggcggcgtcggcgtggatcgtgggtggctgggtgcggcggcggttgagggggagcggctgagaaagaggcgttggacgatcggcggaggcggcggtggcagaacggctgaggcgcgatgggagagaggggagcgatcccgcaaagagatgggagtgaggggaaattgcgaaatcacggatgaggagatcacgcgaggggagaggggggagcgacgggatggggaggagatcgcgattggcgtgaggcagcgtagtggttggcgtggcggcgtccggtttttgggggcagcggcatggtggcggcggcggcgtccgtgtgcgagagagaagtga

SEQ ID NO: 52357 - DNA, 246 bp, Oryza sativa
  Clone ID: PAT_MRT4530_54661C.1
atggcggtttcgattcgtgtgggtggaggaggaatggaggatggtggggtgggagagggcgtctggcgggtatatataccggaggtgaggtgggtgaggaggggtgtgtggcgtttaccagtcgccatggtcgccatggtcgtcggctcaggccgctcgtcggctcgtggggtaggtgcgtcgcgtgtgtgcgcgtctactgctctgctgctgcgttacactctgcactactcgctccctctttga

SEQ ID NO: 52358 - DNA, 510 bp, Oryza sativa
  Clone ID: PAT_MRT4530_54662C.1
ggaaaggggcaacatatgttcattgtttttcattaaaaccccgggggggaaaaaggggggacataaaaaattacagggttcatccatggcacagggaactaaatatatatgccacccctaagggattacccccataagggtgagcatatataatcagggggcgaatttaccgggccgtttataaactctgaatgggcttcccccccccggagttcttcacctttggggcccccttggccaccccggggttttttacctttatgggcccctcgaccacctcggtattgttcacctctgcaactggggctgaaggcttttcctcctcaacaatctttttttaaacttccccccccttggcttgcaagacaagggcatcatcatgttggggggaactctgccatcgcgggggccccccccactaccttttaaggggcttgatcagccacaacccccttattggaaaaatttgggggcccaagggcaaccttgggggccgcctcaaagggaggg

SEQ ID NO: 52359 - DNA, 779 bp, Oryza sativa
  unsure (1)..(779): unsure at all n locations
  Clone ID: PAT_MRT4530_54663C.1
gaaaagcagcagacacagaagcgagcgaaaccaccacggaaagatctccccagtccacacgtcgaaatcgatcgaaatcgagggggccggagatggctgcggcgagagcagcggtccccatcgccgtcttcctcctcctcgtcctcgccgaggccgaccccgcggcggcgacgcgctcgccttcggccttcgtgcagaacgccatctactccaatcgcatcaccatcttctctaaaacctactgcccgtactctatgcgtgctaagcgtatatttagagatctcaaggagaatccttatattgttgaactagatctcagagaggatggtagagaaattcaaagtgttcttctagacttagttggccgtcatactgtgccacaggtgttcgtgaatggccagcacgttggtggctcagatgatacagcaaatgctcattctaatggacagcttcagaaacttcttggaaatagccaatcacagcgatgatctgtagttaagactatcaaatactcgtgtatggctaacatgtgtgagaagaagggggccgtcttttctctttacacaggatccttaacagaatgttgcagcttcagcagttttttttgcatggaagtgttgtgacaacgatttctatgtttgtgattcatctgtcaagcgcatattctattaactgctgtgccggctctgtactgtttgtgactttgtgtttataagttattaattccccttgtatttacaatgactatcaaaaataggtagtgcggctatggtntgtgt

SEQ ID NO: 52360 - DNA, 896 bp, Oryza sativa
  Clone ID: PAT_MRT4530_54664C.1
ttgagccccacatatcttatttcttctcttttcttttctttcgtctcttctcttctcctttcctctccaatcttctcgatgcgcagccagcggcagatggcctggtcgccgccgctctgctgcgccagccacgcgctcgcttgcaagctccggccgccgcgcgctcgcccgctagccgcttgtcaccgctgctccgctccaccggctgcacgctcgcagctgcgctgctctggccacctgctccggagccggattaatttggagtcgtggcatgtcatgatgtcgttgaattgatggagttgacatgggcaagtaagcaagcgcatggcgcggtggcctagagacacggaggcgcgcccccctcgccagccgccgcagccgcgctcgctcgcctgctccgtacgcttgccgcgatgccgccgccagttgccgctccctcgtttgcggcaaaaagaagaacaaaaggagtagagaaaaaaagaaaagagaagatgaaaaaataaaaagaagaaaatggtggatagaagggatgcggacccatgttatttttttcacttacacgtgggaccagattgctgattaggatgccacgtcagcaaaaccacccatacatattgtcatgagatcttgattgcactgttttgaacatttgagaggagaaaatttctgacattagaaattagggatgtcatacagactcgacgtaaagtttagtgacggtagtttaacttattcctttccttttccttttgcacaagctcctttctttttttcagcattgccgttggatgtagatctgatggcgcacagaatcgactgaaaaaaaaaatccaaaattttaagtgattgcagaataggtggtcccaattaataattaagggagtcaatcaatcatg

SEQ ID NO: 52361 - DNA, 333 bp, Oryza sativa
  unsure (1)..(333): unsure at all n locations
  Clone ID: PAT_MRT4530_54665C.1
tagaggatttnactgacgacgaggatgacagcaatgaatgaagctctagaaaatgactgcccttttggataattattgtagctagggacaaatttaaacttttgctgttgtatttggtatgttttatggggaatgtggttgctacgtcagtctgatcatctggccctgcttagcatctgttgattctgttcccctctaaccattatttgcactacttgtagccaatgaaacatgggcagctcccacggcaagatgtgagtaaaggtccaatattgtatctgtctctctcaaatctcatatattcagtgctggagaaacaaaaaaaaaaaaaaa

SEQ ID NO: 52362 - DNA, 579 bp, Oryza sativa
  Clone ID: PAT_MRT4530_54666C.1
atggtcggtccccgtgaaccctttatgattgcagtcatccgtacctctcaccgcaaaccccatggccggatcttcactctcggggagggatctccactccccattgtcagagagatcgccccctcgacatcaatgaagaaggaatttggcaaagcttgcttaggaaaaaaatacctgacaaagaaacaattttgcaagtccaaaaaagaccaggggactcgcattttttgggctagtctcatgttagacaaagagtcttttcaaaggattggttccttcttaatacaagatggctcacgagtaagattttgggaagattgttggataggagttcaatcctttgagaaggagtatcctaacctttacagtctagttagaaataaaaatgagatggtggccaaggtcattttcatggggacgctttgggcaaggacttggcctttacttcttaaaggagttgacgaagaaatggttaagagctattgcaagctgctagagaagcgtgcgttggagttcttctccatgtatggtgggaacattagaagaatattggaagcttgcctagaagaacaattctag

SEQ ID NO: 52363 - DNA, 186 bp, Oryza sativa
  Clone ID: PAT_MRT4530_54667C.1
catcttcagctcagaagcactacactactgaaaaggggaaataaaagcaaaactgagtacaaccaccgtactcagtaagccacaccaacgatgtagatgtgcaaggggatacaaggatggtttgtagctatttgcataaaggcggttgtaaaacattttattgagcaaaccagtaaaactgttgag

SEQ ID NO: 52364 - DNA, 900 bp, Oryza sativa
  Clone ID: PAT_MRT4530_54668C.1
tcagcccttgcaccgccgacgccacgcgctgccgccttgcccccgctccatgacaaaccgaccgccgccgtcatcgccgacgtcatccatggcccccgccgctccacgccgcacccgtccaagagtgggagaagcagctgctctccctctcctcctcctcctcactctccctctcctcattatggcaagggaccaagcccctttcccccttctttttccttttccccgaccaccgccggcgtcaccacctctgtgccgcttgaccgctcgcgccacctgcctcatctccttgaccgccccaatgtcggttctctcaaaccgacatcgccacaccactgccgcctcgccgttcgttgtcgttctcgccctcctctgccgtcgtgcgtgtcggagagctagcgagcacgaggagtcgacaaggagctccgcgccgccccatcctcgcacctctccatctcttcttccccggccgcgccctctcggtgccgcgccgccccgccgacgcgtccgcctcgccgcgactccatccgcgccgccgacaccgttctctcgtcggtgagctccccactgaaccccttttcccttgtcgcgcgccgcgccgcgcccgccgccgttcgtcacatctcgccgcgcgcccttgctctgtcctgggcgtcgctcgccgtcgccggcctctctcggcgtcgcccgtgccctctcgaccggtagaatgagctcgcgacctcgcgtagatgctcccgctccaacgaatcgaacccccgttgccccggtgaagttttccccctttgctcgccgccgacgatcgccgtcgaaatccgccgctgtcggctcccctcttgtcaaatccctctcgccaccacgctcacgggaatccccttgatctcccccttgttgccccat

SEQ ID NO: 52365 - DNA, 333 bp, Oryza sativa
  Clone ID: PAT_MRT4530_54669C.1
atggagtcggcggcgcggatggagtcgcggcgaggcggacgcgacggcggggcggcgcggcaccgagagggcgcggccggggaagaacagatggagaggcgcgaggatgggggcggcgcggagctcctcgtcgactcctcgtggcgatgtcagtttgagagaaccgaccttggggcggtcaaggagatgaggcgggtggcgcgagcggtcaagcggcgcagaggtggtgacgccggcggggccatggatgacgtcggcgatgacggcggcggtcggtttgtcatggagcgggggcaaggcggcagctcgtggcgtcggcggcgcaagggctga

SEQ ID NO: 52366 - DNA, 447 bp, Oryza sativa
  unsure (1)..(447): unsure at all n locations
  Clone ID: PAT_MRT4530_5466C.1
cttgtccatagagtctgctgcggcgagtgctttctgggaggccatcatggggaagctgttcatggtgctggagaaccagtacaacaagcacaaggtcctcgagcaagaaatcagctccctccagcaagagttccgcatgattgccgccgtcatggacgaccagctcctttctatgggcaggagcgaagactgcacatctgttgcatggctgcacaacgaggagatgctcgatcttgagcatgacattgaggactgcgtcgaccgtttcatgcacctcctcacctgcaagcatcatcgtggtggggtgcgccagatggcacatgaggtcatcgtcatcgactccgtatcgtgctgcgacagtctggtgggcattaggcagcccatggaggagctnctctcgctgctaagatgaagttgagggcgagccaaagaagttgagggtgacct

SEQ ID NO: 52367 - DNA, 1563 bp, Oryza sativa
  Clone ID: PAT_MRT4530_54670C.1
atggcggcaggtgtcctcgacgccggcggcgctgtcccggccgcagcttacagcggggagctcacgctctccgtgcttgtcacatgcctcgtggcggcctccggcggcctcatctttggctacgacatcggcatctcaggcggcgtctctcagatgaagccgttcttggcaacgttcttccccaaggtgctgatgaggatggccgacgcgaagagggaccagtactgcgtcttcgacagccacgcgctcacggcgttcacgtcgtcgctctacgtcgccgggctcgtggcgtcgctggccgccggccgcgtcaccaggtggctgggccggcgcggcgtgatgctgatgggcggggcactgttcttcgccggcggcgccatgaccggcggcgcggtgaacgtcgccatgctcatcgtcgggcggatgctcctggggttcggcgtcgggttcacgaaccaggccgcgccgctgtacctcgccgagatggcgcccccgcggtttcgcgggtcgctcaccgtgggcttccagttcttcctctcgctggggatactcatcgccaacctgaccaactacggcaccgcgcgcgtcccgtggggatggcgcctctccctcggcctcgccggcgccccggccgtgttcatcgtcgtcggcgccttcttcctcaccgacaccccgagcagcttcgtgatgcgcgggaaggtggaccgcgcccgcgccgcgctcctccgcgtgcgcggccaccgcgccgacgtggacgccgagctcaaggccatcgtccacgccgtggaggccgcgcggggcagcgaggacgtcggcgcgttccggaggctggtcacctggcgggagtaccgcccgcacctgaccttcgcgctcgcgctgccgctgtgccaccagctcagcggcatgatggtcctgaccttcttctccccgctggtgttccgcgtcgccggcttcggcagcaacgcggcgctgatgggcgcggtcatcctcgccggcgtcaagttcgcgtcgctcatcctctccacgctggtcatcgaccgctacggccgcaaggtgctcgtcatcgccggcgccgccctcatgatcgtgtgccagaattattgctgttttgtgatcaaggtggcgaacgcttggatcatgggggcgaagtccgggaagcacggggaggtggcgatgccgagggcgtactcggtggcgctgctggtgctgacgtgcgtgcagggcgccgggttcgggatgtcgtgggcgccgctgatctgggtgatccccggcgagatcttcccggtggaggtgaggtcggcggggcaggcggtgagcgtgtcggtcacgctggggctcacgttcgtgcagacgcagacgttcctggcgctgctgtgccggctcaagtacgccacattcgcctactacgccggctgggtcgcggccatgacggccttcgtcctcgtgttcatgccggagaccaagggcgtcccgctcgagtccatgggcgccgtctgggcgggacactggtactggaggcggttcgtcggcggcggcgacggcaaaccggagcagcgccgttga

SEQ ID NO: 52368 - DNA, 1128 bp, Oryza sativa
  Clone ID: PAT_MRT4530_54671C.1
atggagtcgcggcgaggcggacgcgacggcggggcggcacagcgccgagagggcgtggccggggaagaagagatggagaggcgcgaggatgggggcggcgcggagctcctcatcgactcctcgtggcgatgtcggtttgagagaaccaaccttggggcggtcaaggagatgaggcgggtggtgcgagcggtcaagcggcgcagaggtggtgacgctggcgctgcttctcccattcttggacgatgcggcgtggagtggcgggggccatggatgacgtcggcgatgacggcggcagttagtttgtcatggagcgggggcaaggcggcagcacgtggcgtcggcggcgcaagggctgatggcggcggcgttcggccggtcggccacctcgcgagcgagcgcgcgcgcgacgcggggccagagattaatcagagaatggctggagaaggagatgatcaactgaagcttctcggattgtgggtgagcccatacactcaccgagtgaagcttgcactcagcttcaagggcctgagctacgagtacgtcgaggaggacctcagcaacaagagcgagctgcttctcagcaccaacccggtgcacaagaaggtgcccgtgctcatccacaacggcaagcccatctgcgagtcgcaggtcatcgtgcagtacctcgacgaggagttccccaactccggcgtctcgctcctcccatctgactcctacgatcgcgccattgctcgtttctgggctgcctacatcaacgacaagctgatgccgtcgtggctgcagtcgtcgatgggcaagacggaggaggagagggcggaggcgctgaagcagacgttggaggcggtggcgaacctggagacggcgttcaaggagtgttccaaggggaagcccttcttcggcggcgacaccgtcgggtacctggacgtgtcgctcggcgccatgatcggatggatgcgcgccggcgaggctctgcacgggaggaggaccttcgatgccactagaagccctctcctgaacgcgtggatggagcgcttcgccgcgctggacgccgccaaggccgccatgccggacaacaacaagctggtcgagttcgtcagggtgaggcgggctgccgctgcgaacaactga

SEQ ID NO: 52369 - DNA, 212 bp, Oryza sativa
  Clone ID: PAT_MRT4530_54672C.1
ccactctctaccctaataaccccagtattcctttgcgaaccctggtgatcttggtttcatgggaaatttggtgcgaacgaaacgctagaatcttccgaaacatcgcctcaacaccgatgtccatcattgccaagatcaaggaggaagctcgagcttgggtcaaggctggagcttcaaagcttcaagagtttggtattttgggagatatcact

SEQ ID NO: 52370 - DNA, 662 bp, Oryza sativa
  Clone ID: PAT_MRT4530_54673C.1
agaacaacattcagcaccaccaaatcgaaagaaatgggcaaaaggagacatcaaaagcctgacagaaatgcttcgccctcgcggagtcctcccgcagcgcgttccgcctgtacgccatgcgcgcggtcggggggtgggggtggggcctctctccccttcacgcccggcggctggggatgccgctcggcggcgacggtggtgcccagatctgccatggctggccggatctgggggagtggcagtcggcggcggggaatgaaggtggcggcggtggacgatgcgatgtgggagatctgggggagcggcagccggcggcggggaaggaaggtggcggtggtagacgacgtggctgtgccggagttggcggcggcggctggtggcgactgcagctagatggcgtccgcgtcggtgactgcggctgccgacggcggctggctgctggtgaggaggcggctggtggcgaggcggcggctgctatgatgactgctgaggcagtgacggtggtggcggctactgatgcactggctggtgacgaggcggcggctggcgagctgtggtggcagccggatggctgctgtggtggcagctgcggcggtcggtcacgcttagcggcggccagtccggtgttaaccttctcccggttttgtgtgttgacgctgtcg

SEQ ID NO: 52371 - DNA, 585 bp, Oryza sativa
  Clone ID: PAT_MRT4530_54674C.1
atggcggcgggcgcggcgcagcgtgcgacaggggaaaaggggttcagtggggagctcaccgacgagagaaacggtgtcggcggcgcggatggagtcgtggcgaggcggacgcgacggcggggcggcgcggccggggaagaagagatggagaggcgcgaggatgggggcggcgcggagctcctcgtcgactcctcgtggcgatgtcggtttgggagaactgaccttggggcggtcaaggagatgaggcggatggcgcgagcggtcaagcggcgcagaggtggtgacgccggcggtggtcggggaaaaggaaaaagaagggggaaagggggttggtcctttgccatattgaggagagggggagcagctgcttctcctattcttggtagatgcggcgtggagtggcgggggccatggatgacgtcggcaatgacggtggcggtcggtttggcatggagcgggggcaaggcggcagcgcgtggcgtcagcggcgcaagggctgatggcggcggcgaccggtcggagcgaatgttcggcaaggattcaaaggaagggattgactttcggaatttgatttcggagacttga

SEQ ID NO: 52372 - DNA, 677 bp, Oryza sativa
  Clone ID: PAT_MRT4530_54675C.1
ggggcggcgcggagctcctcgtcgactcctcgtgctcgcaagctccccaacacgcacgacggcagaggagggcgagaacgacgacgaacggcgaggcggcagtggtgtgatggaggaggggaagcgagaggtatgggagggggtgtgggttttataggtggcgatgtcggtttgagagaaccgaccttggggcggtcaaggagatgaggcgggtggcgcgagcggtcaagcggggcagaggtggtgacgccggcggtggtcggggaaagggaaaaaaagaagggggggggaaaaagggggttggtccttgggccatggatgacgtcggcgatgacggcggcggtcggtttgtcatggagcgggggcaaggcggcagctcgtggcgtcggcggcgcaagggctgatggcggcggcgttcggccggtcggccacctcgcgagcgagcgcgcgcgcgcgatgcgggggtgcggccggatttcgaacggcggcggcgggaaatcggcgccgaggagagggagaaaggaagcagagggagagagcgaggaaagagagaggaagaagagaggcgatgcctctctctctctcggcgcatgcagcgcacgtgcggggaggaggtgaagcgggctgagaggagatgggccggggaagaagagtcggcccaccgagccagagggagg

SEQ ID NO: 52373 - DNA, 372 bp, Oryza sativa
  Clone ID: PAT_MRT4530_54676C.1
atgggcacgactagcaaaaccatgcacccacagcccaccatggctgacgtcatcaaggagggggcggcgccgacatgcccgacccacgggtcagcggctcaagggggaggtccacggtggaccggttccacggaccgggaaggagacggcgcaccacgtggtgcacacgtggcgccgacgtgccgcacacgtggcggcactggcagccacgcgggcggcgggattggacggccccgatctacctacgggcccggctcaagccggcccgacgcccatggcgcgcggcggcgcggctcgacgcagcggcggcgaccggccgacggcggagggcggcagcgtcgcggcgacgcggacggcgctagcggcggctaa

SEQ ID NO: 52374 - DNA, 1767 bp, Oryza sativa
  Clone ID: PAT_MRT4530_54677C.1
atgtgttcgacgaaatgcccccgaagaaagccaagccgtcccgcgggggcggcgctgcggaagaccggctcagcgccctccccgacgcggtcctgcaccacgtcatgtcgttcctgcgggcgtgggaggtggcgcgcacctgcgtgctctcccgccgctggcgccacctctgggcctccgcgccctgcgtcgacctccggcgtctggggcggcggaggccaccttccgccgccggagcggctcgccaggttcgcctaccggttgctgttcgagcgggaggtgtcagcgccggtggacattctccgggtgatgtccagccccgacggcgaaggggaggaggattacaccacttcagatgtccagacgtggatccgtgccgccatcaagcggagagctcgggtgatccagcttaccgaccatccaatggatgaggcgttctttaacctgggcttcgtccccatcatctcctgccacctcaaacacctgaagctgtctggttctttactgtggaacacgacgctaatgcagctctcttctcagtgccctgctttggaaattctagagctcaagaaatgttctctgcacggccatgagatttcatccacctctattgtgacatggtatcagagcaagagcaagggatcaaaccctaacgtcgatccggagtccacgccggcacgccggtggcagctcgccaccggcgagcccatccaatccgtgcacatcctcgtcagcttcgtcgtccaccaccgtcgagccgtcaatcgtggcagccaatcgtttcgtcgttcgtccacaagcagcaagcagatccagtcagcacaagcaacaagcagcatcaagcaatcaaatccacaagcaagcagcggatgcatgaacaagcattcagatccagttcttcgtcaccacgtcagtcgtagccaggccgtactcgtcgcggatcttgtcgtcgcgtctcgccgtggctcgtcgttgtcgccgcattcccattggccggtcgcggcgctctcttcatcgccgccagcgccgtcctcctcccatgtcagtcgtccagctttccgtccgccgcctgcgcgcgtgaccatctgcatcgtcgccgcacagtacaaagacttcgatgaggatgcaattgatggaatcaatagcgatgatggtgaaggttgcacgagtgattctgactacgatgatagtgacgcgaatacctgtgaatacagtgagattgcagatgactatgatgatgaaaaacaacgtcaagagcattgtgaggggcataatccgattgatgattatgatgatgaaaatcaacatgaagagcatggtgaggaacataatcaaattggacttgatgaagttcttggtggccataatgttcttcacatcctatcaaatgctgaaattttggagctattagctgatggtggagaggtgattcttaatagagcgctgaaaacttgcccaacttttagaaacctgaagacgttgtcccttggtgaatggtgtatgggtgctgactttgatccactagttacattcttgcagcattcacctaatctggagaggcttttccttgaacttaaattgggcttcccaccagaccacagtaacgtgaagctagagggaggctgtcgtgaagaagctgcaccggtgagttctgaagtgcagagcatctgcgctgatcatgctggaagtacagcatgtgatgcttcttttgagtacattggaactaagtatatatggctacctgaatgcgagaatgatctgatctag

SEQ ID NO: 52375 - DNA, 1204 bp, Oryza sativa
  Clone ID: PAT_MRT4530_54678C.1
atggcgccggtggagacgcggtcgaggccaggaagtggggggacggcgaggaccctattagcccctgttcgccgctcagacggcgggaaggatgtcgcccctggctccaaatcggcggcagaaactgagaggatgaagaagacccaaggttcgaagaagaacttgtcagatgggaacgatgaggacggacaagcggttctctgttatgagaggcaaatttaccatgagtgctacaacgcttgaccacatctgcagatgaaactcaggggcatcaaacttcttgagactctccataatgagataataacttgcaagtccaacattgctgatcgacttattgttggataggtgccattaggttattgcgctgagggagttagggttatagatggtgacattattgaataatccacgggaaaatgtatttcttctactgttgagttagaaaatatgctgctgcagatcttggaggatcattttgatgaaggaaatagtcttgattctacaatagatattgaggcgatttacccatcaccggagaaaagatttatacaagttgtccaattgaccaagcagatccagcggcagcgccaccaccacctccgccgctctctccactgcgccgccggcgccatgagcctcctcagcaactccctcctgctccaagggcggttgcggcatgcggcggcttcagcggtggcggcggcggcgatggggcggcgcggggtggcgacgtcgacggaggagtacaatcgccggaactacgccaacaacatctccgagtacaataccgtcttcgggtccctcaccgcgcagcgcaggcatacacttgaagtacttcttgacatgcttattaaagatggatttacttatgatgccttcattgcgatgcaagctatgaggtaactctcaaatctctctcacgggtagaacatcatcatcaccaagatcacttgaccataaagattcaggttctccccattctcccactcgcgaatataggacacccacctgaatatccaccagctggaccaagcttcgttttaaactgatccgtgctcacttgtgcttatcaacttgtacatagatagtctcatcatacaccacgtgctctcttctacccctgggccctgctaattgtaatctcactacacgccacttctgttctcttctccattttcttggaattcaacggttcttttat

SEQ ID NO: 52376 - DNA, 139 bp, Oryza sativa
  Clone ID: PAT_MRT4530_5467C.1
tcctgcagcccttttgaaagtctctgaatctctggtgtacaagctaggacaaagccttggaagccacctaggcatcggctctcgtgcggggcccatcaaatcatgccggctgacgcaggccgacacggggaggatcccc

SEQ ID NO: 52377 - DNA, 360 bp, Oryza sativa
  Clone ID: PAT_MRT4530_54680C.1
atggatgagaagaccctccgtgagttcgccgctccctccgctgacaatgtgcatgtcaggcctagggtcagcgtcggagatgtggacttcgacctcaagaccagcctaattaccatggcgctggctagcccattctgtggcaagccaaatgaggactcaagtgctcatctgcaaccgttcctggagatttgtagcacattggctatagataaattggagctagcagtgggctatactattgaacttgctctaactaggggtagcaaggcccataccggtgacgtattatgcttctgcccatacggccatacccccatatatcccctctgcatcgtgctgacttacacctttgtgatttga

SEQ ID NO: 52378 - DNA, 102 bp, Oryza sativa
  Clone ID: PAT_MRT4530_54681C.1
atgaccgggttccgctgttcacagccatgtgctgatgtgcccgtgccagtgcagcgcgtgtcctcgcgcatccgcgcggcgccgagcaatcctctcgtctag

SEQ ID NO: 52379 - DNA, 674 bp, Oryza sativa
  Clone ID: PAT_MRT4530_54682C.1
cgggctgcaggcttcagtgaacatttgctggcccaactcatactactttgttaatcaccctttggatatgcagtgatgcacatgtttaggatagatgcaaaagttgtttctatcttgataaaatgaagcacatgctcttcagacacagcacaatccgcgttcatgaattattttaatgtggtgtttgtgattccttttatgttcggagaaggcctgattacagaaatgaatggaaatggctggtgcgtataggacaaagcctcttctaaaaaatcctgctactacttttgtcatctacagaagacaaagaacatgttttccagtgaactgtacgttttcttaaatttgaggctgctcttcgcaatctaaactacttccttttcttgatctttccttcctaaacttggtattgctttggttctaatatttctacttgctcactcataaactctaccaaattaattcttcttggctaggtacaccaacaatgcttcaataaaaaattgggtttaatatagtgactggattgtgatgattcagccagaatgaataatgtaaagaactaaagacttcaatatttgcataaataaattcaagaaaaaattcagtaatcaaagcaactcgaaaataaccacctataaaaacagccacctccgtttatcaataggactatg

SEQ ID NO: 52380 - DNA, 652 bp, Oryza sativa
  unsure (1)..(652): unsure at all n locations
  Clone ID: PAT_MRT4530_54683C.1
cnccgcgnttttacagccaacgaaggcgcanaaagcaaacncggcggcgcangctcgcngtcgccggacttcctccccccccccgctccgattccgtccagatactgagtgaaaacctgctgctaagatgggtagcacagaacacccaattcctgcgcagtcacctgcttgcccaactgtgagcgaaggggggtcggctgctccagctcctgctactgattcaaagccaaagaagaagatatgctgtgcgtgccctgatacgaagaggctgagagacgagtgcatcgtcgagcatggggaatctgcgtgcaccaagtggatcgaagctcacaagcggtgcctccgagctgagggttttaatgtctgatttttctctagtcantctaaaaggtattacatttacttttataggaggaaggtgataggatatcccggttgagacttgagatgcaaattggatccaagagattagctgccctgtttttgcatgttatcgaagtgatagaatatccggtttgtgaattgagatgcaaattgaatccagagattagctgccctgtttttgcatgttatccctgtatgtcagggaacttattttcatgataaataaaggtacttccgttactggtgaaaaaaaaaaaaaaaaaaaaaa

SEQ ID NO: 52381 - DNA, 293 bp, Oryza sativa
  Clone ID: PAT_MRT4530_54684C.1
atgaaaccgattcaggccggcagcggctgcggggcgcccgccgaagccagggagcagcggccggcgtgtgaggtggagcgccggcgatggcatctgatttttgtccctgaagcgcaaaccggatatgacccatcccccaacttgcgaaaaccggacaaacaaggtcccttggcggttttggctggcgtggcgcccacgtggctattttggctcggtcttcatctgacgtggcgcttatgtggcaatccgatctggggatcctctagagtcgacctgcaggcatgcaagcttga

SEQ ID NO: 52382 - DNA, 195 bp, Oryza sativa
  Clone ID: PAT_MRT4530_54685C.1
atgaaaccgattcaggccggcagcggctgcggggcggccgccggaggcagggagcagcggccggcgtgtgaggtggagcggcggcgatggcacgcaaaaccggatatgacccatcccccaacttgcgaaaaccggacaaacaaggtcccttggcggttttggctggcgtggcgcccacgtggctattttggctcg

SEQ ID NO: 52383 - DNA, 573 bp, Oryza sativa
  Clone ID: PAT_MRT4530_54686C.1
agatcgagaatgatcaatccattacatgactgcaatgaggagggtaatgtgccagataaactgttctctctaagagataatattgcaagggaggttatgaaacccatggttgaaggtatttctccatgaagattattattcgaaaagtcaatggtatgcagtcttgaggaattcttccaacaatctggtagaacacctgaaaataagttgtttgagaggtcaactaattccatcgaatccatctcgcaaagatatgctgggatagttccattcagttgattatctgagagcttgatgtaataagcgtacttggctcctaagctttgtggtaaggatccagacaagaagtttttggatagatccagcactttaacactagctggtaaaccaggaatgcctccttcaagtacatttgatctcatattgaaagtactcaacattttcatatgcaccaagcttgttggcaagtggccagtgatgctgttacttgagatatccaaggtagtgattgatgaagagaagttccagagccaatcaggcagggatgtggggtcctacatggcaaccatgtag

SEQ ID NO: 52384 - DNA, 662 bp, Oryza sativa
  Clone ID: PAT_MRT4530_54687C.1
ggatccccgggctgcaggaattcggcacgagggtggcaatatgtgttgaacaattatcaaatactagttgagtaatttctatttgttgaacgatggcaattagtagttaaatcaattatataaatatatgaaattatacccaattcatgttatacaatttgtagtttagtactatataattactccttcacgtttcgcatacccaacctgaaaatcctggggccgcccctgggcgagcgtcacccgcgtggccaggcctgggcacctggctgtggctgggccagcaaccaccagccccagtgtgggcgggcggcgagcggcggtgcgtcggtggtgccacaggcttgcgcctagcgccctcactgtctgtctgtttcggtgtctcgttggttcaggctctcactgtttgtctcaggtctgaaatatgaaaagaaagaaggtcctgctattgatttgaagtgtttattttgaaacagttgccgcaaagaaaaagactcaaaatgaaactcgggatcaggccaatctggatccttcttccaatgatatgttgaacaagcatcggaaagttgtcctctacattgtaagatttcttatcatttgtcatattctatcttctatatatttcatatgttaccactgttgaacagttgtcaataacaatg

SEQ ID NO: 52385 - DNA, 388 bp, Oryza sativa
  Clone ID: PAT_MRT4530_54688C.1
agcacaaatagaactgtattaatgatgcaacgttttggagtgattgaccctacagattttaattttacaatgccattaaatataaaaaatgttgaaagtactaacgtttttttcattaccagcacctattaacacatcttgcttctcgggccatggaccaagacctatctgggcgtccgcttttatctctataaagctgcctgactaaccacgcttagactgacttcattgcttatagactgttaaggtgaacacatctgcacactataggtatcttgtttgtcaacaccaaggtgactacttcagacactgtatgtcttgtgtcacgcacggcaagacgaccaagggtagggggctcggtggaggattgtacagccatgtacttgtg

SEQ ID NO: 52386 - DNA, 2305 bp, Oryza sativa
  unsure (1)..(2305): unsure at all n locations
  Clone ID: PAT_MRT4530_54689C.1
tttnnnnnnnnnnnnnnnnnnnnnnnnnnnnnnnnnnttnnnnnnngggcaaaacggaatggttaaatccacatgtgttacactgacaaatttacttanagtcaaagtaaatttcagaatagtaaattcggaggagtacacttgattacaagtacattaactaaattgttttattccttgacctgacatgactcatgcacgctagtactcctcccgagttggatcgtaattaaccacgcaactaaattaaccgaagtcgtaattaatgcatgcgattatcgttgatgatcgagattaattagcctaacccctgattaattaaggggttaattaattagctttgcgggtctcgagtccgaatccgaatgggaagagcgggtcgtagtgctcgtcgccgacgttcatcggcagctgctccaccgaccggaaccacgtcctcgccagcttcccggtgaactcgtagtcgccgaacagcacgtcgctgacgccctgcccctccgtccccggcagccacgccgccaccagcgcgtcgatggcgtccatgtacggctcgatcaccagcggccgcccggagaccaccaccaccacgcacctcacgccgccgccgcagacgttctggatcacgctcggccccggcgccgggatggtcaggttcaggttgtcgccgagcgtctcggcgtacggcggctcgccgacgacgaccacggcggcgtcgaacctccccgcgttccgccgcatgaagccggcgtcgggcgcctcggcgaagacgacctccgtggcggcatccacggcgcggcggatgccgtcgaggatggtggtgccgccggcggtgaggtcgttcccggcgaggccctgccaggtgatggtccagccgccgcactggctgccgaggtcgtcggcgtgggcgccggcgacgaggatggagcgcgcccgcttcggcagcggcagcagcggcgcgtcgccgggcttgccgttcttgaggaggacgagcgacttgcgcacggcatcgcgagcaaggtcgcggtgctcctgcttcccgagctcgccggcgaggctgaggtcggcgtaggggcgctcgaagaggcccatggtgaacttcacccggagaatccggcgaacggcgtcgtcgatccggctcatcgggatcgtgccgttcttcaccagcgccgccaggtcgtcgatgaactccgtgtacgtgaacgggatcatcaccatgtcgatgccagccatgatacccagcttgatggacaacatgtagtctgcatgtgctggggtcgtgatcctgtcaagcccttgccaatccgagataacgaatcccctgaagcggagcttggacttgaggaaatcggtgatgaggaagtggttggcgtgcatcttgacgccattccagctggagaaggacaccatcaccgtggacaccccctgcgccacggcgctgtagtagggcggcatgtgcaccgtcatcagctcccggagcgtcgccaccgtgttgttctcgttcatgccgcgcgtcgtgccgccgtcgccgacgtagtgcttcgagcacgccgccacgctcggcctcccgccggagacgaaggggacgccgcggcggccgccgggagggatctcgccctggaagccggagatgatggaggacatgcgctgcaccaccctggggtcctcgctgaagctctcgtagcagcggccccacctcgggtccctgcacaccgccacgcatggcgcgaacacgtacgggatccccgtcgccctcacctccgccgccaccgccgcgccgatcctcttcgccagatccgggtccctagtgcagccgaggccgacgttgtgggggaagatggtggccttgtagacgttgccgtggccatggacggcgtcgatgccgtagatcatggggatcccgaggcgcgtcgccatggcgccgcgctgcatctcgttcaccatcgacacccacgccgccggcgacgcctgcgccgccggcacgctgccgccgccgctcagcacgctcccaatgaagtagttgcgcatgacgtcgaaggtggcgttctcgcgctcgatctgcgacatctggccgatcttctccgccagcgtcatccgccggagtaggtcgtcgatcctcttgttcagcggctgcttcgagtccttgtacttgggacactcccctcctcctccgccgccgcccgccgccgccgccatcgccgtcgccgcaatgcagcctacacacaccaccaccacgagcacggcgccgccgccgctactacctcgccggagtagccccattgctcagctcaggctaagtgagatagag

SEQ ID NO: 52387 - DNA, 1613 bp, Oryza sativa
  Clone ID: PAT_MRT4530_5468C.1
atggcgaaggacaagaggtgcacggatcactccagatatcgcggccacagcctcgactctcccgcccgcacgacggcaccatccggcatgatcttgcgaggaaggctaaggtgcctgtctgccgtgatgcgggaggaagggagcactgtgtcgccggcgtcttgggccatggcaaccggcggagaggtgatggagagcgtggagcacgagacagtgtggggtggcgaaaatgttagggttcgagaagcgaaaggacgagtgggcgggcaatcatgtcctcacgtcgcccttgtccccggcggaatgggggtgggcgaggggcggcgccgggttccactcgagaatcggttattgcttagcttccgggagaaggcccggtttaaagcccaaaaagtggagtgggacgtggtgtctagattacgggatatcattatttggggttatatgctgcggatgaaaggtgggccgctgatggtgacaactcagtacgggggtggcttctcgaagtaccaggagggcatcggatagagggctcggcttcctggcggttcgtggtggcggcggcggcggcggtgcagcggctcggcgcggaggcagaggaggacgcggcggaggcggaagggaatcgttcggagttccttggatttggacccctgctttgtgctctgccgctcagctccacagtgcagattcacctctactggatgtaccggaacatgcccgctagaaaagaaaaaggattttggcaggcgcactccggccgcccgtgccgtcgcctccccttccccggccagacctccgtttcccgcagagaccttcagaagtgcatccccgccggcaacagtggcgttgacgccactgttccgcctccggctgcctctgccgcgtctcctcctgtgcgccggccgacgtcgccaccacctccggcatcgcagcggcgagccggcgacgccgtcctcggcatcgcctcccctccatccgaacccctccgcggtccgtcgtcgtcgtcaccgttcgtcctcgtcgtcgacgtcccgtcggtcgtccggctcgtcgtctcgctgcgccgtcatcgtcgtcggcatcgcagcggcgtgttccgcgccgtcctcgcctccgtgcagctgctgccggctgccctcgtcgcctccccgccggccccggtcgtcgtcgtcctctcatcgttcccggtcgtcgtggcgttcgtcgctccatcaagccgttctcgtccgtcgtccgcgttccgtcaagtgagccgctgcagccccgtcgtcgtcttcgtcctcggctccgcgtcatcaagcgttgcgccggccgcgtctcgccttcgtgcaaggatcactgccgaagtcgtcccctcgtcgttcgtctcagccgcgcccgttcgttgtcatcattcccatgcctcgtcgcgtgatggtaaggatctctccttcgctgcccccgtcctcgtcctttcggtgtcgccccatccctattgtgcggtggtcgaccccggtacccgtgtaccggtgtcggtagtcgttcacttgttcccgaagcgtggttcgcggtcgtcgccgaaggttcggaaggccgttctctttgagcaaggcaagtcgcatcatccttga

SEQ ID NO: 52388 - DNA, 400 bp, Oryza sativa
  Clone ID: PAT_MRT4530_54690C.1
cccacgcgtccgtgtctgcctgttcaataggcgtccgtcgccacctcccatgactgttaaagaggctcccgtcaaaagcggcaatgcctactacagctccttgtgcgaagacgggggttgccaaggtccaaccctcgaaagcacccccagctgtatcctctcatacagcccatatgaccacccaaagaactcgaacatgcgtaacatcccaccgtcccaagaccttaaagacgtttaggggcccaagcttcctcagagccagatccttagggaggcccaagctagtgcagccccagtgccttaaatctccccctaccactgtatgcgctttgtagaagacctaaaagatcaccactctgggctccatggtggtccttagggcttgcacgacgtacatcca

SEQ ID NO: 52389 - DNA, 267 bp, Oryza sativa
  Clone ID: PAT_MRT4530_54691C.1
atgggtcccaccaccccaccttctctacccatctccatccctctcaagccgcttcctccaccgcacgagtgcacgctgtcattggtcgtcgcgcctccacctcccccaccgtcgttggggagtggccacccaaatctcaagaccgggtgcgccggcgcgcgtgggcgtgccccggcgttggagcattacgacaagcacctcgcgggcgacgcagtagggacagacggtgctcgtcacagagctgaggcgagcgagatgggtggatga

SEQ ID NO: 52390 - DNA, 264 bp, Oryza sativa
  Clone ID: PAT_MRT4530_54692C.1
ggcctgggcgtcccgcagcgcccggggatcgaagcgacgagatcgcccgctccccaaggagaacgtgctgctccttgaagagcctgagatctacatggagtgtatatatacagtatatgatgagagcgaatgaccatgtttttagattgtactataccaatatatagctataattgattactctctgggggctaagtatctacgaccgattatggttgctatccaaatataatataaggttataatataatagtaaaaaaaaaa

SEQ ID NO: 52391 - DNA, 1929 bp, Oryza sativa
  Clone ID: PAT_MRT4530_54693C.1
atggctggcatggaggatactctgcaggcacttaacgacctgatttcccaatttctctgcttgaatcggcccctctggtctagttctgatgatgctgatgccttcttagaagctgtggatgaactaacttccaccatccacagccttgaaagcatgtcagcggaccatatcctccttgagagttttgaccatcttctagagcgttgttccttgaggcttggagaagagttgcagcacctgattgatgcatctggcttcgataccaactgcagctaccccaacaccaggaaaagccatgatgatgatgatgataggcacacccttgtagcccagccagttagcaacttcgacatcattgttgatgctttacctgagggcgtaatctttgaggcaaaccgaattgcaaagaggatggttgccgctggttttggtgattcatgtgctgagacctatgcttcttcacgcctcaacttcattgatgagagcattgcacgccttggggttcatgctcacatggcagagatgttcaagtcagcatcgtgggaggagcttgagattcaaatcatgtgctggatccctgcaattcgtgttgtgtttcacatcttgatcccaagtgaaagacacctgtgtgatagcatttttgagggtttcacatcctacagtgacgttgcttttgtcactgcgtgtcatccatttctccaactcctatccttcggaaattttattgccgctgctggaaaaaatccagaatgtctattccgcatagttgatatgtatgatgctgtacgtgatatacttcctgttcttgatgatgcttttaatcctgaagtagctgctcttcgtgaatgcctcggattgtcaattaaggccatcttaatggctcttgaaaacctagtacgacgtgatccaagtgagtcttgtccactagatggtggagtgcatccaatgacaaggtatgtgatgaactaccttgtgacagcatgtgtttctcgccatactttggaagaagtgaggctattagagtttggtagttctgatccttctggaaactgtccaatagaacctgatcgtccaacatcatcactggcaatccaccttgcttggattgtggatgtgctcacgggaaatcttgtttcaaaatccaaggtttatagccatgctcctctcagttgtgtcttcctggttaacaatgggatctatataatcaagaaagtcaatggttgtgaactcaaggtcttgctgggtgaggattggatcaaggtaatacattcaaaggttaaccaatggattttggaataccgacgggctacctggggtaaggctatcatgatacttgagatggacaaaaggttttgcagcaacgtgaatgttattacagagaagctgagccgttttaacaactttgtagaagcaatttgccaagtgcagtcacggtgggtcttggtggataagcagcaaggagtggattttagcattttagtggaggagctggtaattccagcctacagggatatggctgagatgttgaaggcaacaggatctgcaggagagtcatatatgcgacttgaggatgtgagatcacgaattcagcagttgttcaaagcaatgaccaggtgaagtgcttcttctgggtgcgttgtgctaatctgcgttataatgtttctcagggagaccagcctaaggtgtgtagcatccttgttttagccacttgtattattttcacagtatgtgctgtagtggttgatgctttactaattgggatcatgtgaactctggagtcctagagcaactaatgctaatatactactgcactgttttacccaggatttatcttcttctccctctgctccatattgtaagacattggcctcgtcccggtcagacttcttaaactttgaccacagtttataaaaaaaaaaaaaaaaaaaa

SEQ ID NO: 52392 - DNA, 633 bp, Oryza sativa
  unsure (1)..(633): unsure at all n locations
  Clone ID: PAT_MRT4530_54694C.1
gaattgtaatacgaatcactatagggngaattgggtnccgggnccccccnccaatttttttttttttttttttaataaaanaatgcnaatgaactatttcnttttgaattgcactcnttaataataaacttcnaggantcnttgatcttacataaaattattgnaaaccataagtnccaaaaatatgttccanaacatcttttatttatttcnantgtganganacaacaaaactcnttaaagcttaaaacaacaacatttctcntgccnaatcctgcancccgggggatncactaattcnanaacgggcgccaccgcggnggaactccnncttttgttcccnttaatganggttaatttccaacttggcgtnatcntggtcntancngtttcctgtgtgaaattgttatccgctcncaattccccccnacattncganccggaagcnttaagtgttaagccnggggtgcccaatganttanctacccccnntaattgcttgcgcncctgncctttccaatcnggaaaccgtntgcaccgcattaatgaatcgcaccccnggaaaggnggtgctntnggccctccnntccccccctaatcctgccccgcntcggtggggaagggtcatctccc

SEQ ID NO: 52393 - DNA, 1068 bp, Oryza sativa
  Clone ID: PAT_MRT4530_54695C.1
atggacgacggcgctgccgccgccgccgccgcagggagggagacgacgaagaacaagaagaagacggtgtgcgtcaccggcgccggcggcttcgtcgcctcgtggctcgtccatcgcctcctctcctccggcgactacgtcgtgcatggcaccgtccgtgacccaagtgatgccaagaacggtcacctgagggagatggactacggcgccggcgagcggcggctgcggctgttcaagcccgacgtgctggaccgcgccagcgtggccccccccgtcgccggctgcgccggcgtcttccacgtcgccagccccgtccccgcctccaagccccacaaccccgaaatcacattagaaactaaacccggaagaaacgtcgcggaggtgctggctccggcggtggcgggaacgcggaacgtggtcgaggcgagccacgaggcgggcgtcccccgcgtcgtggtggtgtcctcccccgcccccgtcatcctcaacccggccttcccccgcgacgccgtcctcgacgaggacgcgtggtcggacgagcactactgccgatccatagagaactggtactgcctctccaagacgctcgccgagcgcgaggcgtggcgtttcgcggctgacaacgccgccgccatggacgtcgtcaccgtctgtccgccattaattcttggacctctgctccaatcgaccgtgaacaccagcagctccatcctcatcaacctgatcaaaggcggcggcggtgatgatgaggagaaggccgccaccacggacaagaggaggaacgtggttgacgtgcgtgatgtcgccgccgcactcatcctgacgtacgaaaatccggcggcttccggccgctacatctgcagcgcatacgacatcaaggtgtctgaaatggttgacatcgtcaggcgcttcttcccggatatcaactacccaaagtttgtgggaggggaggatgagaggattttgagctccaagaagctgcagaagctggggtggaagttcaggacggtggaggaatgcctgagggatagcgttcaatcctacaaggctgctgggatcctgaaatga

SEQ ID NO: 52394 - DNA, 338 bp, Oryza sativa
  Clone ID: PAT_MRT4530_54696C.1
cgtggagactttgtggttcacatggctaccacgtggagcccctgaggttccgtgtgcttacacaacccagtgagtttcccaaatagcttgtaaacttgttggtaatagagagtaatgtttaccggtccttgaagaggttacactgagggttttacgtgtttctagttgtaaactttgggttaccctaggtaatatgaggtgacccaagtttttaccttaaatttttggtaattcactggaacctcctctagcacctgtaaaattgctctttttaatagaagcgccactggagaaaagggtaaagctttttgttgaaaaaaaaaaaaaaaaaaaaaaaa

SEQ ID NO: 52395 - DNA, 153 bp, Oryza sativa
  Clone ID: PAT_MRT4530_54697C.1
aaaaaactggatgactaaaatgcaagctcgcgcacataaaccggatcatatgcttaatgattaagcagactatggatgacggtcttgtgatgagtgtatataaagaactgtgagatgaccacatgtcaacgtctggatatttctaggatctaa

SEQ ID NO: 52396 - DNA, 232 bp, Oryza sativa
  Clone ID: PAT_MRT4530_54698C.1
ggcgtggctcccctgaccagacggcgcgatgggctggtgcgcattggatgtgcaggcggcgcggagagggcagcagtccggagcagggaggcggctgacgcttgtggaaggggggttcataaaaggaaggatcctataaagggtcgacactcagtaaaacataggactggggtagcaaaagaaataaggtatgattaactatcatgaccactagcaatgaatactgtactgc

SEQ ID NO: 52397 - DNA, 376 bp, Oryza sativa
  unsure (1)..(376): unsure at all n locations
  Clone ID: PAT_MRT4530_54699C.1
gggaaacgaataaaatcattattgcaaaaacatcatcttcttcttcatcttcttagtgtacacaacaccaactcgatcatcatctcgtcgcactaaacccatcttccccaacccaaagacaacgaactcgctggccacaaantccattccaaccacaattaacccccactgctaagctacggttccccccacttttcacttnngccggggaccgannagttggtgnngcgtaccgcccaggncnngttgttgtttgaaccgggnngtcggcgagggtggtttcggcgagggttcctcgagggggccccttgccccggtgaccgatggcccctggacgaaagaagcccgaaccatggnagaacatggccgaggccgg

SEQ ID NO: 52398 - DNA, 1471 bp, Oryza sativa
  Clone ID: PAT_MRT4530_5469C.1
cacacaagaaatctcacccaaaaaaaaaaaaaccaaccaatcaaaaaccaaaccatggcgcgccaccgccaccgcctcgccgccgccgcggcgctcctcctcctcctcctctcctccgccgccgcgctgtcgtcatcggcggcggagggggaggaggacccgctcatcgagcaggtggtcggcggcggggaggaggaggacgcgcagctggacgcggaggcgcacttcgcgagcttcgagcggcggttcgggcggacgtaccgggacgccggcgagcgcgcgtaccggatgtccgtgttcgccgccaacctccgccgcgcgcggcggcaccagcggctggaccccaccgcgacgcacggcgtcaccaagttctccgacctcaccccgggcgagttccgcgaccgcttcctcggcctccgccgcccatccctggagggcctcgtcggcggggagccgcacgaggcccccatcctccccaccgacggcctccccgacgacttcgactggcgcgagcacggcgccgtcggccccgtcaaggaccagggttcgtgcggatcgtgctggtcgttcagcacgtcgggggcgctggagggggcgcacttcctcgccacggggaagctggaggtgctcagcgagcagcagatggtcgactgcgaccacgagtgtgatgcatcagaatcgcgcgcatgcgactcaggatgcaacggtggcttgatgaccacagccttcagctacctcatgaaatccggtggcctacagagcgagaaagattacccgtacgctggacgagaaaacacctgcaagttcgacaagtccaaaatcgttgcccaagtaaagaacttcagtgtgatctccgtcaacgaagatcaaattgctgccaacctcgtcaaacatggccctcttgcaattgcaatcaatgcggcctacatgcagacatacatcggcggcgtgtcgtgccccttcatctgtgggaggcaccttgaccatggtgtcctccttgttggctacggatcggcaggatacgcaccgatccgcttcaaggagaagccgtactggatcatcaagaactcgtggggcgagaactggggggagaaggggtactacaagatctgcaggggacctcatgacaagaacaagtgcggtgttgattccatggtctcctcagtgactgccatccatacctccaaaaaggaggagtaggataggattagtctcctctttgtctttgcataccacacactttgtaatttgctcttttgtggttgaaactgttagtggttaggaccattctgtggtgttgctcgattgctatttatgatcagcaaaaactgtgaaaacttcctttacttgatgtaatagtacatatttgttcggatcattacatagtgtttggacacatggaaatggctgtaactgtgacaatgcatattagtatatataatctggtgaagcattcaacatttgctgagaa

SEQ ID NO: 52399 - DNA, 394 bp, Oryza sativa
  Clone ID: PAT_MRT4530_546C.1
atcaatgcgagcggcgccggctgcgcctcatcggggatgtcctgtgcgtacaacctctccagggaccgatctgcaagggtcagcgccatatagcatctgagaacctccagcgcgggtccgggcatcggatgccagctgttttccgccagggaggcccacaagcctgcacactggtctctcgacaagatcaggctctcctgcagggcgtgggcagcctgcagcatcatgtagcacgcctggatattgagcgctacagccatgaggctgctattgaggcgctgcaacgtgaagctgagcaacgccagggccgataggacctcacatgaacgacggacgtgtagaggcaagaggatcaaccaaccactggtacgactaaagcaacagacagcgagga

SEQ ID NO: 52400 - DNA, 443 bp, Oryza sativa
  Clone ID: PAT_MRT4530_54700C.1
gttttgaatggtaggctggactaccctggtgttgggcctgagcatagctttttgaaggatattggacgtgctgaatatgacagcgtgacagatcaggaggcactggatggtatgtgtttcagtgtcactatctacggttctcttctctgatattttccttccacttgattggtggaatatctactataaatgccaatagtatatctctttgatggtggggactgctaatgagtaagagtaggctaatagaaccaacaactgttaaaaactgttattcttagtagcatatattgtgaatgttctgaactttcttgatacgagtttaagcagggctaaggcaccaattttgttggttggcccctttaccatcttaatgatattagagcaactacgcctttgttgtctgcaactctatctgattcacatgttagacaaaaacttta

SEQ ID NO: 52401 - DNA, 1542 bp, Oryza sativa
  Clone ID: PAT_MRT4530_54701C.1
atggacgctgctgctggaaagacattcttctcaaatatggttagaggtgccactaacctgattgagaagatgatctcaaacataggttggagcaaggaacgactcttaacccatcaacgcggcatgcacaccatcatggagacggaaatgctcgctgctaagttggatctccttaaaaagagactagacaacagtgagaaatacgccaagcagggtactgttaaggccctgggctctcacatgacatggaatattacgtacgaaccaaaaccaacagaacatgaggaaggtcaaagtaaaaccctgacggatagcctcatcgatttcatggtgaacttcctggagcgggaagaaacgaggatccgtcgatacctcaagttggcattcaagaagccgggaatacaggccggtcaacctgcgttcccagtttcgaagaggtcaccgaccgcaccaaaaacaaagaaggtgtggcgagttaaggagaaggcacccgtccctgtatctctggaaccggccatgaagaaacaattttcgggcatattcaagagaggatcaagcacacagttaaggcgacacgatgagcccagcacaccctcttccgccgatacatcgatggaggaggcggacgttccaccaaggctatacgacaactccgatctcgacctcatgggcgaccgggaactgcaagcctattacatgctaaaataccgaatgcttgctcacacccaagcatacgacctggaccttctgaaaaggatagccgatgtccagatagttcgtaaagacgaacttatcctcttgtatgccatggttaagagaattaaggtttcacccgttcagtgcatgattagtcagtggttagaaaacataaggttgaccggtcctgttgagtgtacatctttggttacccgtctagcatgtagagttggggctttgattaatatgcaagtatcttatattactactccccgctcttatgttgatgaggcctatttggttcaaggccacatactcaagcatggtccaaatgatactcttgtgtttttcttcctcggttatacaaatgagatcccgctacctaacccggggttttatttgtataactgccaagaactaaccatttctctccaagaggagttgtatcgtgatgtcccacgcagggtaacacgacgaatggcgatagaagcaccccaggaggcgtcttcctcttcaccaccagtgcggatgtatagagacagttgggacccaaccgcggatgcccccggttggaccaaagtcctgcagtatgatgccggagtttcgacctggcagagtgccagtgacaaccggtgttcaagtggtctacctcctgcctcccggatgcgtcgctcagtctcctctcgaggggatttgggtgaacttacccaaaggatgggcatacttgaactgcagacagggagcatgcagcacacgctggagggacatgtggtgcagacacgggagtggcagcaatctgttgatgcacaacttgcaaatctcaacaccacgatgcaacaacagtaa

SEQ ID NO: 52402 - DNA, 1947 bp, Oryza sativa
  Clone ID: PAT_MRT4530_54702C.1
atggacgctgctgctggaaagacattcttctcaaatatggttagaggtgccactaacctgattgagaagatgatctcaaacataggttggagcaaggaacgactcttaacccatcaacgcggcatgcacaccatcatggagacggaaatgctcgctgctaagttggatctccttaaaaagagactagacaacagtgagaaatacgccaagcagggtactgttaaggccctgggctctcacatgacatgtaaggtctgtggaaatgacggtcactctgggacagatcgtccggaaacccataaggatgtcatgttcatgaataacaacaacggtatcgtccacaaagagatgaaggatgaacatgaggaaggtcaaagtaaaaccctgacggatagcctcatcgatttcatggtgaacttcctggagcgggaagaaacgaggatccgtcgatacctcaagttggcattcaagaagccgggaatacaggccggtcaacctgcgttcccagtttcgaagaggtcaccgaccgcaccaaaaacaaagaaggtgtggcgagttaaggagaaggcacccgtccctgtatctctggaaccggccatgaagaaacaattttcgggcatattcaagagaggatcaagcacacagttaaggcgacacgatgagcccagcacaccctcttccgccgatacatcgatggaggaggcggacgttccaccaaggctatacgacaactccgatctcgacctcatgggcgaccgggaactgcaagcctattacatgctaaaataccgaatgcttgctcacacccaagcatacgacctggaccttctgaaaaggataggtatggatgctgagtttcatactgtttggcgtgctttaggatgggataaatttgcatgtgtagatgaaccggtaggcgatggtgttaatttccggttattctgcaaggaatatcacctttcttggaaagaccttagcttgcatctaggctttgacaaaacatgcaaagttaatttcagtaacgcatttcctaattttaacaaacgtatgttttggcaaagtattttgggtctcccattctgtaaaaagcctagaactaatgacacccataatcctactcttaggcttatgcataagtggcttggttttactttgttccctagagccgatgtccagatagttcgtaaagacgaacttatcctcttgtatgccatggttaagagaattaaggtttcacccgttcagtgcatgattagtcagtggttagaaaacataaggttgaccggtcctgttgagtgtacatctttggttacccgtctagcatgtagagttggggctttgattaatatgcaagtatcttatattactactccccgctcttatgttgatgaggcctatttggttcaaggccacatactcaagcatggtccaaatgatactcttgtgtttttcttcctcggttatacaaatgagatcccgctacctaacccggggttttatttgtataactgccaagaactaaccatttctctccaagaggagttgtatcgtgatgtcccacgcagggtaacacgacgaatggcgatagaagcaccccaggaggcgtcttcctcttcaccaccagtgcggatgtatagagacagttgggacccaaccgcggatgcccccggttggaccaaagtcctgcagtatgatgccggagtttcgacctggcagagtgccagtgacaaccggtgttcaagtggtctacctcctgcctcccggatgcgtcgctcagtctcctctcgaggggatttgggtgaacttacccaaaggatgggcatacttgaactgcagacagggagcatgcagcacacgctggagggacatgtggtgcagacacgggagtggcagcaatctgttgatgcacaacttgcaaatctcaacaccacgatgcaacaacagtaa

SEQ ID NO: 52403 - DNA, 570 bp, Oryza sativa
  Clone ID: PAT_MRT4530_54703C.1
atgtgtcaagatcagtgtgaatgttggcaaaacaggacggaacagtgtgaccgagataaagctaatatatataatgtaggcggtgttggtgatggagatcaatccaaatatgtttttcaggttaccgacggcagtatcagcagcagcagagctagagctagctggaacccatgtctgatgggcgacgcgacgagacgcgatgtatggagatgtgaattgagagattcggcaacacacgcacacactgttggcgacgcaagcgaccaaacatgcgctttatcgcagtcgcgggtatatttgtccctgccgcgtcatcaccgtagcacacgcacacacgcacccaacgaacgccggatcagccaacgacaatgcgcacaaaaacccgatcgatcgatcgccgtcgtcctcgtcgccgtcgtcgtgaccgacgtgtctccggccaccgcgccaggtgtcacggccaccggagacacacctgtactccgttctagatgcaccccaactactctgaatttctctgctactactgtactgtgctacaactactctctgctgcatgcaatgcaagaa

SEQ ID NO: 52404 - DNA, 414 bp, Oryza sativa
  Clone ID: PAT_MRT4530_54704C.1
atgggtgcggccagcgaggagagaaccttcccgattcgccgcagcgctcagttcatccaccgcggagacgaacaccatcaaacaccaccagagcacgagcaggtgcccaacactaatggagcgctccgggttaccaatggaaggcggcggcgaaggggcgggacggcggaggtgaggtcgtctttcccccctctcgtggaggcgagtggagtggaggccctcaccggcggcgcgggcggtgcagtgccgtcgccgtcgccggaaaaggggacggaggccgtacgtggtgggggtttgggtaggggacaagaggggagcgcagaagagtcggagacgatggaatggagtttccgcaagttgggctggctcctgctggcccaggataaggtggtcgagttccggttaggcccatag

SEQ ID NO: 52405 - DNA, 408 bp, Oryza sativa
  Clone ID: PAT_MRT4530_54705C.1
atggtgcgcatggctgttgtggacctggagtggtcacagcatggcacatgcgctggcactggacacacggacatggccaagaggggacgttcctggcctggggttgatcgacgggggcgtcgatctctcttaagggggtgagggtgtaacatcccggcctagggcttaataggattaatagaatactcatattaacaagttacaacttcttttccggaagccgatctccaaaaaaactgagggttaagcgtgcttggcctagagcaatttgggatgggtgatcgaccgggaaattcttcccgagcaatttgggatgggtgaccgaccgggaaattcttcccggctgcatgtgttggtctgtgagggcagtctatgacctataagctatcagatgtaagcgggcccggc

SEQ ID NO: 52406 - DNA, 517 bp, Oryza sativa
  Clone ID: PAT_MRT4530_54706C.1
gacgagggtagcatactactgtgctaagccgtctgacgagtgtcagatgagtgctctcgctggtgcactggactttgtgaaggacaatagagaatggatctgctggctgtgccctcaatgcgaaatgactttcctcactgcgaagaccttccagtcgcatgttgaggatgatgagttctcccggtcccaggagttcaaagaagcgctgttgtttgtgccggagaggatatctgatgaacagacagagtttattaagtgttggactctgccatctgatgtcaatcctactgaagaagctgagggagaaaagatcttgaccaagatcaagagtacatttcagtacctcaaggatcagaaggctctatctgttgatctttttgacaacctgatcaaattcacgaaaaaccggattgaagaagctgttacccaaaattatagctgcattacttctctggaccctggagggcttctgttgctggggacttatctggatttgcttcgattaagggttggtgat

SEQ ID NO: 52407 - DNA, 1392 bp, Oryza sativa
  Clone ID: PAT_MRT4530_54707C.1
atgggcggtaggtcagcaaaggagaccactttcctgacctactgccagcaagtgaggcagagcagggagaggaaaatgtggtcagagagctcggggatgaaggcattggccggcgaacttggggatgagggtgaattaggtgcacgacgggccaggagaggagaggaagttcagaggcgatttagacttctgtggaagttcaggtgcgtaaaatggaatttttcccatatggaagttcagttgatggattggatggttaatacaaagggtatgagcatgacatatgctcgatatgcattgcatttggaactcctttacagtgtgtatggcattgaggctgcagaggaatacttttctggcatcccttcttttactcgagaccagaaccatcgaacttatggtgcacttttgaactgttattgctctgctaaaatggaagagaaagctacaaatatctatcgcaggatggacgaacttggcatcccatccagtactaagctcatgaataacctgatgggcctttacctggagctaggccaacatagcaaggtggctaacctgtttgatgagatgaaagagaggaatgttcaaccggatgagctcacatgctgcattctgatgcgtagtcatgcagcacacaacaagatagatactgtcaaagagactttttacaacatgtcactattagatgtgcctaaacaatggtctatatttagaacactcggttccatctatatgaatgctggtatggttgaagaggcagaattggcttttatgagagctcaggaatttctcggttttgatcatggcaggcaccctttttatttccttatgaggcaatttgcatcaataggcaatttgagaggggtcaacagagtgtggaaagacataaaaatgactttttcttataacaggactaacttcagctacctcctcatgcttcaatgtctctataaactcggtgacaccgatcggatgaaggagatttataaggagtgggaatatcgttatgaaaactatgacccgaggctgacaaatatgttgacccgagctcatctaaggaatggcatgaccaatgaagctgaattgttgtgggagaaggtcaaggaaagaggtggtgatttcgatttcgaaacatgtgagctgtttcgggagcattacttggggaaaggggacacgacctccgctttgaaatgggctgaaaagatgaccaaacttcccaagaaacaagggaagcaagatcaggagacctgcaagttcttgaagtggttcgaagaagacaaggttgtggaaggtgccaaaagtacctgcaactgcagcaactgcttgaggaatgcggacagcaagacatgtgaacccctcctggctcctgcagacctactccccgactga

SEQ ID NO: 52408 - DNA, 1155 bp, Oryza sativa
  Clone ID: PAT_MRT4530_54708C.1
atgggtaggatcgggagagaaaagatgagcaagggtggatgcggcgttcgagtcgtcattctcggtggcggcagcgtccaagttatcgttcccgatggtggcggagttgatgtccaggaggaaggaaagtaccaaaaggaaaacaaagagcaggagtaccttgaagcgatgatcatggccgcacacgttgcggcggcggctcctcgactgcttgcttgtagatggaaccgtgtggctcctctacccacttcgccgtcgcgacggcctctccaggcgcaggcggcggcgcgcatggaccgcccgcgccacgccgtcgtcgttcgctgcaagaagaagaagaagggcgccgccgatgagccagccggcgagcccggcctagaggagggtggtgatccccatcagtctccatcgtaccagcaatatcgtaagtttcaagacgtaattgaccagctccagcagtgtgcggccgaattaagagctcgtcgatcactcaaaaaggacaatatggacgatacaccattcaattatgagataaacaaaattagagggtactggacggagatacattcagcgaagataagttatttggatggacaaggcaggatgttaacaatgactcttctcttaagagctaaagatgctatcgagttggcttctagaattatgactgaagctcatttgagagctcaaacgccaagtgaaatttcgctgcatacggtagatcagaccgtcaggatgtatgtatcgacctttgttaagactgccgaggacacttaccataggaaggttgatagagcaaccattctttcattcctctgtgctcttcaaggtttggctgcagttagccatatcttgtttgaagatgctttggcttttgttcgtagcagtcaaccggattacagtccaaatcatgatgtcgaggtaattaaccgttactatcagcaggagataaaacgtttgataaataactttagggaggcttcaacaaccgaagcacttgagattcttcatagtacggttaatgatttaacgcagaaagtagcatcttatgttaccaaaatgactactcttcgcaagagcacactagcccatgtccctggccgctccattgcatactgtgatgctgccccaccagatgacaggcaaaatgagtag

SEQ ID NO: 52409 - DNA, 501 bp, Oryza sativa
  Clone ID: PAT_MRT4530_54709C.1
atgactaatagtgatagaaaggagagaagggtgttagagcaacagctgagttttatgattatggaagaaaagctgaaatggtaccaaagaagcaaagttaaagaaatattagagcgggattgtaacacaaaatattaccatgcaaaagcaaatgggaggaggaaaaaccagatacactccctctctcaggaggaggaaaacaccatgaattttgacatgggtggagcttctacagtctctgaggaagacaaagcaaggctcattcagccttttagtttggaagaaattaagactgtggtatttgaccttaaacacaataaagcccctggggagttttatgccaaattctgggacttgataaaacttgatctcttagatttattgaatgactttcataaaggaattttggatgtagagaggctcaactttggcattatcactttggttcctaaaactaaggatgctgtgcaaattcaaaagtttagacctatttgtctctga

SEQ ID NO: 52410 - DNA, 400 bp, Oryza sativa
  Clone ID: PAT_MRT4530_5470C.1
acgagggtggaacctataaatgatgttgattcagagaagaataaggtttcttcattgcaagcctgtgaaagtgtgtcagcggctaatcttctaaagtttcatctgcgtccatatgctcaactggggctggacagatcgtctataccaagccttactacttatggagatattgtagatgagctcttgtcggagatcccagagattaaagaagttcctgaacagattagcaagttctggcaaagtaattcagttggcaagcatatgctcatggttgaagagccatggattactgagaattcctctgtttgtaattttgtagacgaaaatagtaattcaggtaagttacaagatggcactccattgagagcaagtggctggagaaagcacccaaaggacactc

SEQ ID NO: 52411 - DNA, 426 bp, Oryza sativa
  Clone ID: PAT_MRT4530_54710C.1
atgaaagcctcaaggtctccagacgtggccgttccacacgggctagtcgctgaagaggatgaagtggatcccgctgatgaggagttcttccaggagcaagtcggctacgatgattgtgagctcgggatctatccgcagcccaacatgactgttaatttggagcgtcacgggcaagttccgttcggggctagttcagggcgtgacaaaaacctttcacgagacgctccatgcaaaattgacattgggtgctctatattgtcacacggcgaggccactgggacaagagatagggaggagggttgtggtggaggggcttcattggcagtatgctccagctgcgcccacaccgaggctcgtggaggcggcgagcgcggctaccggccatggggcaaggtgagaaaagagatgaggaaggaggcatcgtga

SEQ ID NO: 52412 - DNA, 2529 bp, Oryza sativa
  Clone ID: PAT_MRT4530_54711C.1
aagacgcgtgggcggacccaaacccgccatgtccaacgtccccttgctcctcctccttgtcgtcgctagcgccggcgcgggcgatggagccgcgccggcgtcgaatgcgcgcccgtgcgcctcgccggcggccagcgcctaccccttctgcaacgccaccctcccgttccctgcccgcgcgcgcgccctcgtctccctcctcaccctcgacgagaagatagcgcagctctccaacaccgccgcgggcgccccccgcctcggcgtcccgcccttcgagtggtggtcggagtccctccacggcgtctgcgacaacgggcccggggtcaacttctcctcgggccccgtccgctccgcgaccatcttcccccaggtcatcctctccgccgccgcgttcaaccgctcgctgtggcgcgcggcggcgcgggccatcgcggtggaggcgcgcgccatgcacaacgccggccaggccgggctcacgttctgggcgcccaacatcaacgtcttccgcgacccacggtggggccgcggccaggagacgccgggagaggaccccgccgtcgtctccgcctactccgtcgagtatgtgaaagggttccagcgggactacggagaggaaggcaggatgatgctctccgcctgctgcaagcactacatcgcttatgatttggagaaatggaggggctttacaagatacaccttcaatgccaaggttaatgcgcaagatatggaagacacataccagcctcctttcaagagctgcatccaggaaggtcgtgcaagttgcttgatgtgttcatacaaccaggtaaatggtgtgccagcatgtgcccgcaaagatatcctgcaaagggctagagatgaatggggtttccaggggtatattacatctgattgtgatgctgtggcaataattcacgaaaaccagacatacacagcatcagatgaagattcaattgccgttgttcttaaggcaggaatggatatcaactgtggttctttcctaattcgtcatacaaagtcggcaattgagaagggaaaggtccaagaagaagatatcaaccatgccctttttaatctattctctgttcagctccgtcttggtttttttgataagaccaatgagaatcagtggtttacacaattaggacccaacaatgtgtgcactacagagcatagggaacttgcagcagaagctgtaaggcagggtactgtccttttgaaaaatgataacggttttttgcctctaaagagaagtgaagttggtcatattgctcttattggaccagctgcaaatgatccatatatattaggcggtgactacacaggtgtcccttgtcattctaccacctttgttaaaggcatgcaagcatatgttcccaaaacaacctttgctgctggatgtaaggatgttccatgtaactcaacggatggatttggtgaagcgattgaagcagctaagagagctgatgttgttgttctaattgctgggttgaacctgactgaagaaacggaagatcatgatagagtgagccttctccttccaggcaggcagatggatctcatacatactgttgccagtgtaacaaagaaacccgttgtgttggtactcatgggtggtggtcctgttgatgtttcatttgcaaagcatgatccacgtattgcgagcattctttggattggttatcctggcgaggttggtggaaatgttcttccagaaatccttttcgggaaatacaacccaggaggaaagctgcccataacttggtaccctgaatccttcactgctgttccgatggatgatatgaacatgagagctgatgcgtcacgtggttacccaggaagaacatacagattttacactggagatgtagtatatgggtttgggtatggtttgagctactcaaaatattcgtacagcatcttgcaggccccaaagaaaatcagcttgtcccgttcgtcagttccagatcttatcagcagaaagcctgcatacacaaggagggatggagtagattatgtccaagttgaagacattgcctcatgcgaggcgctgcaatttcctgttcacatctcggtttccaacgatggtgccatggacgggagccatgccgttctattgttcgcgagttcgaaaccaagctttccaggatcccctataaaacagctagttggctttgagcgtgtgcacactgccgctggcagatcaaccgatgtggagatcaccgtcgacccctgcaagcttatgagctttgccaacaccgaaggcacaagggtgctgttcctgggaacacatgttctgatggtgggagacgaagagcacgagttgctcatcgaggcatgacaaagaggttacctttgtgtcacatctgccgtctctacagtccggagttcaagtctgggacagcaagtttacacttgtacacctgtacaagaagtgtcctgtaaagatttattggatgcaaaaaagattgctcattgcagcaaaatttatgacatcaataaaatgtggcaaactgtaaagaaaaaaaa

SEQ ID NO: 52413 - DNA, 374 bp, Oryza sativa
  Clone ID: PAT_MRT4530_54712C.1
atgggaacgacaaggactactcagattgtatccatattgattttcctagttctacttggacaaggggacacctatgggtataaatacaagaccccctaggaggagaggggacacggacaacatagacgccacaaagccacaagccaatacaagcctacatacgccaagacaagctgccagatatcgacatcggagttaagcctagtaaaaccccatatggtacctacgggaaccaaagagaggaatctagcgctctctctgatctcgccgggcatggattcgaggaggaagattactttgttgtcgactacgcgatgatactttagtccgctatgtcgataacagttagataggctaccccaaatattatactg

SEQ ID NO: 52414 - DNA, 159 bp, Oryza sativa
  Clone ID: PAT_MRT4530_54713C.1
ataactgatttttgattatattttttttgatgtataataatatgtaatgattggaaattatttagttagcaacaaacaaaattttaaggacatgggaaacttacgagaagcccgtcacatgatacacaacttgcaagatagagcatagcaaggaagtga

SEQ ID NO: 52415 - DNA, 930 bp, Oryza sativa
  Clone ID: PAT_MRT4530_54714C.1
cgccgccagatctcccttcatctcgatctctctccgtcgcgccgcccgccacgagacgccgcgccacgacgacgacgcgccacgccgacgccgcgccaagccgccgccggcacgccacgccgccgccttcgccggcgcgcgcgcaatgccgccgccggcacgccacgccgccgccttcgccgccgcgcaacgccgccgccgcatgccaacgccacgccgccgccgccgtcgccacgccgccgccgccgtcgacacgccgccgctaccttcgccgccgcgccaaccggcggcccgatgccggcacaccgccgttaacgaacgagaacgagaacgatcgaacgaacgagagcgagaacgaacacgtcaacgtacgttgccgcgagaacgtgtacgagaacgagaacgatcgaacgaacaaaagacgtgttgtcggagtcgtctgtcaagccggagtggaagagctagccctagaaggaattggagcaggcaaatggctgaccgcgatgaggaacagatattgtacgatacaatcgcggagggaagcagccagtactggaatgaagaagaggggaacgaggatccaaaccagtacttgaacgaggaagggaacgtggagagggatgcggaggggaaccagcaggggcacgtggaaagggatgtggaggggaaccaggaggaggaggctagtggtagtcaaccctccgttgaacagaagagggcacgcgggcaacgaggtgcagcgaagaaacttgagggtcggcacattataacggaagtggaagaagatggacgtcctagtgccccggccgaagccgccaagaattatgtacgtcacagcgattgggttgtgcgggataacgggcctttcattccggggtactggccaaaaccagggcccgccggaaacatgaaagacttgccccaattctg

SEQ ID NO: 52416 - DNA, 210 bp, Oryza sativa
  Clone ID: PAT_MRT4530_54715C.1
atgggagcaaagaccgagctgcacttgaaggatctggaacagctcggtaacttcatgatcaaagccacacattggctccgctgccctcctatcgagctgctacatcggcacgacccccgtgccaagaaggaaaagaccgagctgcaccagaaagatctggaacagctcggtaactacatgatcaaaggcggtggccatgggagcaaagag

SEQ ID NO: 52417 - DNA, 475 bp, Oryza sativa
  Clone ID: PAT_MRT4530_54716C.1
ttttgttttccggcaaaacaatggtggcctgacatagatttgaatcatacaaaggggagagctacatcatttacatttggcagagtcaccatcagaagattcgccagattggctaattcttggagaagttaagagcaaagaagagatttgccttcaattctactacatcagtgccacgagacaatcatccatacaaaatgttcctgaaccactagaagaagaatggcagctggtagctaagacagtctacaatcttacaaggtcctgcctagctagttcccggagcaattcgcttacgcattaatcccatttcaccctggaaattcaagaatcaagatccatgtcgcaatcaaactaacagtcgcaacgagaagttagagatgttgtgattcactgctccttccaaatccttccggtgacacgcagtttgagctccttcttgtcgccaccggagaagaacaaggccatgttccgc

SEQ ID NO: 52418 - DNA, 362 bp, Oryza sativa
  Clone ID: PAT_MRT4530_54717C.1
ggggaaaaacctcaaaagagggcagtgagagcctgttttcattaaagatgaagacacttgccccacgttttccggggaacccgcccccaagaaccttacctaaggacggtttcaaggggaaacctgggaaaccccccacggagaacaaataaaaatcttgggacggcacaactggaggggaacatggttcatcaaaccgaaagacctctaatggctatgaccagaccacagacaacttagagcagggtcttcaagaccagtcctcccaggaggaaacagggcctttaggataaagaaacgaccgttggcaggtcagaacagggttttcaccccaagaaaacggggaaagcaaataacgaagc

SEQ ID NO: 52419 - DNA, 474 bp, Oryza sativa
  Clone ID: PAT_MRT4530_54718C.1
atgattatggctctcgtgaattccaaattttgtactataaaacatttttggttccggaatggcggaaagccaattgcacgattgcgcgcgtacgttcacgccgccaaccacaaccgcaccgctcgacgcggcgcgcaggacggggaggagccagatgcggctggtgccgaccgtgacacggcccggacgaggacgagccacgccgcgagacggaccaccagcctccgctcgataacatcctgcaggagcacgagcgccgcggcggccggcagcggcgtcgacgacgtcacccgagtgcgcgggtggcgtccaccaaaatatcccccgccgttcggagctcggcaatcgcgcgagcgaggagacgtcggcgaggaggtgataaagattgaggaacgcgtgcagctccatttcgtcttcttcgtcaaccactccgagttcgaggtggccaaggtcctctgctgcctccgcgtctga

SEQ ID NO: 52420 - DNA, 444 bp, Oryza sativa
  Clone ID: PAT_MRT4530_54719C.1
atggttggaatggcggttgtggaggtcgatgcaccggtggaaggtggagatgagaggagcatgatttgcggaggaacgacgcaaggtcggactattctcccttgtaaagacggttgtaaggcggttgtagagattggtgtagttgtaactgtcattcgggagctctctagaatgtccacattcggtttgagcttacttgtgggcccatcgttccgtgtgctcgcatgtgattcaccggagatcatcgaggatgatgacagatccgagactgaccacttgcttcatgttaaccacttcatgcagatcaagcatgttgaccatcgtcactccctccttgttcggaatcattccaaccaagttatcttgcatgatttcctggccgatgttcattccaaacaggattcaagggctaccatatatcgtgtagaaaatatggcatgcccc

SEQ ID NO: 52421 - DNA, 763 bp, Oryza sativa
  Clone ID: PAT_MRT4530_5471C.1
atggagatgacaagctacaacgacgtcgacgccggcgacatgttcgctgctgctgattactactcggctggcgccggcggtgatctcttcgatatggtgtggcctggacgacgacgacgggaagaagacaacaccagcggctgcctccccttgtcgccgccgccgccgcctgagctcgccgtggatgatcagctactggctggaggcgatggcggcggcggcaaaccggtggcggtggcggtggcggaggacgacgactccggtgagcggtggacggaggaccaggttccgacagacgaagggatatgcgtcatggagaaacgaaggtgcaagataaacgagaacctgaagaccctgcaacagctcgttccagtttgcgacaagtccaataaccaggcctcaacgctggacaaaaccatccgctacatgaagtcactgcagcagcatgcccaggccatgtcagttggatgcagcatgaagacggcagaagcagcaggagtgacgtgccccttccttccaccgccgccaagcagcgccttgctggttatcgtggaggagggtcccaccagaccctgggatgcaactgctagatctacctctgccgctgctacctcttttgaccaccaccaccatggcgcactcattgaaaagctcctccaggtggtgcagtgttcttttgcagccttacatgctgtcgcttaagacgtccgtccgcgaaaataatgctatggtgatgcagaaaccgaatttctaccattcttaa

SEQ ID NO: 52422 - DNA, 305 bp, Oryza sativa
  Clone ID: PAT_MRT4530_54720C.1
atggagacagggatttttatacaggtttgggcccttgaattgtcagtcgacaacaggatagcctttctccttaaatccgtgcccggcgagatcaaagatagcactttcatctctcctgacagtatccggagacaccgtagggtactagccgtgcttatccctaaagtcaatattcggcgacgtgtcttggtgtatgtaggcttttatgttgtggcttctatatcgattgtgttgggttgtttccgtataagacatgatatgtgatgggtcctgccgagatttagtcaactactattaggtatgtg

SEQ ID NO: 52423 - DNA, 1752 bp, Oryza sativa
  Clone ID: PAT_MRT4530_54721C.1
atgagccgtctagccttgtccttggctcgctgctcgcatgtaaccgaagttggcgccgtcggcgccggtcacgccggcggctccaccgccgcagacgccacccgtgacgcctcctccggtgactgctcccccgccggtctcaccccctccggtgacgccaccaccggtgactcccccgccggtgtcacctcctccggtgagtcccccacctgtgacacctcccccggtgagccccccacctgttacacctcccccggtgactcctcctacaccggtggctcctccaccagtgccaccgtcaccgcctccaccgacgccgaccccaacgccggtgacgccgtccccacctccgccgccgaattctacgacccgcaccggccgccgtcgcagcagcagtcacacgcgctgtcgccgagcccctcgtcgacgccgccgctgctgctgcagccgcactcgttcgtgagcagcggcggggcgtccgaggcggcgtcggcggtgccggggatcgcgatgatgggcggcgcgttcgggtacgacgagctggcggcggcagcggacgggttctcggaatcgaacctgctcgggcagggcgggttcgggcaggtgtacaaggggacggtgcgcgggcaagaggtggccatcaagaagctgcggtccggcagcgggcagggcgagcgcgagttccaggccgaggtggagatcatcagccgcgtgcaccacaagaacctcgtctccctcgtcggctactgcatctacggcgagcagcgccttctcgtctacgagtacgtccccaacaagacgctcgagttccacctgcacggtagcggccggccggcgctggactggccgcggcggtggaagatcgcggtcggctcggccaagggcctcgcgtatctgcacgaggactgtcatcctaagattattcatagagacatcaaggcagccaacatcctgctggactacaccttcgaaccaaaggttgcagattttgggttggccaagtaccaagccactgagcagaccgctgtttcgacgcgcgtaatgggaacttttggatatttagctccagagtatgctgccacgggcaaagtgaacgaccgttccgacgtcttctcattcggcgtgatgctcctggagctgatcaccgggaagaagcctatcatggtgtctcacggtgaccagcctgacacattggtttcttgggcgagacccctgctggtgagagctgtggaggaggagaacttcgaggagctggttgacccgaggctggagaacaactacgacgcgtacgacatggggcggctgatcgcctgcgcggccgccgccgtgcgccacaccgcgcggtctcgcccgcggatgagccagatcgtgcgttacctggagggcgagctggcggcggaggacctgaacgctggcgtgacgcccgggcagagcgcgatgcagcggacgagcggcggcacgacggaccagatgaagcggctcaggaagatggcgttcggctcggccaccggtacgggcaccgtcagcgagtacacgagcagcgagttcagcgagccaactagcgagtacgggctgaacccgtccaccgagtacaccaccagcgcagccggcggcgacaccggggaggtgacggtggacgtgcagatgacggccggcgccagcggcgaggcggccggcacggagaggctgagcaggcggaccaccgctagacgtggcgggcgggttgcaacttggaatgaaatgctcgcttga

SEQ ID NO: 52424 - DNA, 798 bp, Oryza sativa
  Clone ID: PAT_MRT4530_54722C.1
atgtctcatatgaagacttttgctcttggcattgttgtccttgctacactagttcttgcatctgagagtcaaatttctcgtaaagacttaagcatcgaccttggtggcggtggtggtattggaattggtaccggaattagtataggcataggtggtggcgccggtggctccggctctgggtctggttcagggtcaggttctttctcaggctcaggctcgagttcaggctcaggctctgcttctgggtctggctcaaggtcgagtgctggttcaagcgtagggtcatcagctggatctagcgctggttctggagcaggctcatatgctggctctggtgctggttcgggatctggttataatcaaggtcaaggaacaggtgaaggtgaaggtgaaggtcaaggtcaaggttatggctctggccatggagcaggcacagggtcagggtatggcgagggacatggtgaaggaaatggctttggctcaggatatggtgaggggcatggcgaaggctacggtgaaggaaatggctctggctcaggatatggtgaggggcatggtgaaggccatggtcaaaggaatgcctctggctcaggatatggcgacgggcatggtgagggccacggttatggtcaaggatctggttatggtgaaggccatggctcaggacatggccaaggatcagggtcaggctatggtgaaggatatggtaaaggttcaggcaatggatatggaaatggttcaggctcaggctatggtgagggccatggctatggctctggttctggccatgggaaataa

SEQ ID NO: 52425 - DNA, 551 bp, Oryza sativa
  Clone ID: PAT_MRT4530_54723C.1
cccattctttctttggagggctcccccaatagagtgctcacgcgccatttcaacctgcaccaacgccggtgccacctctggctggctggatgtaaaaccctccagcatgaacacaacctgctgtgtctggtgaagctattgtatctggtactcctacagatcatgctgctatattaaaacatactacagcaccaacaactgcgaatcattctatagactatccatcaggaaatactgatcacgactacaagagaacgataccagacgggatgcctgaagacgtgaatcgtccaatgaatatgttacctgtcacatactaacagagtcataggtacccgcaacatgaggttgatcacaatgttgcacggacattgagccgaggatcaacacccaagagtgggaactcacatccgagtcagcaaactctccttcttgatggtaaccaatgttgttgacaatcagattatgggaagattgataccaaggtaacgaacttgttttatggaaactttagaggtttagtgtttctttaccaaaaaagactcaaatgg

SEQ ID NO: 52426 - DNA, 2139 bp, Oryza sativa
  Clone ID: PAT_MRT4530_54724C.1
gcgctcattaatttatctccaccgccgtcgccgccgcagccggcgtcctcgtccgccccgtcgtcgtcctccaacgggaccgtggcagtagccgcgggcgtggtcggcgcggtcgtcctgctcggtctcgccgccgtgctgatctactgcttcgtcgccaaggggcgccgccgccgccgaagccatcaccagccatcgccgtacccggtgtttccaagcgccgtcggcgccggtcacgccggcggctccaccgccgcagacgccacccgtgacgcctcctccggtgactgctcccccgccggtctcaccccctccggtgacgccaccaccggtgactcccccgccggtgtcacctcctccggtgagtcccccacctgtgacacctcccccggtgagccccccacctgttacacctcccccggtgactcctcctacaccggtggctcctccaccagtgccaccgtcaccgcctccaccgacgccgaccccaacgccggtgacgccgtccccacctccgccgcctcaccaccgccaccgcgaatttctttatccccaccgccaccgcccttgacgccgacgcagtcgggtgcctcctccggctccaagtcctccaacaacgggaccgtggtggccgtcggcgtggccgtcgcggcggtggtcgtgctcggcctcgccgccggtctgatctacttcttcgttagcaagaggcgccggcgccgccaacacccgccgccgccgcaccacccgggctacccacccttcccagccgaattctacgacccgcaccggccgccgtcgcagcagcagtcacacgcgctgtcgccgagcccctcgtcgacgccgccgctgctgctgcagccgcactcgttcgtgagcagcggcggggcgtccgaggcggcgtcggcggtgccggggatcgcgatgatgggcggcgcgttcgggtacgacgagctggcggcggcagcggacgggttctcggaatcgaacctgctcgggcagggcgggttcgggcaggtgtacaaggggacggtgcgcgggcaagaggtggccatcaagaagctgcggtccggcagcgggcagggcgagcgcgagttccaggccgaggtggagatcatcagccgcgtgcaccacaagaacctcgtctccctcgtcggctactgcatctacggcgagcagcgccttctcgtctacgagtacgtccccaacaagacgctcgagttccacctgcacggtgggggccggccggcgctggactggccgcggcggtggaagatcgcggtcggctcggccaagggcctcgcgtatctgcacgaggactgtcatcctaagattattcatagagacatcaaggcagccaacatcctgctggactacaccttcgaaccaaaggttgcagattttgggttggccaagtaccaagccactgagcagaccgctgtttcgacgcgcgtaatgggaacttttggatatttagctccagagtatgctgccacgggcaaagtgaacgaccgttccgacgtcttctcattcggcgtgatgctcctggagctgatcaccgggaagaagcctatcatggtgtctcacggtgaccagcctgacacattggtttcttgggcgagacccctgctggtgagagctgtggaggaggagaacttcgaggagctggttgacccgaggctggagaacaactacgacgcgtacgacatggggcggctgatcgcctgcgcggccgccgccgtgcgccacaccgcgcggtctcgcccgcggatgagccagatcgtgcgttacctggagggcgagctggcggcggagcacctgaacgctggcgtgacgcccgggcagagcgcgatgcagcggacgagcggcggcacgacggaccagatgaagcggctcaggaagatggcgttcggctcggccaccggtacgggcaccgtcagcgagtacacgagcagcgagttcagcgagccaactagcgagtacgggctgaacccgtccaccgagtacaccaccagcgcagccggcggcgacaccggggaggtgacggtggacgtgcagatgacggccggcgccagcggcgaggcggccggcacggagaggctgagcaggcggaccaccgctagacgtggcgggcgggtgtga

SEQ ID NO: 52427 - DNA, 129 bp, Oryza sativa
  Clone ID: PAT_MRT4530_54725C.1
atggagaatccatggggatgccgagcatgcaagccacactacgccgcctcccgccgctacttgggccgcaccgtgccacggctatcctcgtcgcactgcgacaccttctgctataatctcgctgcctag

SEQ ID NO: 52428 - DNA, 480 bp, Oryza sativa
  Clone ID: PAT_MRT4530_54726C.1
cttcatcagcggatttctgattgatcgatgctgaaatttctgacagtgtgcgccacagataattgtagcatgaatctcaggtacaaaacggcaggtgtgaaggattagagacatgtacggctcaatctgaccatatgctgatgccatcgtttgctcacactttactcaggcacacggtccagcagagacttgaagtcttgaggctttacaaggtcaagtccagatatcccaaagctcagtgaccctgactttatgttcacatggaacagtttatgagcacggcatgtttgctacaaatcatcaagtgtagaaaacgacttctgaactactgacctggtccagattcaggacccgaagtttatgactcaaaaatgcacagattaggattgcaatggacaagcacaggacaacatgatggaagtaatttggtatgctttttatttgaacgagatgatgcaaaagtttctgctgttttgggct

SEQ ID NO: 52429 - DNA, 853 bp, Oryza sativa
  Clone ID: PAT_MRT4530_54727C.1
gaccagccagggtacacaaacgacaattgttgatatacagatccacgtcttacaaaaatatattagattacaaatgtagcggaaaaggtaaaagcgcggcgactccactccacagccaatccttgacagcagcaacgaaaccaacctcaacgagacagctccaactaggaagatcttcagctctgctgatcaaccgaacacccccgaccgacccaactccatcacgcccacccttggctaggtacgtcatctagaggaaagctacactacaagcccagccgttgcccacgctggcttgtggccgaccggccggccatggcaaggcagcagcggcgcgcggccaccggcggtgcgggagatggcggcgactggcgcgaggacgacggcgggggtttctcaccgaggttggccggcgcgagaggagacaacggcgaacgacgccggcaagcagtggacggcgagtcgagcgggtggacgacatccggagtgacctaggaaagcaaaaaaaaaaaggatttagagggagagaggtggttcgcggcaagtggcaacgccggccgaaggcggggaaaatggaggggctcaccggcggcgggggaagacgatttccggtgggatttcagcaacgggaggcggcggccgaggtagcttccgcggcggcgaagctatcagcggcggtggtgcggcgcggcgagggcgctagtggcgacgtcgtgcgaccggagatgggcggcggcggcagagctcagggagagcggcacggcggcggtagagagcacgggaggacgcggcgagagcggaaaaagagagagggggctcgaccatttatttaacaaattttaaagctagaaag

SEQ ID NO: 52430 - DNA, 490 bp, Oryza sativa
  Clone ID: PAT_MRT4530_54728C.1
gcacgagggtgtagttactcttgggttatgtagaccagagtgtgtttgtttaccagaaatgacacaccaagtacatgactggagatgctatgaaacatattattaactttgatagaactgggaagtgcaatcttgccagttacagtaatcattgtctatctcacatggtttaaaagcatttctttcaagacatattatacatgtatatgtctaccagtgtaccacacaatatggaaacatggagaaaataggacattgtactataacatatctgataccttggttcaattttcattttggactctcgtaccatttaaaagatgtccacaaagtttcattactgttcaaaagacatccctggccgaaacaacccgatttttcatgagcagactgtttttctaaattattattaaagttggtcaatgtggacactgactgtgggatggagagtgatgggtggcttaacagtatatggagttgagccaaattc

SEQ ID NO: 52431 - DNA, 191 bp, Oryza sativa
  Clone ID: PAT_MRT4530_54729C.1
atctgaattgtcgaaaggaactttctggtttgtgtaaatatcaggtctaaacggttacaaactatagaagagtactcagatctacactggaatggcactgacagtttggatgcataatgaggtgatatgatggcgggcagctttctccaaaggtgttgctgaaatcaagttccacttatcgaattcatgaa

SEQ ID NO: 52432 - DNA, 1487 bp, Oryza sativa
  Clone ID: PAT_MRT4530_5472C.1
atggaagccccgggctccccctacgcctcctcgccggagtccgcccccaagcgcgccccccgctcctcgcccccgcccccgcagcagcaggcctcctccgaagttacatcaaaatataagaaatataaagttctcctgatccaccttgagtggaaagatgacaaggagaagccaacccatctgaggtttctggtatcaaacacggcagcaggatgcattattggcaagggtggatcaaccattaatgaatttcagtcccagtctggggctcgtattcagctatcgcgtagccatgagttcttccctggtacaaatgacagaattatcatggtttctggtctgtttgatgaagtaataaaggccatggagctgattctcgagaagcttttagctgagggggaagaaagcaatgaagctgaagctagacctaaagttagacttgtagttcctaacagttcttgtggtggaatcattggtaaaggagggtcaacaatcaagtcattcattgaagactcacatgctggaatcaagatttcaccacaggataacaattttgttggtttgcatgatagactcgttactgtcacaggacccttggaccatcagatgcgtgcaatatatttgatattaagcaagttatcggaggacgttcactacccacctaatctgagttccccatttccatatgcaggccttggtttccctagttaccctggtgttcctgttgggtatatgatcccacaggtgccgtataataatgctgtgaactatggacctaatgggtatggaggaaggtaccaaaacaacaagcccagtacacctatgagatcacctgctaacaatgatgcccaagattctctcactattggtattgctgatgaacatattggtgctgtcgtaggacgtgccggaaggaacattacagagatcattcaggctagtggtgccaggatcaagatatctgataggggtgacttcattgctggcacatctgagaggaaagtgacgataactggaacatcagaagctattcaggcagcagagtctatgataatgcagagggtgacagccagttccgagaggtgataaaatctcatgaagacgaggggcatcatctgatggaaaagaagcctgatgccaagttaggaggaggggttggagattgtcttttctagttttagcactatccgcaaaaaaagcttgagagaaaatttaagataatctattgttccttattgagtctgattgtgttagtaactggagtagtcagtcaatcagctgttctatttatttcttatttttgttgggaataggattatatttcacaacatgtttggctgttgtcataactcaacaacgctggtgtgctaccctagttttgataattgtgatccttaggttaccccttgaaaaaaaaaaaaaaaaaaaaaaaaaaaaaaaaaaaaaaaaaaaaaaaaaaaaaaaacctgcagcccggggatccacta

SEQ ID NO: 52433 - DNA, 416 bp, Oryza sativa
  Clone ID: PAT_MRT4530_54730C.1
cagcacgacagagcaggacgaaaaaacatatacacttctagtgatcgtctgaccgaccatcattggctagcaagggcagatacttcgcggcggcactgatggcgggcatggtggccatgtccggcgcgcagctgagcgagtgggaaatgaggttcagggacaggcaaagacagcgggaggtgcaggacagacaagtggacgcgtgccggaaggtgctcgaccggcagctcaccgagagggagaggttccagtcgatggaccgccggcagagcgcgctcaggctgcggatgcagtgatgccagcagatgcaagacgggagccgcgagtgacgatgcgacgtcatacgacggatggtgaggaactaccaggagagcatgcatgaggacctggaacaagggctgggagaaggaagggga

SEQ ID NO: 52434 - DNA, 237 bp, Oryza sativa
  Clone ID: PAT_MRT4530_54731C.1
atggagtattcttctaaggccttttacagtgtggtgagctggagcgttatctcgcacaccacgtcggacccgcgcatatgtggtgacgaagcatgctctgtctgcatcgatgcgccgtcggatggggaggagggagaaatggtgcggcggaggaaaagcggcgtggggccggagagctcgttggccgcgcctcttgatctgagccgcctggagctcgttggccgcgccgccccttga

SEQ ID NO: 52435 - DNA, 703 bp, Oryza sativa
  unsure (1)..(703): unsure at all n locations
  Clone ID: PAT_MRT4530_54732C.1
gtaaattggggaatggaaggtcggttgggtgggtggtaactaaacgaactgtaatttttttgtggtataagactaaacaggttgcattttggtgctataaaaccaacttttcctactttttatgggacagatcaataacagtaaaataagcataactgaagtccgattatagaaaaaaaaaggtgataaaataagtcaaacagttaatctctcatattgtgatcatactttttacggaactgttgttcaataaggacgaaataaacatcactggagtccattaactgtttgttttcttatgttgctttagttccacacccataaacttcctttgccacgttgggtgtaaatgttggcttgtttgtatgcttctttgctatctttatgctctgtagtgttgaggattgccaaacctatattatattctgtnataatgagcttctggggtcaaacatatggatgatctgtttatatagaatgtcaacatttttactctattactgctgcatagatatacctaaagatgtgactccttcctttcataggtcatctagcaaatactagaaaatgcttagtgttgactctgtagcctgtaacatgataaacttcttcttttttactgacatagtaaaagcttatattgctacaatttgtattatgcctggagacatgataagtccatttccactgtctagtaatttag

SEQ ID NO: 52436 - DNA, 355 bp, Oryza sativa
  Clone ID: PAT_MRT4530_54733C.1
tttttgtttttttaaattttttgtgttctaaaccattcatttttttttttttttttggtactattcttcttgttaatgtctttcttacaacccattacacaaaaaaccatcagatggaatacttgtggtccccaacaccccatcccactgaaaaaaaaaaaaaaatctacttaaaaaaaaaaaaaacccggcaaaccctattgggctggcttaaaaaaaaaccccacattttccatcccaaattgaccaccaaaattgcggaaaaaccttcttccctagatcatacccagcaatggggttacccccccgaccccccccaccagaaaaaaccttatgtttcccccccatatttttc

SEQ ID NO: 52437 - DNA, 1083 bp, Oryza sativa
  Clone ID: PAT_MRT4530_54734C.1
ctagtccccctgcggcccagctggcccagcagccggtcgtcttcctcctccagccgaccgccgcctgttcttctcccagccgaagaacagaagcgccgccacccctcttgatctccctccccagtggtttctcctccaaattgaatgcaaaaatcggttcctatcctcctcctcatcaattcccccacgttcttccctcttaattcggcctttaatcatcgaattgaatctctgatgaactgccgccattgatggcagcccggcgagctctccggccgttcctctcctctccccggccgatcccctcctcctcccagcctataaaaggagtcccgaccccctcctctctccccacacaacgcagccctccccctcctctctccctggctgccgcgccgctttcttctcgcgccgccgccgtcgtgcaactccggccgcccctcctcggcagtcgggacctcctcggagcccggcgtcgccactatctgcttcgcagcgacatcctcttccccggcctcctctccgtttcgcccagaaggctgccgggagtgcatcctcatcggcaaccagtgcgccaccaccgtcgttctcctccagtcggccctcaccatcgaatcgagggacgccgcagcgcgccactgcctccaccggcgtcgcagccgcctcctcttcctcggcccaacctctatttctcctggagactgccggaaattcgtcctcaatgtcgccttcctctggtcgccgttcccgccaagactaagtgctgcccgtcatcatcgtcgtcaagtccgcagcgccaagcccctcgtcgtccgcctcttcgtcaagcccgaggattgccagagccatcccctcgtcttcgacccgttcgtctccgtcgccttcctccgttcgtcgttgctgtgccaaggtcttcgccggtcgccatcgttgttcccttgccgcgtcgtgcccgtggtgagaaccctccccttcctgccctctcctcgtcctccccttgtggtcgccgcgtggattgcccatgtgtgcagctcacgtggtagtcccggctgccagtcgctctatcctttctctctcgagtga

SEQ ID NO: 52438 - DNA, 207 bp, Oryza sativa
  Clone ID: PAT_MRT4530_54735C.1
gaacaatccgtacagggaaaatcacatttagagggttgctacaatgcaataaccagactatatggttgcctcaggtatggttctttcaattccaggaaatcaaggttctgtcttcactcttcaggcatttttcaactgacgaaaaaacaaagaattcaaaaacattttttaaaaacgataccttaggtgtgaacatcttcataccct

SEQ ID NO: 52439 - DNA, 381 bp, Oryza sativa
  Clone ID: PAT_MRT4530_54736C.1
atgcaggagcaggtgtcgttagcgaccacacgagccgctgcatgtgcagactcgccaacggcactccccgtcataactctgcctcggcctccaccttcctcgccgtcgcctgcaccgcttccccaacaaggtcaccatcgacgtcgccctatccctgccgccaccgtcgccgctggacgaggcaagagggtgaggtcggaggagcagcgcatcggccatcggacgatggcggctgcccacggcgaggtccccgtggaggcgccgtcgccgtcactcgggaaggccgccgtcgtcatcgccaagtcgccgccgtcctcgtccgccccttcgctgccgtcggagaccgccggagcatcgtcgccgtcgtcaagccgaaggtag

SEQ ID NO: 52440 - DNA, 219 bp, Oryza sativa
  Clone ID: PAT_MRT4530_54737C.1
atggaggggaaggggtgggtcggcattatcgaacgagggccagagcttgggaccagcgacaacaatggcgactgcggcaaggacagggtggtggtggcaaataatgggctgagctcaggatctgtgatctggatggtggctattacctctctcgatgccgccgccagtgggcagatccaagccatcatgcttcatgtctgctgcggcgggtggcggtag

SEQ ID NO: 52441 - DNA, 370 bp, Oryza sativa
  Clone ID: PAT_MRT4530_54738C.1
gggaaagggcccccaggggggggaaaagggttttccaaaaatttcttaaactcacaaaccggttaaaaccaacggggagggccgggccccctggaaacaatttgactataaaggacggggataggccccctggtttaaaacaatccaatcagggccttgccggaaaaaaactataagggccccggaaaatagaaattgaaatgaaaaaaaattgggggtgggggcaagaaaaaacggggggttgatccttaaaaaacacaaaagccccttgggggaacccgggggaaggcccttgggatttttgcaaaccgccctgggtcttgggggttttgcccaaaaacccccccctggtgtgattaaaggggaaccc

SEQ ID NO: 52442 - DNA, 493 bp, Oryza sativa
  Clone ID: PAT_MRT4530_54739C.1
acgagtgtgtgcacacgctttgagagaataggcctccgaaaccacgcactgctacgacgtttgcatggacgggtgggcgatcaggtttttggggagcgcaaggtgcgactactgactgttcgtcaacgtctactttgtcttcactaacatatcgaacactaaagacaacgacaacgctggagacaaggagaaggatgctcctgtcaacaccaacagaggcaatactgccttaaactccagcggaggaccttttttgggaagtcaaggaaagcatgaacgttatcgaatcctgatttgcttctgactcatgtgtcgtcaccgagccgacgtctgcaaaccgcgtattcagatggaatgcactcgtcttccagaatctgttcttcaggaatctcagtatttaagttcagaacccgccatggatgcgacgccatcaggcctgacgtgccaccgccgctcctccacgacgccggttctgcttgtccccgaaccgccg

SEQ ID NO: 52443 - DNA, 1131 bp, Oryza sativa
  Clone ID: PAT_MRT4530_5473C.1
atggaagccccgggctccccctacgcctcctcgccggagtgccgcccccaagcgcgccccccgctcctcgcccccgcccccgcagcagcaggcctcctccgaagggttttctacttttcgcagtggaaccgacacgtagatataataattacatcaaaatataagaaatataaagttctcctgatccaccttgagtggaaagatgacaaggagaagccaacccatctgaggtttctggtatcaaacacggcagcaggatgcattattggcaagggtggatcaaccattaatgaatttcagtcccagtctggggctcgtattcagctatcgcgtagccatgagttcttccctggtacaaatgacagaattatcatggtttctggtctgtttgatgaagtaataaaggccatggagctgattctcgagaagcttttagctgagggggaagaaagcaatgaagctgaagctagacctaaagttagacttgtagttcctaacagttcttgtggtggaatcattggtaaaggagggtcaacaatcaagtcattcattgaagactcacatgctggaatcaagatttcaccacaggataacaattttgttggtttgcatgatagactcgttactgtcacaggacccttggaccatcagatgcgtgcaatatatttgatattaagcaagttatcggaggacgttcactacccacctaatctgagttccccatttccatatgcaggccttggtttccctagttaccctggtgttcctgttgggtatatgatcccacaggtgccgtataataatgctgtgaactatggacctaatgggtatggaggaaggtaccaaaacaacaagcccagtacacctatgagatcacctgctaacaatgatgcccaagattctctcactattggtattgctgatgaacatattggtgctgtcgtaggacgtgccggaaggaacattacagagatcattcaggctagtggtgccaggatcaagatatctgataggggtgacttcattgctggcacatctgagaggaaagtgacgataactggaacatcagaagctattcaggcagcagagtctatgataatgcagagggtgacagccagttccgagaggtga

SEQ ID NO: 52444 - DNA, 348 bp, Oryza sativa
  Clone ID: PAT_MRT4530_54740C.1
atgacgccggcgggagggaaaagggaaaaagggggagagaaagggggcttgccccttgccactttgggaaaaggaggacgaagagagggtgacgcgggagagggaggaggagctcagcctccatcccttggagggacgcgcggggagaggcggggccgtgtcgatgacaacggcgatgacggcggaccggtttggagtggagcggcaacacgggcggtagacgcggggcaggcgcggcaggcgctgacggcggcggcgactggccgaggcaaactgacgtcgatgctggccacacgacaacgaggtcctgtgtcgcctgggacatcggcgtcggtgaacccctactag

SEQ ID NO: 52445 - DNA, 1504 bp, Oryza sativa
  Clone ID: PAT_MRT4530_54741C.1
cggcggcggtggcggtggagcgcgcggacgcagcggtgacccggtgcgggggcggcggctccccggcctcccctcccagccggagggaggcccagggagggcggcggtggcggcggcgacgtgggcggctcccctccggcggcagccctctcccagtgcggtggcggcggctccctggcctcccctcccagatccggccggagggaggccaggggagggtggcggcagcggcgacgacgtggttccccggcctcccctcccagatccagccggagggaggccgggggagggtggcagcggcgacgtgggcagctcccctttggcggcggccctctcccggtgcggtggaggcggctccccggcctcccttcccagatctggccggagggaggccaagggagggcggcggcgacgacgtggttccccggcctcccctcccagatccggccggagggaggccgggggagggtggcggcggcgacatgggcggctcccctccggcggtggccctctcccggtgcggcggcggcggctgcccggcctcccctcctagatccggctggagggaggccgggggagggcggcagcggcggcggtgacatgggcggctcccctcccctcccagatccggccggagggaggccgggggaggacggcagcggcggcggtgacatgggcggctcccctcccctcctagatccggccgaagggaggctgggggagggcggtggcggctcctggtgcagcggcggtggcgaggcgctgcatgacgtgtagggtggtgttagggtaagggtggggggggtggaggggtgcatgggtaaaggcgctaagtgtgtggatggatccgcgtctcgctacctcgtggaggctgcatccgacacccagcggtcaggtagcgaaggaggcggaggaggaagaaacggatagtggtgagagggactcggatgggaggagagaagggaggaaagctacgacaggtgtgtgggggtggaggcgcccccatctccaccttgatgcacagcatccgccgtcggccccatctctgctagtagcccccgagcctgggtgaccagatctagtggcctacaagctgggggcacctgggtccggaaacatagacgatgactgtgagcggatctggtggtggtggtgaatttggtgggcggatccggccctgagctcgggaaccagtggatctagttaaaggtgttggagggatgggaggcagcaaggaggcggtgcacttttgtatagcatggttcattgcggggcaccagactgagaaatggcggagataagcccacgggggttgctggggagtccatgccttgtttataagggggtgattatgatccaggaatggtgcgctgtggtggattgtgttgtgcgaggggtactatcacagctcctttctgagtggtacacctctggtcagagtaaaactattcgaatagccgtgcccgtggttatgggcgagtctaacaatgtctttcgtgaatag

SEQ ID NO: 52446 - DNA, 434 bp, Oryza sativa
  Clone ID: PAT_MRT4530_54742C.1
cagtctaccgccctctcccttttttttttttttttttggtagcttcaattccaaattaagagcgccgttgcatacttttaggccatgaaatacacaaactttaccgatttttatttattacttaacagaattactttgaaccacacctcaactaccccccttaattttttcaacccaaatacatctcaaaccctgaagatagaaatgtatttaagcatttgcagcagcctgaacaccagcatctcgctttctcttttcctaaatgatgctgagcttgatacccttgcccttaaggagagacacccatgtcttgttacccttgccgatggtgaacacattgcccaaaccaatttttaaggcttggcccaattcgtccttcacatggatggactcaaaactgcccttatgcttataccaattcttaaacactccaa

SEQ ID NO: 52447 - DNA, 171 bp, Oryza sativa
  Clone ID: PAT_MRT4530_54743C.1
atgcgacaaggtgcggatggcggcggaaagggtgatgccggctggtgggaggacaatggttgctccaccaaccgcctaaccatcgacagccacgagctcaccgccatcagatcaggcggccttgagttcgtgccatcagatctggccactgcgatggcggcgagcggctag

SEQ ID NO: 52448 - DNA, 1059 bp, Oryza sativa
  Clone ID: PAT_MRT4530_54744C.1
gttgccttcttcttcctttcccgcttccgcttcccgcttgacgccgcttccttcgcggtgctcctccccaacgccgccgccgcgctggcgctcgccgcgctctccccggcctccgtccccatcgcgctccaccaggccgcgctcgtcgccatcgccgtcctcaccgccttctggttcacgctgctcccggagtggaccacctgggcgctgctcgtcgccatggcggtctacgacctcgccgccgtgctgctgcccggtggccctctcagactgctccttgagttggccatagagaggaacgaggagatcccggcgttggtctacgaggcaaggccggtggatccccgccatggccacaattggcggctgtggagggagaggacgcaatctggtgcagagttggatgccaattccacagttgaggtgcttggtgaggtgttggggacaaatcttggtgccagttcagctggcaatttgggggtttccgcaatccgatccgatgaacgggttggcttggctggtgatgcaagaaacttgaggcttggaacatcgatgccgaatttgagctctgattctgctagtgcacaagttgaggtgttgccagcatcgccggagattagtgtgtctgttcctgaaatgagagtaccattgatccagccgcgaccagagagaaccagggatgaggaggatgacgaagatggcatagggttgagttcatctggggctatcaagcttggattgggggacttcatattctacagcgttctcgtcgggagggcagcaatgtatgactacatgacagtgtatgcatgttatcttgccataattgctgggctcggtatcaccctgctgctactagcattctaccgtaaggcattgccggccctcccggtctcgatcgcccttggtgttgtgttttatgtgctcacaagaacattgctcgagacttttgtcatgcagtgctctactaatcttgtgatgttttagcatttattgaaaatcagatattcaaatattgctgtaaaaaaaaaaaaaaaaaaaaaaaaaaaaaaaaaaaaa

SEQ ID NO: 52449 - DNA, 338 bp, Oryza sativa
  Clone ID: PAT_MRT4530_54745C.1
atgataaaaatcagattgagtttccccctgactgatttggatcaagtcagagaagaggagcttgtataaatggctcaaggaaaggaagggaaaacttccaaagcaaaaaccaagttgggcaattattaaattgattccatcgctctcattgataggaaactagacgcaacccctacctggcgcgccaactgtcgaaacatgaattcggcaattataaaacggggtagctcaccagacctaaaagtggatggatgtggagacaaatgatttagacatgttcaggccctctccatgagaggtacccgagcccgacgcgtggaggaggggacgtcatggaa

SEQ ID NO: 52450 - DNA, 1825 bp, Oryza sativa
  Clone ID: PAT_MRT4530_54746C.1
gttcacccaaaccgcgatttctgatcgatcgatcgttagctcgatccaagaacccatcttttctttgatccccaatcctcttttgccgaggattaattgggagaagatgacgatgatggggtgtgccgtgctgctcgtggtggtggcgtccatggcggcggaggcggcgggaaggctcccaccaactaatcgatctcctctctctctctctctctccctctctatcccattcgcgaggcggcgtctcctcctcctccccgtctctctcgcttcccccccaaatccggcggcgaatccagggccccgcgccgcgccgacgaccaccgccgatcgcgaccaggagggaggatgctgggcgccgcgaggaggcagctcggatccggccccatgctggggcaggtgctgcggaggctccggccggcgacggcggctgcagcggatgcggcgagggcgtactccgcggcggcgaaggagatgactgtccgtgaagcgctgaactctgcactcgatgaagaaatgtctgctgatccttctgtttttctgatgggtgaagaggtgggagagtatcaaggtgcatacaagatttcaaagggcttgcttgacaagtatggtcctgagagggttctggatacaccaatcacagaggctgggtttactggcattgctgttggtgcagcgtatcaaggtcttcgacctgttgtagagttcatgacattcaatttctcaatgcaggcaattgatcatatcatcaattcagctgccaagtcaaactacatgtcagcgggtcagatatctgtccctattgttttcagaggacctaatggagctgctgctggagttggcgctcaacactcgcagtgttatgcggcttggtatgcacatgttccgggtcttaaggttctggttccatattctgcagaagatgctcgtggcttgctcaaagctgcgattagggatccggaccctgttgttttcttggaaaatgaactgctctatggagaatcattccctatttctgctgaagtgcttgattctagtttcgctctgccaattggcaaagcaaagatagagcgtgagggtaaagatgttacaattactgcatactccaagatggttggatatgctcttcaggccgcagatatattgtccaaagaaggaatcagtgctgaggtgataaaccttcgttcaattagaccacttgatagagctactatcaatgcatctgttagaaaaacaaatagattggtgaccattgaggaaagcttcccacagcatgggattggtgctgagatatgcatgtctgttgttgaggaaagctttgaatatcttgatgcaccagttgagagaattgctggagctgatgtacccatgccctatgctgccaatcttgagaggatggctgtcccacagttatccctggaggtgctcactattaagaagttggttgacgatattgtccgtgcagcgaagcgtgcgtgctacagagcggtgcccatggcagcaactgcctgatacagtgacaccttttgttcatcatcttgtcttcttcccaatggccaggagtatgtaccacagcataatggtgtcttcccaagtctcaactagtgtaagctgattttgtagatccaccatgaggtgtcaatccccttctttctttagtcgcagtcggatggctgcatccgttcatagtccaaactgaatatacacatttgaaccatgcgacttctggagattttacatgaccggttgatgtcaataacatgtatgtaatggagctccatatgtcggcaaaccaaacccccattagattcaaaaagcccaaaaa

SEQ ID NO: 52451 - DNA, 155 bp, Oryza sativa
  Clone ID: PAT_MRT4530_54747C.1
ctctgtccccatctctcataacttggggtgttctctataaatctactggggggtaccaaaggatacaactccagcttccaccggtcatcaacaaaggaccaatcgaaaatcagataacctgtcaccaacacctaataagcagcctaacactactt

SEQ ID NO: 52452 - DNA, 297 bp, Oryza sativa
  Clone ID: PAT_MRT4530_54748C.1
atgcggcatgccagcgtggcaatccaaggccgcggcaaacctctctacggcggcaatggagataagtgccccttggagtgccggtacggcaacgggcacgcggcggtcccaaatcggtggcatggtgaagaggcgtgccagctccgcctcacgcccctcgacgttggccgcttcctcctacgccggtctgggattgtcgtgagcccgttgcccccacaccaatgcttcgagggcacctgtctcgacaaccgcccgggagagggccgccatagcctcctccactctggccgccgcctg

SEQ ID NO: 52453 - DNA, 1395 bp, Oryza sativa
  Clone ID: PAT_MRT4530_54749C.1
atggcggcggcgaggagcgtggggatggagccggaggtggcggcgctgcgggggaggttcccgccgggggggacgcggggcgcggagtggcgggcggcgcagctccgcgggatcctgcggatggcggcggaggcggagccggagattgcgctggtgaagtcgtcctgcaagtttgccctcaagaatctgaagaaatggatgaagccccaaaaggtcactgctccgcttatgacgttcccgtcgacggcgagggtggcggcggagccactcggcgtcgtgctcgtcatctcggcctggaactaccctttcttgctgtcgatcgacccgatcatcggagcgatcgccgccggcaacgccgtggtgctgaagccgtcggaggtggcgccggcgacctcgtcgctgctggccgagctgctgccgcgctacgtcgacggcagctgcatcaaggtcgtcgagggtggcgtcgccgaaaccaccaccctgctcgagcagaaatgggacaagatcttctacacagggaatggcaaggtaggacgcatcgtgatggcgtcggcggcgaagcacctgacgccggtggtcctggagctcggcggaaaatgcccggttgttgtcgactctaatgtcaacctccatgttactgccaagaggatagccgccgggaaatggggttgcaacaatgggcaggcctgcatttctcctgatttcatcataacaacaaaatcattcgccccaaagctgctggaggctctagagaaagttttggagaagttctacgggagggacccgctgcgatcatctgacttgtcgcgaattgtgaattccaaccattttaaccggctgaagaagctgatggacgatgaaaatgtctctgataagatcgtgttcggaggtcagagagatgaacatcagctaaagatagcccctacaatcttcatggatgttcctcttgattcagggatcatgaaggaggaaatctttggccccttgcttcctatcataacggttgataagatccatgagagctttgctctcatcaactccatgacaaaggcacttgcagcctacctcttcaccaaggacagcaagctccaggaacaatatgaggcagccatctctgcaggaggaatgcttgtcaacgacacagccgtccacctaacaaaccagtacctaccttttggaggagttggggagagcggcatgggagcctaccatggcaggttcagcttcgaggccttcagccacaagaaggccgtgctggtccgccgcttcgccggcgaggcggcggcgaggtacccgccgtactcgccggcgaagctcaagatcctcaggggagtgctcaagggcaacctgggagccatgatcaaggctatcttggggtttccaagagggaaatga

SEQ ID NO: 52454 - DNA, 396 bp, Oryza sativa
  Clone ID: PAT_MRT4530_5474C.1
atggcagcggggcgcagccgtgcggcagcggcggccacatgcagcggcggaggtgggaggtcggcgacggcactcccatcttccagatccggccaacggttgcccttccctcccctctactcccagatccggttgcatcatgaggagggcagcgacggcggctgcatgaagcggcggaggcgagaggtcagcggtggtgctccccttccctcccagatccagcttcgtcgtggggagggcggcggccgcatgcaacgactgaggcagcttggaggcaggcgacggcgcacccacctcccagatctagccgatggtgacccttccctcctctcccggatccagctatgccatgtggagggcggcggcagcgaccggcagcggcagaggcggcgctga

SEQ ID NO: 52455 - DNA, 507 bp, Oryza sativa
  Clone ID: PAT_MRT4530_54750C.1
tttgttttttttttttttttggttttttttggggtaacaaaaaaaatattataaccttgaagtatttgaatatgatatagcagacagccagtccgttgctctttatttaaggggtgtgaaaatccaaaaaataaagaaagaagaagaagaagagaagagaagaggagaaaatgaaaggagagaagatcgatcgagggcctgaagtatccatggcatgtatgcaatcgtacacgtagagatgtgatgtgactggatcggagctagacaaggaggggcttgccgcggcccatggtgaagccgcgggtgccgtcgggcatcctggggccgtgggcgtgaggaggcggctggcgtgggctggaggggcacttgtggcgggggctcgccggcagcttgtgacgagggctcgccggctcgaagtgccccacactgccggcgggggccgactgcgggctgtgcggcgccgccacctgcagctttcctcggcccccctcggcccaccctcctgct

SEQ ID NO: 52456 - DNA, 309 bp, Oryza sativa
  Clone ID: PAT_MRT4530_54751C.1
ttgacgatattgtttggcagtacaagatatatccaggatatgcgggtcggcatgatggggatatatggaaatctgcgtcactgaaggagaagagcaagtgctatggtggtaattttttcgggtgattcaaggcaacggtgattttctcaaaactaggaaggaattcaatttcggttggcaagacgactgagctgataggtgagaaagtggagcactgttgcaggtggagtccaagagaaagaaattacagggatagcagagtctcttgaaggcggttggtctggcgcagactcgtcgggcagcttgcgg

SEQ ID NO: 52457 - DNA, 2720 bp, Oryza sativa
  Clone ID: PAT_MRT4530_54752C.1
atggtggcgcacggcgttcttccggtgaaggagatcatcgggtggcgaccggcattcggcgaagcattcccgacccccgatacacatgaagtcgtggtatttgctcatttcttctatggcggtttctcccttccaacctcaagattttttcggggaatcctgagtttctatggaatcagcctgcatcatctgaacccaaactccatagtgcatattgccaattttattcatgcctgcgaagcttttctgggcattaggcctcattttgccttgttccgccgcattttcttccttaagcctcagccaaacaagagcaaaccatgtgttgttgggggcgttggtttccaacttcggggaacactaagtcaaaaatacttctccatgccctttaagacctcaaacaaaggctggcacgcaaattggttttatgttcaaaaccctgaactagctctccccgagtactcttgtattcctccagtttatcgggatacttggaactcactgccaatgggagatgaagctgtgcaagcagtggaactgatggagaggatgataaagctaaaagaacaaggcctccaaggagaacagatcacccggcactttatcaagtgtcggttagctccaatcaaagagagatctcgcacagcctttgaatttgacggcaagcacgacccaaaccgtgaagatccagattctcttgacttcaaggtcatgaaggaaaggatgtataaaatcttctcaaatgctatcgtcgtcagctattcacacttgttgccagtcgtaccgttcaatgcattcaatcctcctccaccggagttcgcattgatgaagtcagatcctccaatcgcccagcaccaatcacctcgccgccaaactggtcagggaagcggaggaccaagaattcggtctgaaacccaaccaagtgcttctgatccagccggccagtcagattctcgcaagaggaagctggttctaagtgacgacgaaggcgatgataccggaaagctcagaaataaaggagcggccggaagacctccgaagccaactaatccgaagaagaaaacctccagtcgtcctgtactaaaaatcagaaagtcttccagcgcccacgcaacggcggcaatctcgttgagcgcggatctaaccggagaggtggtccaggcggcgttgtctccaagcccacctaggcaggagcaatgtgaatggtactgcggcttagggatgtcagttaaactcaaagacataataaacatatgggacggcaagtggacttatttcgtgaaatgggccaaaaggaatgagctgctgactatggtgaaaaaacattcccatttgattgggtggacagttgttgatgctgaagatgatgcatcagacgtgggaatggatgatcgattctggcatgaaatgcttgatcttttcttcgtgcgtggtagggtttcaaagaggagggaagaggatgacctcgtcttttttgttaataataatatgaaaatgcatggccatgggttcaacgataacatggaagatccacctcctttttttgtgagaagatgggctcctatgcttgaaaagatcagcaatataaattcagctggagttgattgggagcgttcattctatttgaatttaattgctcacacatcatacactgttacagttgcaatatgcagtgtcagggatcttcgcagccgtgtagagaaaagcaaaccattatcaccagtttataaggtcacaaaaactgtgtatgcatccccaagccgtgtaaattttcatcttgatcgaagaaaggctgtggaaactgtacctgcatatcccaatatttgtttctcagttgatgacttcgatgatacttttgatgctgttgttttgtcagaccccgaacattgctattgtgtgattctcaatgcacatgatggggcagcttttcctgaagacactgaatcgaagaatgccagctcaaatctactaaacactgggagcaaccaagaaaaaccaccaaagagaacactcttctcaggctacgttagctaccaaaatgttcgagaagcctacaatgctggcagatcacaatttgggagcttactctcactcgggcatgaccaaactaaacttgataaactttatatgaggggccctgaaggacgtggggaagttgaagtagctgtttctggaattgcagatcagagccatgagagatcaaagaaagatccaggagatagctttcgagtctttgttcatagggcagcttctgctgcatcaaagctggcaaagcatgcctacgaggctgcatctaccaacaaacgatttgatcatgagcttctgcctctgaaatgttgcttgatgtcggtatctcttccttgggactacattgcacatgacctgctacacaaggaaacccctccgctggacctatgagagactgcgaattcccattgtgcaccagaaagaatgatatatgtgcatgattgtgggaaagtttgtgtcccttgggctcgatatagtgtaagaaaacagtgagcagagaagcagtgctgcgatgtacatgtgtactttaaacagactaaaacttgtagaattttcatgtgtgtttgtacaatgttgaaagtaggcgatgaaataatgtaaatatatatttttttggttgtcatgaggaagactcttcactgttgctaaaaaaaaaaaaaaaaaaaaaaaaaaaaaaagggggggcctcgtgc

SEQ ID NO: 52458 - DNA, 570 bp, Oryza sativa
  Clone ID: PAT_MRT4530_54753C.1
atggcaagcctcaagaaaggagaggttgacccagagaacgtcatcccaataacgatggacaagctgaccccggagcagaaggcagaatttgaaaagatgaaagacgacttgcaaaaccgatttctgcattcgttcgcaccgactcgctccggcaccatggttcagaaatataaggtagttctgtcgaacaaggatgacgtagaaaccagttccggcaaagatgacaaagccaaaggtgacaatcaagaggaagatcttgaggcattcaaatgtatgcaggaccaggctgattactctgtcacggtctctcccaccgctgtgactcacccgctgggtgcttcaccatctgagggcttcgggggcggcgagttcgagcttgagctgtggtgcctaccgcgcaagaggaatacgatccctgaaatctccgacgcttttgtcatccacgcgtttaagtcaggcgtccgagatcgatacaccacccaggaactagtgacacgacggatcacatctgctcgcaagctatttgaaattatcgacagatgcgctcatgcagatgacgccctaagatga

SEQ ID NO: 52459 - DNA, 252 bp, Oryza sativa
  Clone ID: PAT_MRT4530_54754C.1
atgcgacagcttggcgactacaggaggagtggaagggcgacagccactagcatcgggaggagtgctcctaaggtaggttctggtgccagctccacctcccctacaaatgtcaacctcatcgctgccaccctcgacaatacgtgctcaatcgtgtggttccggaagctagcgtctgaccagatcaagaacaccctgctaccattgttgcagtcgtggccaccagcaacggcggttctgccaatatcccgatga

SEQ ID NO: 52460 - DNA, 1664 bp, Oryza sativa
  Clone ID: PAT_MRT4530_54755C.1
acgcgtgggcggacgcgcactgcactgcacaagcagcttcctcgccttcgcatctactactccccccaaaatggcgcatccggtggctgaggccgacgagaagagccccttcggccgcctcaccgcggaggagttctacgcgcgccacggcgtgctgcacacctcctccaccttcgtcaacccgcgcggcctccgcatcttcacccagcgctgggtccccgcggggggcgacgcgcccctcctcggcgccatcgccgtcgtccacggcttcacgggggagtccagctggacggtgcagctcaccgccgtccacttcgccaaggccgggttcgccgtcgccgccgtcgaccaccagggccacggcttctccgagggcctacaggggcacatccccgacatcgtccccgtgctcgaggactgcgaggccgcgttcgccccgttccgcgccgactacccgccgccgcttccgtgcttcctctacggggagtccctcggcggcgccatcgcgctgctgctccacctccgggacaaggagcggtggcgcgacggggcggtgctcaacggcgccatgtgcggggtcagccccaggttcatgcccccctggccgctcgagcacctgctgtgggcggcggcggccgtggcgcccacgtggcggctcgccttcacccgggggaacatccccgaccgctccttcaaggtgccgtggaagcgcgccctggcggtggcgagcccgcgccgcaccacggcgccgccccgcgccgccacggcgctggagctcctccgcgtgtgccgcgagctccagtcccggttcgaggaggtggagctcccgctcctggtcgtccacggcggcgaggacaccgtgtgcgaccccgggtgcgcggaggagctccaccgccgcgccgggagcaaggacaagacgctgcgggtgtacccggggatgtggcaccagctggtcggcgagcccgaggagaacgtcgacaaggtgttcggcgacgtcctcgactggctcaagtcccacgccgccgccgctgccgccgcgcgtggcgaggggcagcagtagttcggtcggtcacgcgtgccgcgtgcttgggtaattcatggcggattcaaagcaaaagtacgggggcgcaataaaaggttgtggagttgattggtgagacgagatcgatctggtcccggtgtatctccgtctctgcgtgtggccatgttccatctccgtgtctctctgctcgtattagtccatgaattgaatgccaaaaaaatttgccatgttcgtgtgcttgggtgggtggttgtgggttggcgagcgatcggttgctgccctgcatctcctgcagagcagaattcccataaatgatgaatttaagaagtcctcgctgagaacgctggaaaaaaaattcatagtttgagaattgaattttttttcctcaaatttgtgtccaattctcgtgaaatccagcaaaggctaagcccgcagtggtttaccgtctagaagaaatacataggagatcacgaatttcggaagtgaacggttgacaactgacattgaccttcctccgttctctccttcccagttcccacccattgcccgctcgatgtaacagagacaaccgttgataacaacagtctccctatgttgatgacgaatatgatttgggaattct

SEQ ID NO: 52461 - DNA, 241 bp, Oryza sativa
  Clone ID: PAT_MRT4530_54756C.1
acgggaaaaaaagggagggaacaaaaaaagggaattggcacacttctttagaaaggaagaagctgcaacaggggagggaatgaccgggcataaacacaagcttggtgaaaggttcgccccccaggggcataacaattccacctaggaaaatcccctagaaaacaaacgggtgaaagcaagcgagctattcaaaaggggaaaaccagggtaaattaacaggaaaaaatcctgaaatgaagga

SEQ ID NO: 52462 - DNA, 637 bp, Oryza sativa
  Clone ID: PAT_MRT4530_54757C.1
gcccccttactgccggcgtcgttggcgcgcttcgccgcgcccgtttccaactggttcacgagcaacgccgacaaccgcgggcgaggggaccacgcgcacggacggatatgctattgctgactgctcccttgaagatgcggaaactcttctctcttgcctaaccaccctctactgccaatagcaggctactaggaatgatgggatcccgcggggatggctgctgccacaatgagagaagaagggatcagtgactggatgcggaacaacagctgctgtggtctgtgcagcatcaccaaggccgatattcgtgccggaacccgtacaacgccatcgacaatatgcaagccggagctcctgaactctctccaacaggcgatagctccccctcagagaccatgacgggattttgtacctctacttgacaacggctgagagaacacaatttacgaacaaattatgggagagcgtctaactacctaggtactatgaaaaagcagtggaaggcatcttatgcctatcgaatgtgggaccaagtttcttgatctcttgatgaagcggcgcatgacacaaatgactaatactcgggtactaatgatgaagcttcttctgatatggaaaaataaggtggtgacgctgc

SEQ ID NO: 52463 - DNA, 194 bp, Oryza sativa
  unsure (1)..(194): unsure at all n locations
  Clone ID: PAT_MRT4530_54758C.1
cggnaattcccggggtcgacccacgccgtccgaaaatacgcagatggaaactttagtgtcaagccaatcctatctatacattactatcatatatacagtctcatactcaatggcactaatatgctcttgcggtgttctatgcggcatgcagagatctgcttncgccatataatcctgtccanaattcatcatga

SEQ ID NO: 52464 - DNA, 350 bp, Oryza sativa
  Clone ID: PAT_MRT4530_54759C.1
ccacgccttcgggttttgattgaaggggtctactattaccacccaaagcgggtcgggcaaggtctttttggtgatgcaccggttgggtttcaacccatgtggcaacttggtaaacctttggtgaaacaatatgcattactggggagattttgggatggccagaccgggagaaaagaattcctcacaaaagaaaccggaccttctgatttccggaatttggggccatgaaccggttatcatctttggcaccactgggttggtggttccaaaagaccggtgaaattccttatgaccggagagcttccaaccatcgagaccgaacctaaatggattggcctgatttttggacc

SEQ ID NO: 52465 - DNA, 390 bp, Oryza sativa
  unsure (1)..(390): unsure at all n locations
  Clone ID: PAT_MRT4530_5475C.1
gcgagtgaatgccggtagagccggaccgcaggagggcgcccaggctgtgactgcaatagtggatggctcgaccggcagctcgccgcggcgcaaggcgcagccgcgcccgcggcctcctgctcctcgccgccgccgacactcgagtgcgtgaggggatggccgtgatgcactgcacccttgaggaggggcagcaccaatcaaatatgactggcaacggcagggactggagagggcagcctcactggtcatggcaccggaaacggctaatggtgcgcgtgctacaaccacgcgagccacatgatctgccgcatgaatctcacctactagtgctaaaaccacacacagcttngatcgtatgatgagatcaaaggcgccagatgggtttgtgct

SEQ ID NO: 52466 - DNA, 1483 bp, Oryza sativa
  Clone ID: PAT_MRT4530_54760C.1
gctaagcagaggcttaatgatgctgtcaatggattcccggatgatggctggtcactgatgagcagcgatggtgctgaggatgtgacaattgcttttaactcatctccaaacaagcttgttggatctcatgtcaactcctcccagctgttttctgcaattggaggcggcatcttgtgtgcaaaggcatctatgctgttacagaatgtaccacctgctctcctagtgcgatttttgagggagcaccgctctgaatgggctgatcctggtgttgatgcttattctgctgctgcgttgagggctagtccatatgcagttcctggtctgcgagctggtggttttatgggcagtcaggttatattgccacttgcgcacaccttagagcatgaagagttcctggaggtcattaggcttgagggacacagcctctgccatgatgaggtcgttctatcaagagatatgtaccttctgcagctgtgcagcggtgtagatgaaaatgctgcgggtgcatgtgcccagcttgtctttgcacccattgacgaatcttttgctgatgatgcaccactgctaccctcaggcttccgtgtgataccactggatggcaagacggatgcaccatctgcgacacgcacacttgacctggcatctactcttgaggttggatcgggtgggactacacgggcttctagtgacacctcgagcacctgcaacacaagatcggtcctgaccatagctttccaattctcatatgaaaaccaccttcgtgaaagcgtagcggcaatggccaggcagtatgtccggaccgtggtggcatcagtgcagagagtggccatggcaatagctccttcacgtcttggtggacagattgaaacaaagaaccctccaggatctcctgaggcccatacgcttgcaaggtggattgggaggagctaccgattccacactggagcggatctccttcgcacagactcacaaagcacggattcttccttgaaagcaatgtggcaacactctgattcaatcatgtgctgctccctgaaggctgctcctgtgttcaccttcgccaaccaagccggcctcgacatgctggagacgacgctgattgctctccaggacatctcgctcgagaagatccttgatgatgatggccggaaggcactatgtacagagttccccaagatcatgcagcagggtttcgcctacctcccgggcggcgtgtgcgtgtcgagcatggggcggccggtgtcgtacgagcaggcggtggcgtggaaggtcctgagcgacgacgacacgccgcactgcctcgccttcatgttcgtcaactggtcattcgtctgagaaccaccctagtagaatcgatcccccctcttgtttgtctgtcctaaagaccttatgtagtattgcttttgtgtatcatcaccatgaacatgtcaagaacctccccagtttctatcatcatgaacttccgtttgaatctagtactgct

SEQ ID NO: 52467 - DNA, 480 bp, Oryza sativa
  Clone ID: PAT_MRT4530_54761C.1
atgcacggcgctgcagcgcgcacgcggcaatcaaacaatgaagagttcgcgccgacgacaaagcaaagcaatcaaactgcaggcgaagccgcggtggaggaggttttgggcgatgttgtccctgtcgcgcttgacggcctcagagccgacgtgggtctccggcgaggtctcgtcatcgatgagctcatattggagcaccggctcgagctcctcgccgcgtgtctcgcagatgttgtggacgacgcatcaggtgccaagcacgacggggaggtcttggagcttcacctccgtgcgattctggaggcacgcccaccgcgccttaagccgcgcgaacgcgtctacggcgacgtgccggaggtcgcccaccctcttgttgaaggcgttgatggggcggcgcgtcgaggaggacaagagcgcgcggggcagagggaggggataattcggacgactgcgacagttaaggaggtgactgcagaatag

SEQ ID NO: 52468 - DNA, 204 bp, Oryza sativa
  Clone ID: PAT_MRT4530_54762C.1
atgcggacacgcgacagatgcgtccgcgtcggaaatttcgagaagtcgagcgagagcgagagcggacgagaccccgccgcgaaagggacgcgcactcatggcgtctcctctcatcatctcatgtcatgggtgtcgtcgtcgtggtcgccgaccgggcactggtgcgatgcctggacggggtcgctatcagattttccccactag

SEQ ID NO: 52469 - DNA, 270 bp, Oryza sativa
  Clone ID: PAT_MRT4530_54763C.1
atgtctagggtggtggaagaagggcggggtgctgatgatgatagcacggaaaccatggggatgggggtgggcggtgagccagtggcaaaggcggggttgcctcgccgctacttagagcaaggaggagtaaggggagtgagaagggagatcctagttggttgggtagggcttgccagcaacgttggcgactttcttgcaccggcgagccagggaggggggcgccccactgacggtagggagatgatggcacggggagatcgtgaactgtga

SEQ ID NO: 52470 - DNA, 813 bp, Oryza sativa
  unsure (1)..(813): unsure at all n locations
  Clone ID: PAT_MRT4530_54764C.1
ccggggnccggccggacgcgtgggctcgctcgctcgctcgctgacgtgtacgcttcgcggcggaggcggcggcggcggcttccgatggcggaggcggcgggggcggcggtggcgccggcgaagctgggtctgtactcgtactggcggagctcgtgctcgcaccgcgtccgcatcgccctcaacctcaaaggattggagtacgagtacaaggcggtgaacctgctcaagggggagcactctgatccaggttaggtgctacgccacctgtctgtcaaactgctttcctccccctatctatacttgtgtacggttttgtgctgcgtctagagactgttcgtgcaattaccgccgcaaatttgtgcttggatgttgagaggtaagattctagcaggcgatcggcccgaaatccacaaggctaggctctgtgggggaagatgaataggaaggtgttcgatgaaatgcacaactgagaaaattgagatgaacatgagaggtttcggtgcagcatgtggaagcgcctcttttcgggattttcttgatgcaatataaagcaaagtgatatatgcagatcatggccttagtacccttgtaactggacgcatgatacgcacacgatgcgccatgatgtccacccattcgtggcacgcacccatgcacaactagctcagaatcgtaggggaggaaccaaaaaacaggaaactcaaaccgaaagatagaacacatgtgtggtagcctcaactattttcttttttgtttgtgggtggaagattcatgaaggttaatcctatgaagntcgtcccggcattggtcgat

SEQ ID NO: 52471 - DNA, 236 bp, Oryza sativa
  unsure (1)..(236): unsure at all n locations
  Clone ID: PAT_MRT4530_54765C.1
tcgtcggcgccgagatggctctcctgtgttgtattaccggcggcctctcgtgacttcctcggnggcctcccccctgccatggctgtgaatggccacagggtcatggtgatctctcctcggtacgaccagtacaaggacgcttgggataccagcgttgtggctgagatcaaggttgcagacaggtacgagagggtgagtgtttttcattgctacatgcgtggagtctaccgtgtgtt

SEQ ID NO: 52472 - DNA, 1176 bp, Oryza sativa
  Clone ID: PAT_MRT4530_54766C.1
atggacgggaagtcatcaaagctgcttccccacctagttgttgcatctgctaccagggtggatgctattgagtcagcactgcgaaggcctgggcgttttgactcagagatagaggttactgttcctacagcagaagaaaggttcgagattcttaagctttataccaagaatctacatcttggtgaatgtgttgatcttcaatctgttgctgcatcctgcaatggttatcttggagctgatttacaagctttatgtcgagaagctgcaagacgtgcttatggtagattatcaagctcatcagagagtgagaatgtgctaacgctaatcatggaggattgggagtctgctaaatctgtggccaaaaatagtgtgacaagaggggtaattaaagaaattccagctgtttcatgggatgatataggaggtttgaaagctgttaagaaaaaacttcagcaagctgttgaatggcccatcaagcatgctgcttcatttgatagacttggaatatcacctatccgtggggtgctattgcatggtccaccagggtgctcaaagactacccttgcaaaggctgctgctcatgctgcccaagcttctttcttttcattaagtggtgctgagttatactccaagtatgtcggtgaaggtgaagctttgttgcgacgtacattccagatggcacgtcttgcttctccaagcattatattttttgatgaggctgatgcaattgcccctaaaagaactggtcccagcgggaactctagtggcaatgccacggttggagaaagactcttatcaactctattgacggaaatggatggtttagaactggctacgggaattattgtattggctgctactaatcgcccaaatgcaattgatgctgctcttctgcgcccagggcgttttgatatggttttgtatgttccaccaccagatgcggaaggtcgatatgaaatactacgcatccatacacgcaaaatgccattaggagatgatgtggatctttggaaggtagcagagcgtaccgagcttttcacgggcgcagatcttgaaggccttgagggaaagtctgaggccgcgctaagatccttgcgtccatcacttacacaatcagtggttgatgagtactcaaatgcagccatccatggtccattgacgaggagaaaacattaa

SEQ ID NO: 52473 - DNA, 1691 bp, Oryza sativa
  Clone ID: PAT_MRT4530_54767C.1
atggcgtctggagcggccggcgacatcgacgacggcgtggaggctgatggggaggagggcggcgcgggagagtgggttgatgggaaggagtcgacgatggcgcaaataatgatgggaggagggcggcggcggtggcgggtggccggaggagtaggcgtcgacggcggggaggatttcccagaggattgctgctccacggcccctctggcactggaaaggagagagcaagggtcccgcattgttggtcagctgttgactctgatggacgggaagtcatcaaagctgcttccccacctagttgttgttgcatctgctaccagggtggatgctattgagtcagcactgcgaaggcctgggcgttttgactcagagatagaggttactgttcctacagcagaagaaaggttcgagattcttaagctttataccaagaatctacatcttggtgaatgtgttgatcttcaatctgttgctgcatcctgcaatggttatgttggagctgatttacaagctttatgtcgagaagctgcaagacgtgcttatggtagattatcaagctcatcagagagtgagaatgtgctaacgctaatcatggaggattgggagtctgctaaatctgtggccaaaaatagtgtgacaagaggggtaactaaagaaattccagctgtttcatgggatgatataggaggtttgaaagctgttaagaaaaaacttcagcaagctgttgaatggcccatcaagcatgctgcttcatttgatagacttggaatatcacctatccgtggggtgctattgcatggtccaccagggtgctcaaagactacccttgcaaaggctgctgctcatgctgcccaagcttctttcttttcattaagtggtgctgagttatactccaagtatgttggtgaaggtgaagctttgttgcgacgtacattccagatggcacgtcttgcttctccaagcattatattttttgatgaggctgatgcaattgcccctaaaagaactggtcccagcgggaactctagtggcaatgccacggttggagaaagactcttatcaactctattgacggaaatggatggtttagaactggctacgggaattattgtattggctgctactaatcgcccaaatgcaattgatgctgctcttctgcgcccagggcgtttcgatatggttttgtatgttccaccaccagatgcggaaggtcgatatgaaatactacgcatccatacacgcaaaatgccattaggagatgatgtggatctttggaaggtagcagagcgtaccgagcttttcacgggcgcagatcttgaaggcctgtgcagggaggcgggaatggctgccttgagggaaagtctgaggtcagagcgttttgtatgtgacgatattcacttccaggccgcgctaagatccttgcgtccatcacttacacaatcagtggttgatgagtactcaaatgcagccatccatggtccattgacgaggagaaaacactaaaagatgtattattctggcgcacaagcatcagtgtcgcccattgttgattctgactattagttatcagaacattgtatcatcggtctgctgtatatattgaccaaagttgtgacttgttcccatatgattgcagcggctaaaaaaaaaaaaaaaaaaaaaaaaaaaaaaaagggggggcctcgtgccga

SEQ ID NO: 52474 - DNA, 2838 bp, Oryza sativa
  Clone ID: PAT_MRT4530_54768C.1
atgagctcatcatcatcacaccatccagaatttgcctcttgtactgcaaatgatgatgagcaccatctcgatgagttcgagttagaattggtagtgcaagatgtgcagcggcagcagaataatggtagtgcaaacactgatcagcatgagcgtgagaacctgttgctgcttgatgacagcagcaagtcgggagctctgaagaggcgtttgttcttcgacaatctgctgaagaatgtccaggatgaccatatccgcttcctgcacagacagaaggaaagaattgacaggcacgtttttagttcttttttcagcacaccgtttatgtcaatagaggtgaggtataataatctgtctgtggaagcagagtgcagaactgcgaatggagatcatctgccgtcgctatggaatagtaccaagggagctttctcaggccttgtgaagttgctaggcttagaaacagaaagagcaaaaatcaacgttctagaagatgtgagtggaatcatcaaaccctgcagattgactcttctattgggacctccaggatgtggcaaaagcactctgttgcgagctctttctgggaaactagataagtctctaaaggtaacaggggatatctcttacaatggctatcagcttgatgaatttgtgcctgagaaaacagccgcgtatatcagccaatacgatttacacattcctgagatgactgtgagggagactttggacttctcatcccggtgccaaggtgttggaagaagaccaaaaatactcaaggaggtgagcgcgagggagagcgcggcggggatcatacctgatgcggacatagatatatacatgaagatcatggggctagagatatgcgcagacacgatggttggggatgcaatgataagaggactatcaggggggcagaagaaaagattaaccacagctgagatgattgtggggcctgcaagagcatactttatggatgaaatatcaaatggtctggatagctctaccacttttcaaataataagttgtttccagcaactgacgaacatcagcgagtacaccatggttatttcacttcttcaaccaacacctgaggtatttgatctttttgatgacctgatattaatggcagaagggaaaattatataccatggccctcgaaatgaagctctgaatttttttgaggagtgtgggttcatatgcccagaaagaaaagaggtagctgactttctccaagagatcttgtcctgcaaggaccaacaacagtactggtctggtccaaatgaatcttacagatatatatcaccccatgaattatcaagcatgttcaaggaaaatcacagagggagaaaactagaagaaccaattgtttctccgaaaagcgagttgggcaaggaagctttagcattcaataaatattctctgcaaaaactggaaatgttcaaagcctgtggagcaagggaagcactcctaatgaaaaggagtatgtttgtttatgtcttcaaaacaggccagcttgccattattgcactcgtaacaatgtctgtgttccttcgaactcgcatgacaacagatttcactcacgcaacttactatatgggagcattgtttttttccatcttaatgatcatgctaaatggcacaccagagataagcatgcagattaggagactcccaagtttttacaagcaaaagagctattatttctattcttcatgggcatatgcaataccagcttcagtcctaaaggtccctgtttccatattagattcacttgtatggatatgtatcacatattacggtattggttatacagctagtgtttcgaggttcttctgccaatttctgatgctttgttttgtccatcaatcagtcacttcgctgtatcgatttattgcttcatacttccaaacacctactgcgtctttcttctacctttttctggctctaacattcttcctcatgtttggaggcttcactcttcccaagccctccatgccaggatggttaaactggggattttggatttctccaatgacatatgcagaaatcggcacagttattaatgaattccaagcgccaagatggcagaaggaaactattcaaaacataacaattgggaaccgaatcctgattaatcatggcctatattacagttggcacttttattggatatccattggagcattgttcggatcaatcattttattttatatcgcttttggattggcgctagattatattacatctatagaagaatatcatggaagtaggcctataaagaggttatgtcaagaacaggaaaaagattctaatatacgaaaagaatctgatggtcattcaaatatttccagagcaaagatgactatacctgttatggaacttccaattacgttccacaatctgaactactacattgataccccaccggaaatgctgaaacaaggctatccaacaaaaagacttcaactacttaacaacataactggtgcattgcgtcccggtgttctttctgcactaatgggtgtcagtggagccgggaagacaactctgctagatgtattagcaggaaggaaaacaggaggatatattgaaggggacataagaataggtggatatcccaaggaatttgttgctgaagtccttgaaactgttgaactagatcaaataaaagatgtcttagtggggacaccacagaaaaatggattatccatggagcagcgaaagaggctaacaattgcagtcgagcttgtttcaaacccatcagtcatactaatggatgaaccaacaacaggattagatacaaggaaggacagtagtgtgtacaatccatcagccgagcactaa

SEQ ID NO: 52475 - DNA, 936 bp, Oryza sativa
  Clone ID: PAT_MRT4530_54769C.1
gggctgcaggattcggcacgaggtctcacctcccgtgagagatctcctcttgtgcgggcggagatccacagccggcgggctcgacctcctcctcgggcgccatccacgcgcgcgcgatgttctccttcggcggcgggtcgtcgctgacgtcggtggtgccggacgcgaccccggccccggcggcgccgccgggcaccgggacgggcgccaacgcgcaggtgctctacgtcttcaaccgcggcggcgtctgcctgctgtaccgcgagtggcaccggccgctccgcacgctcgaccccacccaggaccagaagctcatgttcggcctcctcttctccctccgctccttcaccgccaagatcgatcccaccacagcagaaaaggggaatcttggggtgccactactgccgggccagggttgctcattttacagcttcaagacaaacacatacaaattgaacttcctagagagcccttctggtatcaagcttattctaattacacatccaaggactggtgatcaacgtgacacgctgaagcatatctacaacctatatgtggaatatgttgtaaaaaatcctttgtacgctcctggcacaccaatcaagtgcgagcttttcaataagcacccttgatccatatgtccaaaccttgatatgatacctttagaggttataccgatcctaaatacggttaatgtcatatcttctgggtaactttggtacgcttactggtatcagtgtgctatttgatttattactacattaagaggtctagtgttccttgaggaatatgctaagacttttctatcaccaaccttcccttgttcctgttgtaccttgaaccatgctgcattacatctgttgaactgcaccaagttgttgatgttgagtgttcgttttggaaaaaaaaaaaaaaaaaaaaaaaaaaaaaaaaaaa

SEQ ID NO: 52476 - DNA, 500 bp, Oryza sativa
  Clone ID: PAT_MRT4530_5476C.1
ctgcaaaatgagtcatcgattcacattggcctttgcttaagcagcgccctaaatcagaacatgctcgaggagttgcaagagggttgctttggatggcacggcagtacggaactgctactgcctactgggcggcatgacgcaccttttttttttttacctatgtacacgacctatgtacacgaaagttaggagtacaacttggatctcctggaaggtgcagatcatctggtgtgcgccgctctcagaagagaagcaggcagagcaccgcgaacacgacaaggaagaaccatatctggtgcagggacctctccacctccatgtgctgccgtctcagcctggggctcatgtggtaagggctcgtgtagtacgcgctcgccgccgccgtcgccggcgactgcccgcgcgacacccacgggagcaccgccagggccatccctccgagcatccctccggtcgttgtcgtcgtcgagtggaacatgcccacgccgcccacggcagca

SEQ ID NO: 52477 - DNA, 624 bp, Oryza sativa
  Clone ID: PAT_MRT4530_54770C.1
atggatttctctactcgtcgtctccgcgttctcctgctggtcctcgccgtcgtcgtcgcgtcggccgtccagtactccggcgccggcgcccacgcggccagagtccccgccgttctccgggaagacgagacgacgacgacggccacggatggcctcgcctgcaggcatcgtcgtcgtgccagcgccgtcgtcgtcactgcagcagccgcgccgcccctcgtccccgtgcacgccgccgccggacacggtgtgccatcaaccaaaagcttcaacgagggccccgcaccttcgacgaccggcggcggcgacgacggtcatgccatcttcgccgccgccgccgccgccgggcgtgtcagctcacgcctcggcggtggcggcgtcggcggccgcggcggcggtggctatggtcgtgcgggtggtggtgccggctacgccgctggtatgtacacaggcggcggcactggctcggcgaaggctgacatcataatcgatgtcctccttgtcctcactttggtaggaggaatcatcacgatcgtgtggagtttttgcttcatctgtactaatcaacaggcggacagtggtagtacggatcaagatcccaaccctcccctgcctaaacaatga

SEQ ID NO: 52478 - DNA, 353 bp, Oryza sativa
  unsure (1)..(353): unsure at all n locations
  Clone ID: PAT_MRT4530_54771C.1
cggccgccctttttttnggtttttttttttttttggggtttcttcttttttttttttgttttttttttttttttaactatttttcaaaataaaaacttccttacaaaaaaaacttttccattcaaaatcccatttttggggtttcacctcctttttaggggccccaccgcagtgggggggacccaaaaaagaaagggggcccaggaaaaaaaaaggaaacaggcaaccacaaaatttatccacccacagcttacaccaaccccccttcccgaccccatatcccccgcacaaacaaatttactttcaaacgaccggaaccggggctttcaaacaaaacctgggctttcaaacca

SEQ ID NO: 52479 - DNA, 2076 bp, Oryza sativa
  Clone ID: PAT_MRT4530_54772C.1
ttttttttttttttttgctaaaaattattttatgggtgatgtatgtgttatcatcagtactaaaacaaaagctaaagaatgacaaccacccaagaaaaagcaagagaaaacatataataaaatttcaaacacaccaactcctccacacacacacatgtttgaaacccaagcataaagtgctagtgacacatgtgcctgcatcctgtgtttatatataaaacacacggtgccacacgcatcatcgccattccattttctccgaaggattaattacttctcgtctccaccggaaaagctcgccggcggcgatggcgagcgcgatgaacggctgcggcggcggaggcggcggcggcggcggcggggtgatgaagaggatgggccttctccgtgtgcagtactactgcgtgatgggcttcgtcgccgccgccgtcgtgctcgccacgctccgctacatgcctgcccccgccaccgcgccccccaccgtcgacggcggcggcgcaaccgtccgctcctccgccgccaccgtagactcagccgcggcggcggcggcggctgctcccggcggcggcggggtggagcggggcaagggcaagcggaagcacgtgtggagcggggaggaggaggaggtggcggcggagaagaaggcggcggccggggtggtggtgttcaacttcggcgactccaactccgacaccggcggcgtggcggcggtgatggggatccacatcgcggcgccggagggccgcgcctacttccaccaccccaccggccgcctctccgacggccgcgtcatcctcgacttcatctgtttgccattttttaagaaaaaagtttttggaatggatttggagttttgtctaaggaaaggaaaagaagagagaatgaaagaaaaggcaggtgagagcttgaacactcaccacctcagcccgttcatgaggccactgggagcggattacaacaacggtgtgaatttcgccatcgccggctcgacggcaacaccgggagaaaccacattttcgcttgatgtgcagcttgatcagttcatatttttcaaggagagatgcttggagtccatcgaaagaggtgaggatgccccaattgatagcaaagggtttgaaaatgccctctataccatggacatagggcacaatgatttaatgggcgttttgcacttgtcctatgatgaaattcttcgaaagcttcctcccatagttgctgaaatcaggaaagccattgagactttgcataagaatggggccaagaagttttggatacatggaacgggtgcattgggttgcctgcctcagaagcttgctacgaggggggaaattgatcgtgatctcgacgagcatggctgcatcacaagaatcaacaatgttgccaagaggttcaacaagttgctgagcgaaacctgcgatgatctgcgcttgcaattcgcaagctcgacgatcgtcttcgtggacatgttcgccatcaagtatgatcttgttgccaaccacacgaaacacgggattgagaagccattgatgacatgttgtggacatggagggcccccttacaactatgatccgaagaaaagctgcacggccaatgacaaggacctgtgtaagcttggtgagaagttcatcagctgggatggggtccacttcaccgatgctgcaaacgagatcgttgcttctaaagtgataagtggcgaattttccattcctaggatcaagctgaccgccagcgttgtcaggcccaaaaaggctaaaaattcgcggttatgaaaaattaagattattttggtttcccaaaggaaatggtgaaggtgaatcactaacagatctggccaacagaagggaattcatttgatttcaggcccttttcggtcattgaggaagaacagaatatgaagaatttcaaaattttattttttttgtacacttggggtgtgtgtgtatatcctagggggttgatacgtgcaggttaatactatgtataattcttttctttaattttgataaataaatagagatgaatctataaatttaaatcaaaaaaaaaaaaaaaaaaaaaaaaaaaaaaaaaaaaaaa

SEQ ID NO: 52480 - DNA, 562 bp, Oryza sativa
  Clone ID: PAT_MRT4530_54773C.1
aatcggcacgaggtttcttttttttttttttttgatagcctatacatcctttttccatccatggagaaggatatggacaatgcaggcattcatagccctttcttacagctttaaaatacccacacaaagaagtgcaatgcactgtgcaaaactgcaaatggtttctacttgttcgttacagtccaaaaccagggaataaaaaggagaaaaaagagaagaaaaaataactggactacaatgtacagatgaaaattctggtggacgcttgccgttgttgtcagtactcagtagtatctttgctgttggtggccaaagtctgctgtacttatgattgagtgatcgtcctatctgccgttgttcctctccttttgctgtgtaagtggtcatctcggttccttattctctttggagtcagtttcataatttgagtcacaccatccccactagttgcagcatctatttaactttgttcagggttcagtgaaacatggtccataccttggctttgtcacaatgaatcgatcttgcgaactattcaaatgcttggtgaacttctgaagat

SEQ ID NO: 52481 - DNA, 350 bp, Oryza sativa
  Clone ID: PAT_MRT4530_54774C.1
caattcttcgctaaaccctagctacagcgcgagcgctgcgcgtgcatcctacttggctggatcagccatggcgtccaccgctggcggctgtaagcattcgcgttccgcctccgccatcgtcgcaggcgccgcgagcgggtaccatctcctcaagatcgacggctactcgcgcatcaagggcctacccaccggcgaggccctcaaatcttgcgccttcaccgtggggggatatcgctggcgcatccattgctaccccaacggcagcaaatcagattactcggatttcatatccctgtttcttcatctcgacgacggacaagtcaccaagcaggtgaaagcgcagtacctat

SEQ ID NO: 52482 - DNA, 268 bp, Oryza sativa
  Clone ID: PAT_MRT4530_54775C.1
atattcttttattcaacttgcatgtacgtgagggatcctatgaggttgattgcgcagtattcgtgcatacgagcggccctgaagatgaacaggatggccgtggcggtgctggtgctcgacgacgtggaggtggcgggcggtgctggcgctagcgcccacgttggagttggtgctggggctggggccgacgccggcgtgggcgttcacgaggggggtggagctgactccatgctcggagatggatgaacagcacaaattccagtgggaa

SEQ ID NO: 52483 - DNA, 865 bp, Oryza sativa
  unsure (1)..(865): unsure at all n locations
  Clone ID: PAT_MRT4530_54776C.1
gacagggtaaaaaattttaccaaggcatctaaacaaggcctaaaagtccaacattttgacggatccaaatccaatgagagatgtcaaattcagttataattttttaaacactgaaatgaaatttacttttcttccttattcattaaacaaaactctggaaggatgaatagaatagcaatccaatctcaccttaaccttgctcccaagtgaaataaaaaataatctagtgcactcttcgatacatacagaagcatacaggtactcatttgcggatgaacaggagcatatgcagagcagaaatgcagcatttgtctctgaattgagagagaggagtgtggctggcctggcctggcctggcctcgattgtttcattctatacgaaggcgtgcttctcgagcagcttgaggacttcctcctggttgttgagtttcgccacgtcgatggccgtcttcccgtccaggttctgcaccgtcacggcggcgccgtggtcgagcaggagggcgacgcagtccttgcggccgtagccggcggcgtagtgcagcgccgtgttcttgttcttgtccaccgcgtccacggccgcgccggcctccaggagaacctgcgcgcatttcagctcgccatagccgcaagcgaaatgcaggcctctcctccctcccgaatcctcctcgtccttgtccacgccttcctccaatgctttcttcaggccctcgacatcgccgacgctggcagtgtggtggatgaccgacctcccctttcactctctctttcccccgcgncncnccccccnanggnaaccncccccaatttgngtcggtttcattttcgggggggccnncatccaaaggtagnggggccccncggnacn

SEQ ID NO: 52484 - DNA, 222 bp, Oryza sativa
  Clone ID: PAT_MRT4530_54777C.1
atggcgattagacgggcagccgcaggccacgtccccttcaagcaacaggtgcatgcgcagggctccctgaccgccatcacatcggtcattccggccacaagtggccagtgggcgctgggagtgcccgcccaagccacacgcgcgagacagagcgtggagggggtcgggggcccggggcagcccgacccctggcatggtaggcagtcgccgctccaaccctag

SEQ ID NO: 52485 - DNA, 261 bp, Oryza sativa
  Clone ID: PAT_MRT4530_54778C.1
atgcaacagctctcaagggctcgatgttcgagaacttcctccgcgcgtaagcttaacggcctctttagccggcgatgcaacagctccggcgaggtgaccagcagtcgtggagccgcagcgcagcttgcaagagaagtccgtcgaggtgaccagcagtcatggtgccgcagcgcggcttgccagagaagtccgttgccgttctcaagggtaagggttggatgttcaagaacttcctccgcgcgtaagcaatgtttcggctag

SEQ ID NO: 52486 - DNA, 420 bp, Oryza sativa
  Clone ID: PAT_MRT4530_54779C.1
atgccaggggtcgggctgccccgggcccccgaccccctccacgctctgtctcgcgcgtgtggcttgggcgggcactcccagcgcccacctacagcatttattgaggcagcactagcgcggcacgtcgcatttaatgcgatgtgtaggcgcactaactggccacttgtggccggaatgaccgatgtgatggcggtcagggagccctgcgcatgcacctgttgcttgaaggggacgtggcctgcggctgcccgtctaatcgccattaatgaggggatttttgccttgcatttgagctcggaccggttcttcttacaccggcgtctgcccgtgacgctcggcgtgatgggatgggcccatgcagcggtaaggcgcgcgtggctccacacgtcggaagacaagacaagcattaattgcctgtaa

SEQ ID NO: 52487 - DNA, 1638 bp, Oryza sativa
  Clone ID: PAT_MRT4530_5477C.1
ccctttgtcgaaggaaccaggaaacggccctccacctcctggacctcctccacgcactgcagcgccatcttcgtctccatcaggcacggcccaccgcagtactcgtccacgctctccttccccacatggaacgccccctccacccccagccgaagctcctcctcccacataatcctctcctccccatcttcctcctcccttctctcctctccacggacgatggagtctgcgccgacttgccgccggccaccgccttggccgccgccacagacggcatcaccaacacccctctcccgcgggttgtcgtcggcctcccccacccccattccccgatccagcgccaccaccagtagcaccgccggcgccgccgccaccaccaccactaccgccggaggctcctgcactgccaccgccaccgccaccggcggcggcgccggcgccgccctggccattgacgttgccgccgccgccgccgacccgttcgccgccgccggagccgacccctggaactactgcaccaccaccacctgctccccctcctccttgccctcggccgccgcccgtgcctcctcccccgccgcgcgctcctcatacccacgccaccgccgacatggccggccttttccctctccgccctgatgcccttgccgccctcgccgccgccaccgccttttttgccacctttgtagcgccgtctaccattgccgcatccccaccagcaccttcttccgccgctactgccgccaccgccacctccgcctccactaccgccaccgccaccgcctccccgtcctccttcgccgcctcccccgacgccactgctcccgccaccgccgccgtcagtgccccagccccacccccatccatagctccaagaactccccccgctgcttccccctcctccaccaccaccaccgtctccatccttccggccggccacagtcgccacaccagccacaccacgctcgcacgccgcctccgccggcggcgccatccccgaaaccctagacgccgccgccgacctcctcccccatcaccaccatgtccgcgccggccttctccaccgccccgcagatcacatccctcgggtcccctttctccacccgcgtctccaccttcacctgcacctcctcgctctcgtccaccgccaccaccacccgccgcggcgatcctcctcctcctcctccgcctccctccccagcccctcctgcgccaaagccgccgcctcgaggctcgcgtcagcgcccgcgcccgcgcccgccgcgacgacgtccgcgatggccgcgcacacccgccccacgtgctccgggtggctcgagtccgcatgcgccggcgagcccccctccccctccccctccacctcctcctccctgatcgccttcaccatcatctgctcctccaccgtcgccgccatctgctgctgcatcctcgatcgatcgattaattccttccccaccaccaccacctcctcccctccctccgccgacgccgcttccgacctcgcctccgcaatctcgcggccgatgccactagcaccggcctcgaggaggcgccccatctcgacctggagctcctcccagttgtagtatttgcttgctatgcatattactccctccgttttttaatagatgacgccgg

SEQ ID NO: 52488 - DNA, 331 bp, Oryza sativa
  Clone ID: PAT_MRT4530_54780C.1
attgcaagaaatccatgtgactgggctgagcagttctctcttgactcgattaaagattacatgtgacgatgtttgtacctaattattttgtacaccaaagtttaaaccactgaatgcgctcagaaagcttatcaatatatggcagaacagataaggcccgccatgtatattgatcacagtaagggaacaagtagacactccctccgtctcataataagttaatttagtacgagatgtggcatatcctagtactacgattttggacaaagacatgtccagattcgtagttctaagatatgtcacgtcctgtaatagagtaacttattttcga

SEQ ID NO: 52489 - DNA, 683 bp, Oryza sativa
  Clone ID: PAT_MRT4530_54781C.1
gaatacacaaaatagtctggaaatttgggctaaatttctgggcgtgacactgccactgcgggagtggcaccgcaccttccaaaagattcctcatcgcccttgttcatcgggccggcttacagttgagcccagcatggcccattggtgacgttggcccactaggagtgggagtggtagtgggaggaacagaggacgctgatccttcttcctccacggcggcgagggccgaggaggcgaggatggacggccatcgatgaagaacaaaaacctccagcctcctcaattcaactgccgccattcccatgttgaggaggctgcgactgccggagtggcaccacaccttccagaagattcctcatcgcccttgttcatcgggccggcttacagttgagtctagcccagcacggcctattggtgacgttggcccactaggagtgggagtgggaggaacagaggacgttgatccttcttcctcctctactccagactcatccgccatcgccacgcacccccctaacagctctccctcctccacgccaaagtggatttgcatgctcctgctcgtgcggattgtgccattgccgctgccgatgcagacgacatcatgcttggagcccactgccgacgcggacgaggacgcacggcgctgccatagaggcggcggcgggtggcgagtgacgtga

SEQ ID NO: 52490 - DNA, 129 bp, Oryza sativa
  Clone ID: PAT_MRT4530_54782C.1
ttttaactgtccttctgcgggtccttttatagagatacacccgagacctctctgatttggatgaactatgctaccttttgattctctggctgactaccgacgatgctatgcttggccatcctgatcttg

SEQ ID NO: 52491 - DNA, 563 bp, Oryza sativa
  Clone ID: PAT_MRT4530_54783C.1
atcgattacctgatccttacgaggccggtgccatgctgcactgacagcaaggatggatgctgctaccccaagaaccacaacccccccgaagactactatggcaggagctggaccacctgggacttgcccaagaacacatgcgctgacaccagccacttcctcaatgctctcgaggttgacaagatggactcacctgatgaaaacctgcgccacatactgtgcaacatcaagtgtcctcgcacctcatgagttaacatcatgtacaagccaccggaacagctatagtgtgtggtccactctaaccgaatcggactacatagacgccggtaatcagctatcaatgaactcataaggtctctctgctctcgctgagcaaggcacagatggtgactaccaacttgacaacaccgcgctcactatgcgtgcagtgaaccagaacctgagcgctacaccactagagcaaagcagggactgtccatactactatgagcagttgtacgagatatacctgtgcgaaaactatgacacctagagctatatatatgtcttctcctgcccaacct

SEQ ID NO: 52492 - DNA, 222 bp, Oryza sativa
  Clone ID: PAT_MRT4530_54784C.1
atgagtgttatcgagaaggcgatcagtagcatcgataggaagaccaacccttacctactcaacccgctcacaggcgcatgtgtcgcgctcctaccagccatgacgcttgagtttgttacaaggttcgttttctcccccagtgacggtggctgccaaggtgtcacatgcatcatcgactttcataggtcgggcacccccgacgacaagcaggtcatggcatga

SEQ ID NO: 52493 - DNA, 300 bp, Oryza sativa
  unsure (1)..(300): unsure at all n locations
  Clone ID: PAT_MRT4530_54785C.1
gatgcatgagtcagtcaatctacactctacagagcagagtgtgtcgaatttgttttttttttttcctttttggtatggctggtcaattacaaataagaaacatagatgtgtgaatgatttgtagttctttgagttttttctttctttctgtggtggtttgatgtaattactttgtaattaatatagttgtccataatccacggaaaaaaaaaaaaaaaaaaaaaaaaaaannaaaaaaanaaaaaanaaaaanaaaaaaaaaaaaaaaaaaaaaaaaaaanaaaaaaaaaaacaaaaaaa

SEQ ID NO: 52494 - DNA, 181 bp, Oryza sativa
  unsure (1)..(181): unsure at all n locations
  Clone ID: PAT_MRT4530_54786C.1
cctgggcttgtncgaganaagccgcccctnggttgtactcctgcgcnagaaattcncgcgatctgtcttactgcggctgatggtagnggngtgcgtgtgcggtattgnctanagttctgncgttaacttgccctttgaggcnacagtangcgtgtcattatctggcaattactcccatnan

SEQ ID NO: 52495 - DNA, 436 bp, Oryza sativa
  unsure (1)..(436): unsure at all n locations
  Clone ID: PAT_MRT4530_54787C.1
ccggtcgaccacgcgtccgacctgtcagggggttattgcttccaaggtgtggggagatgacccgcctctctgtgtgtgcgacgattgctattgaggcgggagtaggtttattttagatcctacttttcattaacctcagctcacacatgcactgnnttttattantanggttattctattatcgctgttcttctcttggatccttctgtatgttcatgtccattttacaggcatttatggtgctggatgccttatcactgaaggttcccgtggtgaaggtggtatcttntttattctagtcttttattgtgtctgttgatttagcgttttactgctaattatcttgtttcttcagatgctggttgatgatctatgacaatggtaatttgataaggccgtggtgttgggccattgaaggaccacatctatctgcatc

SEQ ID NO: 52496 - DNA, 165 bp, Oryza sativa
  Clone ID: PAT_MRT4530_54788C.1
atggagacatcacgcaagttcttcccaacaattgtagttctcctcctgctcgttgtcaccacagatggtaccagctgcacaggcaagggagtgcgagacgccaagcaacgagttcaaggggatctgcatgatggtggccaactgcgccaacgtgtgcctgactga

SEQ ID NO: 52497 - DNA, 1018 bp, Oryza sativa
  unsure (1)..(1018): unsure at all n locations
  Clone ID: PAT_MRT4530_54789C.1
tccnngggggggttgggaggggaaatttccnggggaaccgaaaagggnttggttttacttggttcnattggggtttccctaaaaatttttccggtttgggttttaacctccccccccttggaanacttaaaanccttttggaanattggttccccctttttccttttggcgggtttttccggggaanaaaaaatttttattccncccaaggggngaggttggggaanaaccttttccccctttttggaaanttttccncgaaattggccattttccccaaanaaaaangggttttttttcccaccttggggggccaangggcccctcccncaaaaagggaattgtttntaattgccttcccancccattttgggttggccaattggccgnaaaagacctcccggggggttggggntttggaatnccgcctttggcaanccccggtttcccgccaaccttttgggccttggccggccttggtttaccaattggggtttttttccccccccccccccttggtttttccaaaagcccttttaattggggttcccnaanaaaggggtttttgggggngggggnggttttcccccnttccccaaantttccccaaaaggggaaacgccccccnaaantcnaaaaaatttttnnnttggtttttnccccccnttgnaattnntttgggnaaaaaaaatttttaattctttggtttcccnaatttaacnaaaacnncccttttcctttgnaaaaaacctnggtttttttntttntttccnnaattttnantnaaaatttttnggtttccntnggtttcccccccccnaaaattttgnaaaaaaatttngggggtcccccccnnggnccccnaaannanttttttttngggntttgggggggccccnnnncccccnnggnaaaacncccccctngntttttttnaaaaaannaaaaaannttcctttttttccttttncccnnaaaaaggggcnnntnnnttttttnnaaantnaaaantnccccc

SEQ ID NO: 52498 - DNA, 513 bp, Oryza sativa
  Clone ID: PAT_MRT4530_5478C.1
atgtctctcccgggggtgagcgcgtcgacgttcaagtcgccggtgttcatcggcctcctggccgtcatgtgcgtcgccgtcgtgctcctgctgcaccactgcgtcctcgtcaccttctgcgacaccaggaggcgccgtcgacgccgacgccgccggggcacctccacgcagcagcagcacgtgcagcagggggaggacgacgacgacgacgacgacgaggacgacatgatgagctcgtcgtcgcaggcgaagctggtggtgtgcccgtacaagaaggcggaggagtggggcgaggcgatgtgcccggtgtgcctgtcggagttcggcgacggcgaggcggtgcgcgtgctgccggagtgcatgcactacttccacgtggactgcatcggcacctggctccgcgccaacaccagctgcccgctctgccgcgccgacaccacgcccagctccggcgatctccaccaccacctctccatctccgtctccctagaagaaatcctagtgcgcacctag

SEQ ID NO: 52499 - DNA, 1206 bp, Oryza sativa
  Clone ID: PAT_MRT4530_54790C.1
tccggaaaagagagacactcattggtgaaaattttcctgccggtgctgatgataattattttaccataccaagggcaaggattttcatgttcccaaggaaaatgactaaaggagcaaagcagtgggccgcagctggagcaaaagtgcttcatctggtgccctgtaaagtgcaaaacttgtgtttggtcatgaaatgtattgaaaacattgtggaacgttatgagcactctcaagcagcacaaaaaggagtacatggcaggtgcattctgcaaaagaggaagagcaaggattttcaagttctcaaggaaacaatagataaaggaccaatcaatgatgacatgcgacctattgatgaaaaagacatatccacattaaacatggaccagattagccaaattgaaatattattggaagatgaactgaggtggacaagggcaagaaaggtggtggcagatagaattgccaggttgcagaaaaagactgacggcctgaccggcagcaacattcagcaagcactattttgcataactgaaaaattcagagatgcacaagccgtacagaagaaaccggcgactgctgagacagagagcaactccactgagatgccctctgatcatgagaagaaacaggtagcaggaggaagccagcagagcgccgaggaggaggaggaggagatggaggtggtgctcaggcaccgcctgagcctgggcaccggcgaccgtgacgatggtggcggtggcgcggcggagcaacggcaccggacgacgccgccgccggcggtcgacctcaacatgccgtgccgggacgcgggtcagctgcagtagacgtagataacattatctttgcacagcaatctgagtctgtctaacgttagtcgctactactgtccccggtactaacagtgtcgtaagttactgttgctgggaaactactactacgctttgctaatctttttttactgtagccgttcatatccaggatactgtgccgtaactggagcacaccagattcaaatcaaatgtactgtgacaccattgtattttaaaatgtgtttttctcctacttcctactagttctagttcatgttcggtggaaaattgtaaaccaaataaaccggcatcggtattggtcgatgtgtacccgtgggctctgtaataagactgtccgtgcctgcaaattagtactgataatgtgtgtcatggtttt

SEQ ID NO: 52500 - DNA, 168 bp, Oryza sativa
  Clone ID: PAT_MRT4530_54791C.1
atgaaaaggggcaggctagacctgaacccaataacaaaatgtgcatgggaggagtttggtgcagcgcttgcagctgccatgcagtggctgagccaagaagacggcagaggtgaagttcaggacacggtcgcccaacctactggtagctggcttcggtgctgcctcaat

SEQ ID NO: 52501 - DNA, 161 bp, Oryza sativa
  Clone ID: PAT_MRT4530_54792C.1
gcccctgcgcgtgccggtaccgatccgcaggttcgggccacacccacgcgttctgtttagccggacgacggatggggtcaccgccgacttgagtgcggataggggaggatccgtgcggaaagcggggcatttgaggaggacacctcgcattgcccgcgcga

SEQ ID NO: 52502 - DNA, 365 bp, Oryza sativa
  unsure (1)..(365): unsure at all n locations
  Clone ID: PAT_MRT4530_54793C.1
gtacgtgtgggcggncgttgtnaatcanagaaaggnntctccttnctcnatnntttccnnnnntccccctttncctcctcctntcccctctttcccttntccgcngccgtngcagcatcaacccaatccgccgccatgagggagtgcatctggntccanatcggccaggccggtatccaggtcgggaacgcntgctgggagctctactgcntcgagcatggcatccaggctgatggtcagatgcccagtnacaggactnttggtggaggtnatgatgctttcaacaccttcttcagtnagactggtgctgggaagaatgttncccgtgctggtattttttggatcttaagcctactgtaatttaa

SEQ ID NO: 52503 - DNA, 461 bp, Oryza sativa
  Clone ID: PAT_MRT4530_54794C.1
ttttgtttttttttttttttgtgtttttttttttttttttttttttttttttttttttttttttttttttttaggaaaaaaccaggccttaggattcaacacgggctttgggggggaccttttttccatgggccctttgtggccggaaaaaattttccagccaaccagggtttggtatcccccgattttccaaacggggcccaagcccataacaggggggaacccgggggatttttacccccccccaaacgggagcccaagggcaaggtgccccccaaaaaccctttttacattgtaggagcccaaatcaaccagggtgaacgttttaaccattttaaagggaagcccccttgaagggccgagacccttgcccccagcaggcaacaagggaccccgggtttccaaaacccgaagggcccagggggggcaattaaaaaaccctgcaaccccccatggaaacc

SEQ ID NO: 52504 - DNA, 312 bp, Oryza sativa
  Clone ID: PAT_MRT4530_54795C.1
atggaccaagccgacgaggtccacaaagagaaagtgtgctactaccttgatcacatcgtacaagccaaatacggcgtcttcacagttcacaggggagctctggtcaggatggtccaggctcctgggcacggcatggatgggctactcaagaaaaagagcggattaacggatactggcattggcggcgcctatcctatcctggtcccctgcaaaaacctaggagtggtggtggtcacggacatcacactcacagatcgcctttctccggcgccgcgcgcagccaccggcgcagaaaggtgtaaatctgtctaa

SEQ ID NO: 52505 - DNA, 1143 bp, Oryza sativa
  Clone ID: PAT_MRT4530_54796C.1
ctacttctcacctggacacatgatatatgtccaaccaaaagtccaaaacagtacttagggtctactattgaacagtgcatgtcattcttgttggatgcttttacttcgatgggtgcagatgtcaatgatagtttaaaccatggtggtggtccttatgtttttaaaataaatggccaggttcatcaccgtattgatgcattgttgcccaatgaaaatactcctaccaagtatactcagctctatatttatgatacccaaaatgaaattcagaataggatgtgtgctatccttagtgaaggtggcgatccttctgctttagatcctgttatagctgctgagctaatgcagatgctagatgaatgcattcctttggtaaaacaatttaggttagcaagagatcatttggctgagaaggtgatgaggaaatagcaattaggattgttggctctgatgaggatggtcctgtccagtacgagttgccgacagctgatgagcttgcctgtttgattgttggtgatttttcgttagaaaacctgaagcgtgatatcattattctgaatatacctggcccattgcaccatgtgtctagcctacaccctgcttacatggctttacagcacccactgctttaatttcccctacggtgaacacagttttcaggtaggtataaatttaaggggggttgatcttactcgaaccgctatacgtacaaaagcatcaatgcaggaattccattgttattattgtcattaccgtcgtgatcagttcaatacatatttatattgtggtcggttgtcctctcaaggccaggttgactgctttccttgtgttgaggaaggtaggctaacgtacataagagaccatcagggtgattttagatgcgaaaacatttaagggattgcggatgccgttggcagaggatgcttagatggtggtgttggtaaacaacgaatattgcctacaagctttactggtgaaagaaggtacatgtattagaactatcaagatgcagtagctatatgccgtgtgtatggtgcgcctgatgtattcacaacatttacctgcaatccaaagtggtcggagattgaagaggcccgactaggcgaggggttggaggtacctacagatccacatgaaatgaga

SEQ ID NO: 52506 - DNA, 1200 bp, Oryza sativa
  Clone ID: PAT_MRT4530_54797C.1
atgggcgatgaagaagacctggagcttgtgcttggagtaagagcaactagaagagatgaacaggatgaccagacaacatgcacacaatcatcagaagaagctatggagggagaagaagatgaaactcgccctcatggcgaggctcctgtcgagagcttgagcttccctctgtttgtatcctctgcagagaccggcagtgcgaattcagagatgtgcacacgtggttttgatgtgaacactcggccagcagacggaggcgcagaggcagggaggccttcgtcaccatcttctatgcaggaggcatccacgagacagcaggtagctgatcaggaagctgcagacgatgaggataacggcggtggtggcgcgaggaagaagttgaggctatccaaggaacagtcctcgtttctggaggatagtttcaaagaacacagcaccctgactccgaaacaaaagagtgatttagctaatcggctcaaccttcgaccgcgccaagtggaggtctggttccaaaacagaagagctaggacgaagctgaagcagacggaggtggactgcgagcatctgaagcgctgctgcgagaggctgacgcgggagaaccggcggctgcagagggaggtggccgagctgcgtggcactctccgaaccaccacgtcgtcgtacccgccgctgtacggcctccaccacctaccagctgctgccggcacggtgttccgggtgtgcccttcatgtgagcatagcaaggtcgttgctgcggcagcttctgagagcttctctccgcgcgtcttcgccggcggcggcgcccctgccgccatcaccgctgccgccgccgtgccgtctccgggcgctggctcaccgccgtcgtcgtccgccgctttgttcggcgccagacggcctcattttggccccttcgccgccgccgtcatcccgccggtgctccgccgccagccatcggcgacgtcgtgaggtcttagcttgcagttttttttttcttgcactgcatctgcatgcacatgctaattaaatatgggatatatatatacgcgtgcattgatcatgtaaatgttttcccttttatgtttgttgttcatcaaaatcatgcttatatagggaaatatgtacatatagttctgttcatagaaaagattaaagtcatacatatactttgtaaaaatgtaaaaaaaaaaaaaaaaaaaaaaa

SEQ ID NO: 52507 - DNA, 401 bp, Oryza sativa
  Clone ID: PAT_MRT4530_54798C.1
gaggaaacatatgaaaggttttttaacaaatgggggccccttttgaaaagggtgattacatttaaagcatcgggggatttttgtcctgaatttgaaaaaaaaaaaaaaaggggaattgtttttgagggtttaaaaattttttactcccaccaaatcccgagggaaaaccatgccggtttttgccttttgacccctaatttgaaaacgggtaagttcaattttgcaaacaaacccaaagggggccccgcccctcattttttgaaccctgagggaaatcggggaaaaaaaacttttaaaaaaaaaagggtttgtccttaaaattctaaaaacctggtgagcctttcctgggacaggggaaaaggccacaccccgaaggcttaccaaaggggaaccggcctccc

SEQ ID NO: 52508 - DNA, 1785 bp, Oryza sativa
  unsure (1)..(1785): unsure at all n locations
  Clone ID: PAT_MRT4530_54799C.1
gagccgcngngttngnggtttcagtacgaagcagctcaacaaacagaccaacccttctccatcgccctactagaagcgtgaagagctcggcctcgcgcganctgcgagcgacatggcggcggcggcggcggcggggaggaggaggttctttccgccggtgacggcgtacgacgcggcggcgggcgcgaggcggacggtggcggcggacctcgacgggacgctgctggtgtcgtcgtcggcgttcccgtactacttccttgtggctctcgaggccggcagctacctccgcgcgctggcgctgctgctcgccgcgccgtggctcctcgcgctctacgtcggcgtctccgaggccgccgccatcgccctgctcgtgttcatcacgttcgccgggctgcgcgtccgcgacgtcgaggccgtggcgcgcgccgtgctgccgcgccactacgccgccggggtgcgcgccgacacgtgggcggtgttccacggctgcgccgagcgccgcgtcgtggtcaccgcgtcgccggccgtcatggtgggggagttcgtgcgcgagttcctcggcgccgaggtggccggcaccgagctcgagacgttcgcctccggcaagcggttcaccggccgcatcaaggccgtcctcgtcggcgagaagaagcgcgaggtcgtcgagaggctcttcgccggcggcgacatgcccgacgtcggcctcggcgaccgcgagagcgaccacgacttcatggccatctgcaaggaagcctacatggtgcccaagaacaagcgcgcgccgcgcgccgccgccgacgagctgctgtcgcgcgccatcttccacgacggccgcctcgtccgccgcccggagccagcgagcgcgctgttcgcgctggcctacctccccgtgggcttcgccgtggcgctcctccgcgtgttcctcaacctccccgtcccggcgcgcctcgtccgccacacctaccgcctcaccggcatccgcctcgccgtgcgcggggcgccgccgccgccgccgcgcccggggacgccgggctccctcctggtgtgcaaccaccgcaccgcgctggaccccatcatcgtgtccatcgcgctgggccgccccgtgacgtgcgtgacgtacagcgttagccggctgtcgacggcgatctcgccgatccgcgcggcggcgctgacgcgggaccgcgcggcggacgcggcgcgcatcgcggcgctgctggaggagggggacgtggtggtgtgcccggaggggacgacgtgccgggagccgtacctgctgcggttctcggcgctgttcgcggagctgacggcgaggatcgtgccggtggcggtggaggcgaggcaggggacgtactatgggtcgacggcgagggggtggaagttcctggacccttacttcttctacatgaacccgcggccggggtacgaggtgacgttcctgccggcgctgaggccggaggagacgtgcgtcgccggcgggaggagcgcggtggaggtggcgaaccacgtgcagagggtgatcgccaaggagctagggttccaatgcaccacgctcaccaggaaggacaagtacatgaagctcgccggcaacgacggccgggtcgccgccgccgccgacaagcccaaggccaattgattagtccatccatctttctaaagatggcaggccacctaccagctgattaggccacttggcgcccctaagttggtatataaatctaatgtcatttgagaaaaagaaaagagaaaaaaaagcggctgtcatcccaaaaaaaaaaaaaaaaaaaa

SEQ ID NO: 52509 - DNA, 275 bp, Oryza sativa
  Clone ID: PAT_MRT4530_5479C.1
caagaaccaccgcacgccgccgcggcgaggggcgccgtggaggtcagcctccgtcgggtcgacgtcgccgacgtcgacgccatgatggtctgggcgtccgacccccaggtcgccgccgtctgccgctgggagcgcgacgagtcgacggtgccactgctcgtctacctccgcaacaccgtgctcgggcacccgtggttccgcgccatatgcgtagacccgacagctcagtgaccggactgattaactaagccaagtgggtgaattcaaaggcttca

SEQ ID NO: 52510 - DNA, 354 bp, Oryza sativa
  unsure (1)..(354): unsure at all n locations
  Clone ID: PAT_MRT4530_547C.1
cttcgnacccnagaggcccggtccatccaaacttgcggccgcatcgcggcatccaccaacgaggccgtcatctcggcccgcgcgcgggcattgggccacgggggcatctcgggcattccggcccacgtaaacaccaggcaccatcccctcggctgtggctcccccgttcctcttgtcccactctctcttggccccgaccctcgggagtccggcgctaccgaatccgtcttccccccggagctgtcgaaggagcgccgcgtgcggccgtgctactcccaccgacgccgcgtcacctcgaaggcgaaggggctcttctcccctcccctccaatggactgaggcgtatcccgtctag

SEQ ID NO: 52511 - DNA, 482 bp, Oryza sativa
  Clone ID: PAT_MRT4530_54800C.1
ttagagttgcagcaactaactcatcaagaaactcaaagatgagtagtggcggcgctaaggcctatgcggccgttgttctgatcaggatcatgtactctggtatgcatgtgatgagcaagatcgccttggatcaaggcatgaaccccttggtgtttctgttctatcggcataccactgctgcactcgtgctgatccctattacttttgttctagagaggcggaaagctaaaccggtgacgttaaaaattgcagggaaaatgtttgtacatgccttatatggggtgacagcttgtggcgacttatttaaccttggtcttaattatacttcggcagcatcatcatcagcattgtacaacgttcaaccagtggttacctttgtccttgctgttgtatttgggatggagtctatgaacctaagaaggtccatggaaatggtaaagcggcaagtattcttgtctgcattcgcggtgtacaaattttgg

SEQ ID NO: 52512 - DNA, 660 bp, Oryza sativa
  Clone ID: PAT_MRT4530_54801C.1
atggcgccaaccacattgacgcgctccccctgccacctcagcgctgacccaccatggtggcaggacgacggtgccagccactcatctacactaggtggtgaacaggccaggacagtctcctgctgcggctatcaaatcgaagcagacgagaacctggaactcgaaaaggctgggcgcctgggcaggccaggccaggccagaaaggcgcgcgtagagcccggaaggcaagtaccgcgacgaccgtcaaactccacccgccgcacgcccaccgagcccgaggcctacaaagcctgggcctccatggctccatgcatccgaccaccaccgagggagtgcggcccgggccgctgcctgcccaaaacggaggcggcagcggcggcagtggcccagtgcagtgctgcatgcgatttgacggttgatctgatgcttcgattggatacggcggtcgacatggattcagagcccgggcccccgacgaaacaagctggaccggaggaggaggagtactgtacacaagtacagacaccacggcgtgcggtggagccgtacgtggaatcccgtcgtccctgccccaagttccgacgcgcgcaggcgctgcgccatctgttcgagtttgacgtgcctacttcacctccacgtacgtccatccatccatcgtaa

SEQ ID NO: 52513 - DNA, 595 bp, Oryza sativa
  unsure (1)..(595): unsure at all n locations
  Clone ID: PAT_MRT4530_54802C.1
ccccccacccatcatgncatgccaagatcgagtaatcaaccacccacagcatacggaatgatcgagtaatcaagctcagattgatgcaccgcaagcaagaaagcagagcaagaagcagaggcgccggcgcggcaagtgaagagacgacgaccatcaacgtttggatcctccttttctattctgctatagtcttcttcttccccaataattccttgtctagttttaatttttttttctcttcaatttttactcctccaatccaagttgaagttgtcactagtagagttctccagagagagaggagatgaagcaacaacaaggagctgtgtctgcctgtctggaggaactaataccaaaccaaaataagcagagtgtgtgctgctgtgccacaatcagcaccaccaccgtggcaccacccactagcttagcttagctagctagttcaaagttctttttgtatatacttataagaggaaaaagaaaaaagagagctgatcagtgaaaattcagaatgcatcagtgaagagaattgctagctcttgtgttgtcaaagagatgcatctttgaattctcccaaaaaaaaaaaaaaaaaaaa

SEQ ID NO: 52514 - DNA, 912 bp, Oryza sativa
  Clone ID: PAT_MRT4530_54803C.1
atgactaaatcttttgcccacaccctcggaaagggtggatatggtacagtttataaaggcagcttgtctgatggcagtgagatagcagtgaagatgctggaggacacgaaggatgatgcagaggacttcatcaatgaggtggtcagcattggcagaacatcacacatcaatgttgtcactctgttaggattgtgcttgcatagatcaaaaagagctctcgtctatgagtacatgcccaatggttccctcgataaatacgcagttggtgtagttgacaccgtgcaaggagagaaatccctaagctgggagaagttatacgagattttggttggaattgcacaagggcttgattacctccaccgttggtgtaatcatcgtgttgtccaccttgacatcaaaccacaaaacatcttgctagaccaagatttccgtccaaaaatatccgattttggattagcaaagttgtgtaagccaaaagagagcaaaatctctattggtggtgcaaggggaacaattggctatatggcacccgaagtgttttggagacaccatggagccgtgaccaccaagtctgatgtatatagctatgggatgctaattcttcaaatggttggagcaagggaaaataccaatgcaagcatgcagaccgtaagcaagtatttccctgaatggttatatgacaacttgaatcaattttgtggtgctgctaccgaaggcattgatagtagaaacacttgcatatcagaggttgctcgcaagttggtgacaatagggttttggtgcatccaatgtacacctgaagaccggccttccatgagtgaggtcattgacatgtttgatagaagcatgcatgaactgcaactaccaccaagaatgtcttgctgcggaattgataatccaagcattgtttga

SEQ ID NO: 52515 - DNA, 608 bp, Oryza sativa
  Clone ID: PAT_MRT4530_54804C.1
caagctcctcaacgagctcaccaagcttctcgtggttaattcagttttctcctctttacctacatactatatgtgcactttgaaattgcctaaattagttattgataatattaatagtgcaagaaaacaatgtctttggaggggttttgaggtgaattcaaataggaagtatcttgaagcttgggataaagtttgtaagccaaaacttaagggaggtttgggagttttaaatccttcaattcagaatcaagctttgcttttaaagtatttggaaaaattctacaatagaagagaattgccatggattaagcttatttggaattcatattatagaaatggtgttcctcctatgtccatttttaagggttctttttggtggagagatatctacaatctaatggattttttagaggagttaccagatgtttagttggagatggtgtttcttgttcttttggaatgatgtttggagtgatgaccctccactctctgtctctataccgaggcaatacttatttgctgtcaatacaatgatctcggttcataatttcctcaatttggaattggaagataattttcacttgcctctttctcagcaagcttttgaa

SEQ ID NO: 52516 - DNA, 3459 bp, Oryza sativa
  Clone ID: PAT_MRT4530_54805C.1
tcgttatcagaggccactacccgtgcaccacgcgccctctcccacaatctcgctaaaaagttgattttctttttcagcttcctcctcccctcctccgcttctcaatccactagcatacatatcagatcagattcctgtacacttcccttttctcgcatccaatcccgactatcgcagcacccatcaaatcatcatccttttgcaaaacctaaaaaaaaaaagggtagataagagaaggttcttgcatccagagaggacactgtccgtcgtgcagcgtttcttgcttggttgcttggttgaatcgggtggatgtcggcggcgggcggcggcggcggcgtggggaaggtggagaagatggcgtcgatcgacgcgcagctgcggatgctggcgccggcgaagctgtcggaggacgacaagctggtggagtacgacgccctcctcctcgaccgcttcctcgacatcctccaggacctccacggcgacgacctccgcgagctggtccaagaatgctatgagatcgctgctgagtatgaagggaagcatgactcccaaaagctcgatgaacttggcaacatgttgacaagcttggatcctggcgactccattgtgatggccaaagctttctcccacatgcttaatttggctaacttggccgaggaggtccagattgcatacaggaggagaatcaagctcaagaagggtgactttgctgatgagaactcggcactgacagaatctgacattgaagaaacttttaagaggcttgttgttgacctgaagaaatcaccagcagaggtctttgatgcccttaagagtcagactgttgacctggttttgactgcacatccaacacagtcagtgaggaggtcactgcttcaaaaacactcaaggataaggaattgtttggttcaactatactcaaaggatatcacaccagatgataaacaggagcttgatgaggctctccagagggagattcaagcagcctttagaactgatgagatccgaagaacccagccaactcctcaagatgaaatgagggctggtatgagttactttcatgagacaatctggaaaggtgttccgaagttcttacgccgtctggacactgccttgaagaacatcggaattgatgagcgtgttccttataatgcacctctcattcagttctcttcttggatgggaggagaccgtgatggaaatccaagagtgacaccagaggtcacaagggatgtatgcttgcttgctagaatgatggcttcaaatttatactgctcgcaaattgaggatctcatgtttgagctgtctatgtggcgatgcaatgatgagcttcgggcacgagcagatgagctgcatctctcctcaaagaaagatgcaaagcactatatagaattctggaagaaggttccgcccagtgagccataccgagttgttctaggtgatgtgagagacaagctgtacaacacacgtgaacgagcacgccagttattatccagcggatattctgacattcctgaagaaaccactctcaccagtgttgaacagttcttagagcctctggagctatgttacaggtcactctgcgattgcggtgaccgtgtaattgctgatgggacccttctggacttcttgcgccaggtgtctacctttgggctgtgccttgtgaggcttgacattaggcaagaatctgacaggcacaccgatgtcctcgatgccatcaccacatacctgggaataggatcataccgtgagtggtccgaggaacgccgtcaggactggctcttgtctgaactcaatgggaagcgcccattgtttggcccagaccttcccaagaccgatgagattgctgacgttctagacacgttccgtgtgatagctgagcttcccgctgacaattttggggcctatatcatttccatggcgacagctccgtcagacgtgcttgctgttgagctcctccaacgtgaatgccatgtgaagacaccacttagagttgtcccgctgtttgagaagttggctgatcttgaatctgccccagcagcagtggccagactgttctctatagattggtacagagaaaggataaatggcaaacaggaggtcatgattggctattcggactcgggtaaggacgccggtcgtctctcggcagcttggcagctgtacaagtctcaggaggagctcatcaacgttgccaaggagtttggggtgaagttgacaatgttccatgggcgcggtgggactgtcggaagaggcggaggtcccactcatcttgccatcttgtctcagccaccagacacaatccatggatctctccgggtcactgtccagggtgaagtcattgagcagtcctttggtgaggagcacctttgcttcaggacactgcagcgtttcacggctgccactctggagcatggcatgcatccaccaattgcgccgaaaccagaatggcgtgctctgcttgatgagatggctgtggtggctacaaaggaataccggtccatcgtcttccaggaaccacgctttgtcgagtatttccgccttgcaacaccagagatggagtatggaaggatgaatataggaagcaggccatccaagagaaagccgagtggtggcatcgaatcactccgtgccatcccatggatcttcgcgtggacgcaaactcgcttccaccttcccgtctggcttggcttcggttctgccttcaagcacatcctggagaaggacatcaggaacctccacatgctccaggagatgtacaatgagtggccgttcttcagagtcacgatcgatctggttgagatggttttcgccaagggtgaccctggcatcgccgcattgtacgacaagctccttgtctccgaggagctatggcctctgggagagaagctgagggccaactgtgaagaaaccaaacagcttctccttcaggttgctggacacaaggatcttctcgaaggtgatctctacctgaagcagcgccttcgcctccgcaatgcctacatcaccaccctgaatgtctgccaggcctacacgatgaagcgaatccgcgacccggactaccatgtcacgctgcgcccccacatgtccaaggagatcatggactggtctaagccggctgcggagctggtgaagctgaacccgaccagtgagtacgcgccggggctggaggacaccctcatcctgaccatgaagggaattgctgctggaatgcagaacaccggctaagcgaactatcaactatgaagtgcctgaattcacaccgttttatatggactcttatcttgatttcggtcatttgctctcggccatttaattttgccgatgcagaggctcgtgcagtttctaatttctttcggaagatactttcaataatggagttgtacaagaacatcaattaatcaaaataaagtggatattatgttcaaaaaaaaaaaaaaaaaaaaaaaaaaaaaaaaa

SEQ ID NO: 52517 - DNA, 1815 bp, Oryza sativa
  Clone ID: PAT_MRT4530_54806C.1
atggcgaagagcgggcgacgggcgtggtgggggcgggcgtggcaggagcgcggcgtcgcggcggagggagtcgcactcgacgcggagggcgtcctggcgggagcggagggcggtgctaagaaggcggcgacggcggtccgggcgaagaaggcggcggcgtcggcggtggttcgggcagctgtatgtgatgaagacgccgccgttgaagcactcggcgcgggcgcagccgatcctggtgaagttgagcctaactatgaagacaaagtggctgcacttgtggaagtcaacaccggcggtgcagttgtcggtgtccctgtcgtacaagtgccgcttgggcaatctctgcctccaccgccggactcccaggcaactgaggcaagctccgcctctgccgctagccacgcgggcgatctccgcctccgcaaccggacttccggacgagctccgcctccgccgccggtagacacgaattggagcgcggccgagcacgatcacatcgccatagacatcggcgacagcacggccggctccgactccgacgacgtcccgagctgcgtggtgtgcacggagcccatcgagtgggtggcggtcggcccgtgcggccaccgcgtcgtctgctccccgtgcgcggcccgcctccgctccggacccaaccccgaccaccggtgctgcgtctgcaggacgctctgctccaccgtcgtcatcaccaaggcggcgacggccgcccacagcgtattcaccttctcagatcagtcgtcgatgccggtggccgccgcccaagacgacgggcggccggtgggtgcgtactggtgcagcgctgccatgtcggcctacttcgacgacaagaagcattacgatcaggtgaccaagcaggtggtggtggcagctgctgatcgctgtttcctgagaacgccgccgcggcggccggacgtggacgcgtcgccgctacgccgcctgtgcgtacgcatgtcgtggcgtggacatgtgctggcgctcctagttgttgtacttgtcactgcactcgtcggaggatgggtggggtatcttacctcaggggatgaaatgatgagcgacaggataggcattgtggcaggaattgccgctctatggggtgcacttgcagccgtcgtttacgtctacaccgttacgccaatctcgactggcccagttactatcgggaacgagaacggcacagttacgacttcgagaaacgacatcccgccgacaattcctcccacgcaagtggagaacggctgccacttcctcatatccaacaaccacgagttcaatctcagtgtgttgccaaggaacgagacggagcaacaacctcagatcggatccggccagaacgcccacccagcaactacaagcgctcgacacaatatcgagagaaagccctttcgtgccgccgctgggacgagggcatgcggcagcggcgcgggcccgtggcggcggcacgattggggctccggcacgcggtggcgaggcgtggcactgacagatagggtgatgtcgcgggcacggccatgcggcggcgggacgcgcgtggctgacgccgtggtggccgacgaggggtggccatgcggcggtggcatggccctgcgtgggcttggtggccgggtgaggttacaacgccgcacggcggcttacaagagatcacaactcaacaatgagtacggccggcgtggcgtggcagccgatggcagcgccgcggggcagccgaggcaggtgcggcgcggcgcgacgggcatcgacgtggtgcagccaggccacagtgactgtcggggagcggccgtgcgacggcgtagacactag

SEQ ID NO: 52518 - DNA, 429 bp, Oryza sativa
  Clone ID: PAT_MRT4530_54807C.1
accacgcgtgcgtggtatcagaaccctgctatctatgttctagccaaggtgatcatgatatggcatgggccttccgctccctgtcgttgaaccagaccaagagccctatgagggtgcctctgccaaggaccatctctcctgcatgactgagagaattcatggtcttcgcatagaacgattatagaccaactccaggcatgataatggactttggcatgcacgagacctactaggtgatggagaactcatcactttcatggacaaacacttcaatgtgcgctcatctatgtgaatggaatgccagactgcactgtactacttaccatgtcttggctactaatttccacacactcctgtgccagagaattgagatactgaatgcgcttatgcaggctctgctagagtctcggaccaggcactgagatgact

SEQ ID NO: 52519 - DNA, 668 bp, Oryza sativa
  Clone ID: PAT_MRT4530_54808C.1
aactagtggatccccgggctgcaggctcgccgccgcgcttcttggcagccgccggcgccggcggcgggcgccgttggcagggaagcctgcggccgtgggtggctgcggggtggccgacggcgaagggtgcggcggggatggccggaccgacgtcatcgtcgtcggagccggggtcgccggatctgcgctggcatacacgctcggaaagtactccatactggccgtggccggtgaccacaagtcatctggatgcagcagaaaagggacagaaagtgacaaccaagaggagagttaatacatgatttgaataaaaataaaagatgaatctaaggtgttctataaaaccaatacaattttggttatagcaaaacagattttgttgattggtgatgcaaatcttttactgcagtaataacaatataaattaactcaaaccgaaaagtttttctcaaacaagttgtatagagcatgtccaatataattccgactgtatacagtttatcttctagtctggaactactgtaactccattactatatcttttcttatatagaagcaaagagtcacttgtgttcccttctctggttttctattctttatcgtgctcctttctatctgcatcaacagagcatttatgtgctctatcttgacacaatggaatgcccaac

SEQ ID NO: 52520 - DNA, 172 bp, Oryza sativa
  unsure (1)..(172): unsure at all n locations
  Clone ID: PAT_MRT4530_54809C.1
cctcgccaagttatgtacaataagtaatcgttctgttactcaagagatgaacaagtagaaacgagaggcttaccttgacaaataatgcaataaaaccacaggcttacattaagaaaaaaaaaaaaaaaaaaagtaaaactatgttangtgaaaaggggggcgcgtttaaagg

SEQ ID NO: 52521 - DNA, 377 bp, Oryza sativa
  Clone ID: PAT_MRT4530_5480C.1
gtcgacctttgtgcaagtatatgaaaatcgaatgtgaacgacagtgctaattagctagctcctacgcggacggattttaagtatgctagaacaccatagaaccattaagcatgcacacagggaaggatgcgaatgtatagagtacatataccaacggttactgcattgatctactcatggagggtatggatgtcatcttccaagcacttagggacgttcaatgtaacaaatgacatatagaggtataaatgagaacaagctgaacaggtctgaacatgatgcaagcatgagtcatcatgtggatgaatcactgaacaatgcactacgtagcagctacaaagagctatatcgagaatgactatctaagaaaagtcaat

SEQ ID NO: 52522 - DNA, 1925 bp, Oryza sativa
  Clone ID: PAT_MRT4530_54810C.1
tcatccctcctcgagctccctcaccaaagaagttgtcgtgttgtggtgcccaacatgttcaagatggacaaggcgtcgttgctcggtgacgccatttcctaaatcaacaagcttcgggggcaaaaagcgggcccacgccttgtaggagatggtgcgcatctcttcgtgagccgactctacgttctcggcctccacatcgccctccatgcgctccgcggctggtttggcgatggtggcgcgaaaggggccaagtccggcgactgctaactctccatctacctcgcgaataagcccgacaaggcggaccccaacaaggcgtggctctcccgcttcacctgttgcatgctctcgagcaagccactcgccacacccgaacttgttgcactgcacgggcgcgaaggagagcgtgtcgtggccgacgtcgtacacgaactggaaattctgctgctggaagttgccgatgatggagagcccccgggagcccatcaccgtgaggcacagcgcgccggagccgccgtcgagcaccatgtagttctccgccggcaggtccaggtcggcgccgccgtcgaagtggaacaccagcctcggcacctccacctggtccacgcccttggccggcgcccggaagcacaggtcgagcccgacgcccgacccgtccgccgccggcagcgccatctgcgccgcgaacgccttcttcagggcgcggtacccctgcacctccaggtaggtgatcgacgtgccggagtccacgatgacgccgcccgtgccgtcgtcctggacggcgaacgccgagctcgggaggctgatccgcgtcgacccgacggtgatggccttgagggacacgtagtagaaggatggctggctcgggttcttgatcagaggcgtggtttgcaccgacgacgcggcggcggaggcctcggagatgccggcgagggagccgaggaggagcgggctgttgttggtgtcgtcgagggaggtgaggcagtaggagaacttgtccaggccgagctgggacaccagcgagagcgggccgcggccgaggccgacgagcccggcgccctgggagaacccgtcgccctcgttggtgtcgccgcagccgaagacgacgcccgggagcttcgacttggccagcgtgaacgtctccgtggcgaggacgccctgcgtcgacgaggagtcgccgtaggtgtaggtgtagccgcacttggacgccgacgtgcacttcgaggtggggaggtcgctgcaggaggcgctggagcacggcacggtggcgtaggtggacgacgacgacgggtcgaacaccggcgtcgactgcttgaagcagtccacgcacggcttgcactgcgtccacacgaggtcgctgccggtgtccacgatggcggagtaggccagcgccggcgtgccgatggacacgtccatcaggaactcgccgttcccggcgtgcaccggcacctgcaggtccccgccgccggccgccttgctcgacgtcatcggcacgccggtggcccgcgcgaccagcctcgacatgcggtggtggctccgccgcgccgcccgccgcagcagctggtgcctcgagtagttgccgtgcgcgtccacgtgcgtcaggtgcacgcgcaggcccttgaggcgggacgtcgtcgtcgtcgtcgccgccgtcgccgccgcggccacgccgccggtggcccagcacgcggcggcgatcgccatggtcaccaacacaagcactcgcgcctccatcgatcgctttgcttcacaaagatgacacgggaaagcaaatgctcaatccttctattggacaaaggctatagatatatatatttgtgaccaaatataattatgatttggtagttatagttaggtttgctctatgcccatacactgatacacgcaaaccaagacaatttgagaagaaactaatgggagaaaag

SEQ ID NO: 52523 - DNA, 184 bp, Oryza sativa
  unsure (1)..(184): unsure at all n locations
  Clone ID: PAT_MRT4530_54811C.1
tccattccacccttccgtagagcttgaacccttataaaccccccccctttttttttttttttcctcacttataaaaaacaatccaaattcttaaaaccgccttttttaaaattgaggcttaaactcaccaattaataattttnttttaccacaaaaaaagtccaacaccacactttaattaatc

SEQ ID NO: 52524 - DNA, 294 bp, Oryza sativa
  Clone ID: PAT_MRT4530_54812C.1
ccacgcgaattctccgcgagtcgacaccaatcgtctcgacgtccagctaggcgctttatcaggtcgatcgaactgcgcatcaccgctactgagcggattatgtggtggatgtaaagtagatatgtcgaacataaacgcacactcttctgcgcctctgttgatatatgctatgaacttgtgccattaggaatgatttactatggatacatgccagtactatatgcacatatacattcacatcaacaagttcctatataaacatattcactcgatgctccacacatatgtagtctc

SEQ ID NO: 52525 - DNA, 502 bp, Oryza sativa
  unsure (1)..(502): unsure at all n locations
  Clone ID: PAT_MRT4530_54813C.1
ggacccagaggatcagaatacaagactaggtagtacaagtacagaagaataagttgccatggagactatgcacttttcaaacatatcgaacctgacatattattgggggnacgagctaatggagnagttggcatcaaagggatnatccttagagatagntagcgtgaaaaaacccatccaaaaaaaataggggtccaaaattgggctattgtaaacgccaattggggactttaataggggggttggccttccaaaaggcacagctgtttcagtcttaaatataggtacaaaggagtagaacaattatatttacccacgatgtaaggttaaatgacagcctgtgagcttatgataacctagatagatccgacagtagggggcaaacagaacaaacgaagatgggaggtctgaagaactgattggataaaggattagataacttctgtcagagcaaaattcagcttttagatctttactggacaaccaacattattatgcacta

SEQ ID NO: 52526 - DNA, 769 bp, Oryza sativa
  Clone ID: PAT_MRT4530_54814C.1
agtcccaccaggctgacttttgcgtttcttccccttgataataatcttggtgtcttctttatcagtttttgcatcattagagccttttggcttatgctgcgctgaccgtccagattttacgcttttgtcaactacttggctcttttcaagctcttgttgtttgcggatattttcgtcggtcaatttcagtaagcgatcatttgtgacccattcatcccagctcttattccaaccaagataatggacatgataccgccactcatcctccttgttttcggacttttgaaccttggcctcgtagaggagcgggccgtggtaggcgagcactctctcgccctccttgaacgacggctccttggcagcggcggattccgatccagcttgggacattggtgggggtactttggggggaaaaacaaactgttgcttgtattgaggtttagggttctgaaattcggagaagagctccttcttcttccagatcaggatctcctcccctctcctgctctgctcgccaggaacgacgaggagacgggagatttctttcttttacgcacgagcacgagtcgtccaagaatctttagagagagatacttcaatacacagcactcacttatcaggaaaaatagagaaaattgtgattttgctatcgcgctggaatactattccttcaaagtgattcattaaaatgcaactaagggtgttcactgaaatgctattttgggtctttttggtttctagaaatgatttagctctattttcatttttg

SEQ ID NO: 52527 - DNA, 254 bp, Oryza sativa
  Clone ID: PAT_MRT4530_54815C.1
cgcgtcgcgccaccgcgggctgctgtactgtaactactgcgacaagcatcgcgtttttgattgggggagatagtgtggcagtaccaaataaggatgttggttttagacatgacattgagacatagaaacaacataactgtgaagaagtaggtgtcgtcagatcagcagggcagaaaaccggagcagatcttttcaaagaccaaagtatgatatgcatcatatgtatacttcagaactcttgaccaatgatcaat

SEQ ID NO: 52528 - DNA, 1850 bp, Oryza sativa
  Clone ID: PAT_MRT4530_54816C.1
tcaagccaaagaccacggcttaaaggtgcgtaactgcacagtaaccacgaccttacctttaagatttgaaaatttcgaattcaactttttggatatgaaattcacgtggttcgtgataaccaccgtaccgaatgtgggatgaccgcagggccggacacatcctctaatgcaacgtgtaccatattttaggaaaccttctgctttagaaccaccatcatacgcagaaaggaagaacgaactctgattcttctgcagaaacttgagaatgtccagcaatttctgctgtagtttgttgagtgcatcttcttccatgttgacagacgcaagtcgcgcccgccacttcccaaaaaggcgcagtagatgctcagctccatatatagttgagggcgaaacatcgcctttaacctcttcagagtactgctgtcgctctttcttatacaaaagcattgcaggcaatgctttatcaaagtagcatcgcaatcctttcaaaatctcagcgtaagagtcatttatcttgttatccttctttgtccggtgctccaagtacttctttagaatatcatcgaccgtgggggaccgaggtagcttcacaagcttacccagctgcgtgacaaactcccaatcatcaacaagttgcttttttagcgttgaaggaaaatgtgacatgaagagactctcagatgattttctttctttctcctcagtcccaccaggctgacttttgcgtttcttccccttgataataatcttggtgtcttctttatcagtttttgcatctgcattagagccttttggcttatgctgcgctgaccgtccagattttacgcttttgtcaactacttggctcttttcaagctcttgttgtttgcggatattttcgtcggtcaatttcagtaagcgatcatttgtgacccattcatcccagctgtactcattgaaaataaacatattaagaagactgtttacttgaattaggagagcagaaagacaactaaatagcatcagtgcaatgatagaaacaagcccctcaacaggattcatgaaaatactattaagaaaaaaaattgcaccgtaagggcaaagatgtgagactacccaaacatggtggtagacaacaatatggcaaagataatggacatgataccgccactcatcctccttgttttcggacttttgaaccttggcctcgtagaggagcgggccgtggtaggcgagcactctctcgccctccttgaacgacggctccttggcagcggcggattccgatccagcttgggacattggtgggggtactttgggggaacaaacaaactgttgcttgtattgaggtttagggttctgaaattcggagaagagctccttcttcttccagatctgctcctcccctccctcctgccccagtccactcgcgccgccacctcggtaatgacctcggcaggtgtcgacgaagagcgtggaggcctcaacgatggcggccgcggaggcgttggcgttggcggcagcacaggtgggaaggagcgcgccgagcctagcggtgttgacggggaagccgaggaggagcgagtcgcggagcaggtggcagaagcacccctccccgccgtcgccactgggggagacgccgcggaggaaggccgcgcagcgggcctccgagggcacgggcgcgggccgcgcgggcggcgccaccaccgcgacgtgcgccaggcacggcgccaccgacactatggtcgccgcgcacggcgtcgccggcggcacctccgagatgacggggctgtgccgacaccaccccggtgccgggaagacggggacgtgcgccaccaccactgctgccatgaaccacgcgaacgcgtggg

SEQ ID NO: 52529 - DNA, 210 bp, Oryza sativa
  Clone ID: PAT_MRT4530_54817C.1
atggtcgcctacagctgccggtcgtgctggcctccttgctgtctccaatgtagtcctcttgtcgcgccggctgtgttagcctcccggccgttgcccgtaccctcactggccgctagtggctatcaccacgcgggccttcagatacggtgcggaggtgctagatacggatgcgaggactccagatctagtcatggcgacaccgaccactag

SEQ ID NO: 52530 - DNA, 1312 bp, Oryza sativa
  Clone ID: PAT_MRT4530_54818C.1
atgggggggagctccaacaccaacaccaacaccagaagcggcggtggcaaggacaagcacgacgagacatcgccgtccttcaaggagggcgagagagtgctcgcctaccacggccccctcctctacgaggccaagattttgtcttctggatttctcaaggttcaaaagtccgaaaacaaggaggatgagtggcggtatcacgtgcattatcttgggcttgtttctatcattgcgctgatgctatttagttgtctttctgctctcctaatccaagtaaatggccttcttattatgtttattttcaatgagtacagcgtgaatcctattgaggggcttgtttctatcattgcactgaggctatttagttgtctttctgctctcctaatccaagtaaacagtcttcttattgtgtttattttcaatgagtacagctgggatgaatgggtcacaaatgatcgcttactgaaattgaccgacgaaaatatccgcaaacaacaagagcttgaaaagagccaagcagttgacaaaagtgtaaaatctggacggtcagcgcagcataagccaaaaggttctaatgcagatgcaaaaactgataaagaggacaccaagattattgtcaaggggaagaaacgcaaaagtcagcctggtgggactgaggagaaagaaagaaaatcatctgagagtctcttcatgtcacattttccttcaacactaaaaaaacaacttgttgatgattgggagtttgtcacgcagctgggtaagcttgtgaagctacctcggtcccccacggtcgatgatattctaaagaagtacttggagcaccgaacaaagaaggataacaagataaatgactcttacgctgagattttgaaaggattgcgatgctactttgataaagcattgcctgcaatgcttttgtataagaaagagcgacagcagtactctgaagaggttaaaggcgatgtttcgccctcaactatatatggagctgagcatctactgcgcctttttgtgaaattgccggagctacttgcgtctgtcaacatggaagaagatgcactcaacaaactacagcagaaattgctggacattctcaagtttctgcagaagaatcagagttcgttcttcctttctgcgtatgatggtggttctaaaggtactgatgggataaagaccaaatagaagcaaactgttgcatctgtatgttgactgtacttaactgtctcgctgagtaattttaattttcatgtgattgaacaatgtgtcgatgaacatcgtagcactgtttgctaatgctaatttcatgtagtgc

SEQ ID NO: 52531 - DNA, 992 bp, Oryza sativa
  unsure (1)..(992): unsure at all n locations
  Clone ID: PAT_MRT4530_54819C.1
gcacgaggctgacatctatgtatgccttacagagcaagtaacacaatttatgtcatacttgattagagtagttgatggggccaataattgaactattaattaactaattatatatatgcaattgatccggatgctatgctcttaaatctactccaaactatctattgtagaaagttttctactcataaatcttaatgcctcaatttgattctcttgagctggaacactctactacttgattttctatatatgtacgtatatatttcaatctgaactactggtgccatctggtcttttactaaattatgaatattgaattcagtcagttataactagctctaactatttatagaatcaagattcatcttacaaggtcatttagtatttacaaaaccttaccgcggaactaaatatatttgtagttcttaaactcaattgcccaattaccatacttctaagcaatagaaaatatttcttgctgctagctacatgattttctatattttgatctggaataccagtgcttcctgaacttctactatattcttaaggttaaattcagtcaggttataactagttctaattatttatataatcaaggttcacactatagggtctataatgaatcctaatttcaagaattatgcacatatatnaacccttaactgaaatgcactgatagcccatctgggataattcttgttgctaactatgaaatgagataactgatctgtacttgaattatccttctaaagactccattaaattttagatgatacaatcttatccaatgacccataaaaccaatgtcttgcctactgttctaagaatgcatatgctgtgctttacttcaaatgtcggttttagtcttcatgatataattagagtgagcaagcttaagtttacatggatgtatatgcagtgacacaactcctacacatactagtatatgcatcacacaaaaatcatgtcataatatgattgcagtttca

SEQ ID NO: 52532 - DNA, 840 bp, Oryza sativa
  unsure (1)..(840): unsure at all n locations
  Clone ID: PAT_MRT4530_5481C.1
nnctcgaggccggccaacaacctcagcacgcatcatcacgacaagctgtgactgcaaatatgaatggcttactcgcccctcgtcgccttgccttttctatcaatagaagtgctcgtgtactgcatctgggccagcggtatgggtgtttcaatcagcattggcagtcacgattccaaccaaaacagcaaaacatgaacctgaccagatcctacggcactcttccggatgcctcaaagataaataaagttattgatgctgagctcgcgcgtcgaggtgacttccgccgcgccgatgagctctctgatccggagttcaacgagttatatctccaaaagttttcacatttcgagacagcacgtccgacaaaggcaaaagcaaaggcaaaggcaaaaacaaaagcaaaagcaaaggcaaaggcaaaagcaaaagcaaaggaaacaaagggagcccccattccggcagaaccagagaaggagagcagttggacacgtttctttatacagtacgcatcgagactgttgcgttgaaagaagcccaggacactacaggaagattaggccgttttggaatagggctgaagactaaatctgggtcggataatgttggagtcagcgatcactttgggatcactgtaggcatcaaggtcatcgaacagattcactcctgacgtctcagttcaatcgaatatgatctatatgcttcttgtccgatgccacgactatttatagcactttcaactacctgtttgttgattggactatctgtactacagcggatagatgaaactctcattttccaggtccgtcaaatccaacatggcaacttcaaaccttgacttcg

SEQ ID NO: 52533 - DNA, 443 bp, Oryza sativa
  Clone ID: PAT_MRT4530_54820C.1
gaagggctcgcaagcggagaaaatgcgagggacgggcagccgccttcacgcgacggccgccatcaaccggagggcgccgtcctgggtcgcgcgcccgccagccgcggcttcggctccgcgcccgccgcccccagccgcctccgctcccgccgcccggactgccacgcgtacgccacgtagaccaaaaccatctcagattgggtcgaggggggtaatttgtccggtttatatagttgggggtgaagaatgtccggttttgtggttcagggggtaattcggacaaccgcgatagttcgggggggtaattcgtactttttccttatatttatggcttattattttttaagtagtaggctggcaaatcacatcgggtctcgatccgcggatagggcgggtatgtacttgtgcttgtgcgcgaggcttttcttgcggtcgtaagaaaa

SEQ ID NO: 52534 - DNA, 365 bp, Oryza sativa
  Clone ID: PAT_MRT4530_54821C.1
aggtatgacgtaggatgcaggcggacggaagcttggagagtgggagcggtcgccctatttttttttttatttttattgtttgttttatttataagaggttagagtttagatgttgaactaggggtggtgtgtgtttgccaccgggaactaacaggggaaaattattattttgttggtaaaggggtaaaacattatggtggtcattatgggacggggaaaattggccagacacgcaccagagaggggagaacattgggactttggttttttttaagggaagctaacagtaggggtaagggaacaactccgaaggggccaaagataagacaacagtaattttgaaacaacatgagacccaaaaagaa

SEQ ID NO: 52535 - DNA, 1009 bp, Oryza sativa
  Clone ID: PAT_MRT4530_54822C.1
gcacgaggcctcgtgccgagtccggcacgaggtcgcaatccgaaattcagaaatccaaattcgcccacaagaattcacctctgcctgttgatcggagaggaggaggtgttcgtcgagatgggcaaggtgagggcgttcttctcgcgcaagggcagggggaacagcagcggcaggtccaggtcgatgcgggaggcggcgatgaacgtggactggtcgccgaggccgtcggatctcgccgccgccgccgccgcgaagccccgcccgcccgcggcggaggacgagacggagcgggtgttcaggaagttcgacgcgaacggcgacgggcggatctcgcgggccgagctggcggcgctgttccgcagcgtgggccacgccgtcaccgacgacgaggtggcgcggatgatgcaggaggccgactccgacggcgacggctacatctcgctcggcgagttcgccgccatcagcgccccgccgcccggcgacgccgccgccgccgaggaggacctgcgccacgccttcggcgtgttcgacgccgacggcaacggcgtcatcacccccgccgagctggcccgcgtcctccgcggcatcggcgaggccgccaccgtcgcccagtgccgccgcatgatcgacggcgtcgaccgcaacggcgacggcctcatcaacttcgaggagttcaagctcatgatggccgccggcgccggcttcggcaggatcgcttcttgattccaaattcaatccctcctccgccatggatgatggacacctcaccgctcatgttctttcattctttaattattattaattgtaaatatagataaatcacgcggaatgattaattaccgcgtagtaatttctactaattagttgcagataccacacgaacataatcccgtttggttttgtacagagtgtacacactggaatcgtaataacgatcccccaaaaaaaatatatatcaaatttcagtcttattatggcatcgaattcgactccaaaaaaaaaaaaaaaa

SEQ ID NO: 52536 - DNA, 243 bp, Oryza sativa
  unsure (1)..(243): unsure at all n locations
  Clone ID: PAT_MRT4530_54823C.1
gttgtnttngcgttcgaaagcttnactgccatctcaattcgnttncnactttcgtgaagtnttncntnatcatgtaatgaataatggggttntncctgnttttgacttggttgtctaaattgcaatnagattgtctcatgtggtgccgtcnttgtgttttttaaaaaaaannaaaaaaaaaaaaaaaaaaaaaaaaaaaaaaaaaaaaaaaaaaaanaaaaaaaaaaaaaanaaaaaaaaaaa

SEQ ID NO: 52537 - DNA, 878 bp, Oryza sativa
  Clone ID: PAT_MRT4530_54824C.1
ttattggtggtgactttaatattttttgtagccctgatgagaaaaacaatgctaattatgatgatagattgccctttctttttaatgctgttattgacgggttgagtcttagagagctagttatgttaggtaggaattttacttgggcaaataatctagcaaatccaatctatgagaaacttgatagagttttaatgtcaacggagtgaaaacataaatttcctttatcctcggtttttgctctcaatagagatatttctgatcatactcctttacttttaaatacaaattcttcgtctccgggtaatgctcaacatagttttaagtttgaaccaggttggctattacgggatggttttgttgatatggtaaaagagatttggtctaatgttgatgaaggtaatactcccatggagcgttgagaggctaaaattcatcgtttaagacaacatttgaggggatgggctaaacatacaagcggcatctattaaaaagagaaaaaagagttattagataagttggatttgctagataaaaaaacggaaaccattcttttgactcaggaggaaattgatattagagtgtattatacaaatagattatctacgcttctgagagaagaggaaattaggtggtatcaaagggctaagactaaagatatcttggagggagattctaatactaagtactttcatttggttgcaaatggtaatgaggctttaactcaagaatttaccgagaatgagattaaagaggcaattttccaaatggaacacaacaaggctccgggtcctgatggatttccagctgagttttaccaagtgttttggaatgttattaaagccgaaaagcctatgataaggttaaatggtcttttg

SEQ ID NO: 52538 - DNA, 471 bp, Oryza sativa
  Clone ID: PAT_MRT4530_54825C.1
atggcgagagaagcacctcaggaggcgtcttcttcttcaccaccagtgcagaagtatggagattgttgggacccgaccgtgcatgcccccggttggacccaattcctgcaacatgatgctggaggttcgtcctggcagagtgctagcgacagccggtggtatgagccgcaggagctgcactggggttattcgcgctccttcagttcaagtggtctacctccatcctcttggatgcattgctcaatctcctctcgaggggatctgggaaaattcatccgggggatggatacacttgaactgcaggcagggaacatgcagcacatgctggaagatcatgtggtacagtcacgggaatggcagcagactgttgatgcacagcttgcaaactttaacactatgatccaacaacaacaagttgactggcaagcgtttcaccgctaccagggatttgatccccgccatgagccatag

SEQ ID NO: 52539 - DNA, 589 bp, Oryza sativa
  Clone ID: PAT_MRT4530_54826C.1
gcaccggaataaaagcatgacaaaatcagaggtttaaactataattaaagtggactactaccttaattgtcaaccattttacaaaatacctgcaaatgcattatcatctacagtatgatccctagtacacatcaaagattaaaattcagcgagagttggctgcagaaatgcagatgcagacagaggcgagaaagcagagtctactctaaaattcagcagcagctcttgctccgggcgcaagccctcgccgccggcggctggccgcgggggctgcacggcccggcgccggcgtcggtgagcatcttcaccacgtccctcatcgtcggccgccccgccggcagcttggcggtgcagagcacggcgaccttgagcaccttgatcatgtcctccctgtccctggcagccgccgccgccgacgacgacgacggcacggcgccgccacgcgcgggtccagcacgtcgtcgatgctctccgcggcgagcttggttgacagccagaacacgatgtccttcccctcgccgaacgccgggtcgatcgggctccggccggtgacgagctccagcagcacgacgccgaagctgtacacgtc

SEQ ID NO: 52540 - DNA, 3159 bp, Oryza sativa
  Clone ID: PAT_MRT4530_54827C.1
atggagtgcaaccgcgaagaggcctttagggccagggaaattgctttaagaaagatggaaaacaaagacttcaatggtgcccaaaagattgttcttaaagctcaaaagcttttcccagagcttgagaacatatcccagctgttaaatatctgtcatgtacattgtgcagcagaagcaacggtaaatggacagacggactggtatggaatccttcaagtggaggcgacagcagatgaggctaccataagaaagcaataccgcaagcttgccttttcacttcatcctgacaaaaatagtttcgctggcgctgaagctgctttcaagttggttgctgaagctcattcactattgtgtgatccaacaaaacgtcctatttatgacatcaaaaggaataatattcccagaaaggctccaaagcaagctacacggcccacaaagaaaactcaggcaaacaaatacagtgtacctgtatacttacatgcattttggacaatgtgcccacattgtcagatgcgatatcagtactacaacaatgccataaatactactgtctgttgtatgaactgcagaaggaatttttttgcatacaacctgcaagaacagcctgtgcctacaccaaatgtaccttatagttctcaatttccagcaaacatgtttccaaatcaacggcgtgatcccatcagtcgacagggccaccctgtgaagctttcttgcacaggtggaaacacagatgtgaggccggggacatatagctggccaggcagtgatgagagaactattcagtcagagatgacaagggggaaagatcaatttccagcaaggaatcaagataaatattctgtaccaacagcaaatgggaattcaggtggatgttcaataccagttcctgattgtccagacactattgacaggcaaaagttgggtagagaagatgcatctgttgcacctgctatgaatgtgcctggtcattcgaagcttcattcgacaggtggaggcacaaatgccaaaccacgggtaaatgtggcacaatggaaggaaaccacaaaagaggatagcagtgcaagtgttgaaaagaaagcaaaccagtcaatgatgaatcaaagaaaatcttctgcccaaactgcaaatgagaatgccagtggaagattcaagccagaccatgctgatccaaatgtttttgacagaaagaactttggtacagaagattcatttccagtgcccaattctgcagtaccctccagtctccggagatcagctaggagaaagcaagatgctggtgacaacggcagcatgaactccaaggtcagaaagaagcaaaagaagaataatgtgctatctgatgttgacttgaattgccagcaaatattcaacaataatggcactagtggtgacaaacaatctgctccacctcatgtgtcgagcacagtagacattcaagataaaacaaaagttacagatgcagatagtaagaccaaggcagaatctactgatactgctggttggaatgtgccttcctgctttgaaaaactatcattccctgatccagatttctatgattttgagaagctcagggatatcaatatgttcgcagttggtcagatatgggccctttatgatgaccttgatggcatgccaagattttatgctcgaattaaacattttgatgcatccaacttcaaagctcatctcacttggttggagtacaatgcagcaagtgaagaagagaagaaatggactgatgaagaactacctgttgcttgtggtaagttttgcttagggtcaacagaggtatcacatgacagactcatgttctctcacattgtttcatggacaaaaggcaaaaagaggaatgcctatgaagtatatcctaataagggtgaggtatgggcgctttataaggattggagcatgcagtggaattcagatgcagacagccatcggtcttatgagtatgaagttgttgaaatcttgtcagatttctcagttaatgatggtatcactgttgtcccattagtcaggattaaaggctttgtgagtttatttgcggcggctaaagacaaatccacaaatgtgatagtgtcgagtgagttgcttcgattttctcacagtatcccctcttataggacaaatggaaatgagaaagtaggttccccagcagggtttatagaacttgacactgcttgtctccccaatgacatggatataatatttccttctgtccccctggaatcttacatctcccttggcaagaaagaggacagtacgatcattgatttgaccaatgatagtacaagtagtagaatggatcctggaaatgagaaaaaggagaatctgcctgaagcacatatttgccgcccagtgtctacagaaaatcatgaaagtctttcttatgagaaaaacacatccttgcccaaaaatggccatgatgccaacggttttggcaattcttctgagccaagctgtccctccccaagtatttattcatatcctgattcagaattccataacttcgaggaaggccgcacatgtgagaagtttgaacctggacaaatttgggctttatacagtgatgctgataaatttcccaagttctatggttggataagcaaagtcgagctacaaccattcagagtacatttgatctggcttgaagcttgtcctgaacaggagcaggagaaacagtggttggatcaggacataccagtctgctgtggcaaatttaaaattcggacctggaaagcccaatatgagacaactgatactttctctcatttagtgcacacgggacagagggactcaacatggcagattgacattcttccacaagtaggcgaaatttggtgtatctacatgaactggacatctgactggactccttccagcatagatatgtgcgagttcgccatcggcgagatcattgagtgcacggaagcacttataaaagtttctctgctgacccaagttaatggctacagagcggtgtttaagcctgacaggcaaagtggagttctggagatacctaaaagagatcgtttgaagttttctcatcaaataccatccttccgtctgacagaagaaagaggtggcaagctccgtggcttctatgagcttgatccagcctctgttcctgacgttttcctctacagggacaccccatga

SEQ ID NO: 52541 - DNA, 612 bp, Oryza sativa
  Clone ID: PAT_MRT4530_54828C.1
gggaaggacgacgagctggctgatctggtgcggcgcctagtggacgccctcgcccgctactccgatcgcctcccgttcgacctcgatcgccaggtatcaaatcacgtgaaagcacttaaaaagctcctcaagagcaacctcggaggccacgtagacgcgttgctccatcacctagcaacaccagcagtagatcacggccagctgactcttgagcagcttgttaggcataaactgagcgaaggacgaagggttacatgccggttacttggtgtgattttggaggaaacaactccagaggagctccagaaccatgtcacagtgagaccttctgtcctggaggttcttctagaaattgcaaaattctgtgatgtctatctgatggagcgcattcttgacgatgaaagcggagaaaaggtgttatctgccctgagtgaagctggactttttacgaacagtggattgataaaggacaaggttctcttctgtagtacagaaaatggccgcacctcttttgtgcggcaactggaacctgattggcacattgatactagtccagaaattgttcatcagctagctgtgagctccagcaaacaatggcatagcgagaactga

SEQ ID NO: 52542 - DNA, 513 bp, Oryza sativa
  Clone ID: PAT_MRT4530_54829C.1
atgtcgtcgggggcagcggcgtcggcggcgggggtggaggcgggggcggcggggggcgggaaggacgacgagctggctgatctggtgcggcgcctagtggacgccctcgcccgctactccgatcgcctcccgttcgacctcgatcgccaggttacatgccggttacttggtgtgattttggaggaaacaactccagaggagctccagaaccatgtcacagtgagaccttctgtcctggaggttcttctagaaattgcaaaattctgtgatgtctatctgatggagcgcattcttgacgatgaaagcggagaaaaggtgttatctgccctgagtgaagctggactttttacgaacagtggattgataaaggacaaggttctcttctgtagtacagaaaatggccgcacctcttttgtgcggcaactggaacctgattggcacattgatactagtccagaaattgttcatcagctagctgtgagctccagcaaacaatggcatagcgagaactga

SEQ ID NO: 52543 - DNA, 304 bp, Oryza sativa
  unsure (1)..(304): unsure at all n locations
  Clone ID: PAT_MRT4530_5482C.1
cctggaataaaagatgagctanctaggtccancgatcaccatncatgcatgtgtgtanggttattgatcggcccggtnagcccagctancttcctgttatgtgtgtccgtcccgtttaatttgcccctttttgnggtgtncgtaccantgagagctanngattgagtttatacccatctncatgcntgtgcgtgctactagcnccttgtactncgtgcttgtttggattattanncatacatgtagctctttttggtnaaaaaaaaaaaaaaaaaaaaaaaaaaaaaaaaaaaaaaaaaaaaaa

SEQ ID NO: 52544 - DNA, 933 bp, Oryza sativa
  Clone ID: PAT_MRT4530_54830C.1
accaaggagtacagccaccaaaggaaattcatccagatgtttttccttgctccccaggaaaagggttactttgttctcaatgattatttccatttcgttgacgaagagcaagtgcaacctgcacctgttattgcccaggacaacttcgagaccaacatggcatccaactccgtcgtcgaacctgttccagagtacattcacgaagaggaaaatcaaagtgctgtcccaataacatctgaagaaagtgatgctgttgagaactatacttactctgagccaccacagcaagtagtttctcagtcagacaattggggagatgagcctcttcctgaagaaccaatttcttcctttacaaatggaatggcgatggcaccggaggagccagtgcaatctccacctgttccacctcctcatgtagaggaacctgttggtgaaccagtaaagaagacctatgcctccattagcaaatctgtctatgttgggaacgtgccatcttctgtatctgaggctgatcttgagaatgagttcaagaagtttgggcggctcattcctgatggtgttgctatcagaagccgcaaggagaccggaggctactatgcgttcgtggaattcgaagaacttagtggtgttcacaatgcattgaaggcttcaccaattgaaataaatgggcggcagatatatgttgaggagcggaagcctaacagcggcataagaggtggaaactacacacagcttcatggtgtagttgatggtggcatatacttgcgaaggggaggcagaggtcgtttcggtggaggagggcgagggtatgctagagggggaggcgacaacgaatatgcgggcaaccgtggtagtggcaggccatcaaatggctaccagcgtgttcctcaccatgagaggggcattttggggagccacaacgcaagaaactaa

SEQ ID NO: 52545 - DNA, 1632 bp, Oryza sativa
  Clone ID: PAT_MRT4530_54831C.1
ctactctttctgctcgttgtggagaaatatgtagttgatatttgataaacctaatttctggactagtatcaatgtgccaatcaggttccagttgccgcacaaaagaggtgcggccattttcttgtcctttatcaatccactgttcgtaaaaagtccagcttcactcagggcagataacaccttttctccgctttcatcgtcaagaatgcgctccatcagatagacatcacagaattttgcaatttctagaagaacctccaggacagaaggtctcactgtgacatggttctggagctcctctggagttgtttcctccaaaatcacaccaagtaaccggcatgtaacccttcgtccttcgctcagtttatgcctaacaagctgctcaagagtcagctggcgatcgaggtcgaacgggaggcgatcggagtagcgggcgagggcgtccactaggcgccgcaccagatcagccagctcgtcgtccttcccaccccccgccgcccccgcctccacccccgccgccgacgccgctgcccccgacgacatcggacgcgcgcccccgcgcgacgacgacgacgacctgtgccgccgcacgccgttcgccgcctccgccgccgccgccgtacccaggctcctccagtcgtcgtgctgcgcggcgccgttcaccgccgcgcgttccagcagcttggacggcgagacggccgccattctccccgccttggcggcggcggcggccgacgcgccggcgagcatgtcgccgccgccgccgtccctccgcgcctccttctcgaggtgctcgcggtagagctcgtagacgcggtggctgagcatgacctcgaagtccagcacggcgaggagctccagctccagcctgttcatctccgcgttgctcacgccgccgacgcgcgcgaagaacgcgttgttgtggtggcccgccgccgctcgtctcctccgccacaccctgccgccgttgccgccgcgctcccctcctccgccgcaccccgccgccgctgcactcgcctcctcctcctctgccgccgccgcctcgcctcgcctcctccgccgcacccggccaccgctcgccgcctcatcccccgccgctcgcctccaccgccgccgccgctccctgtcgcccgccgcgcggtacgggtaaccgtacccccgcggtacgggcggtaaccgcggtaaccgcgcggttaccggcggtttttcacaccctggaaagtcgtcgagaaccttggaggcgacgaggaggcaggcgaggaggaggcggtggacgttgcgggaggcgacggcggcggcggggcggcggtgcgccgccatgtcgacgtacgcgtacgccaccacgtagcactccggctccagcccggcgtaccggtgcacgcgctccagatactgcgccacgccgatgcgcggcgccggcgcgcccctcgccgcctcgaacgccgccatccctgctcctagccccgccgccgcctcccctccgccgctcagcgcctccaccgcgtcgttccgcgccaccagccgctgcacggcgcgcgccaccatgtccagctccggcggcggcggagccgacgccgtcgccttctgccgcgacatctcgccgcccgctgccgcggcggcgtccatggccat

SEQ ID NO: 52546 - DNA, 2255 bp, Oryza sativa
  Clone ID: PAT_MRT4530_54832C.1
ttttccccgcgcttttttttttttttttttttttaggctcccaagatgataaatatggcatattctagcaacacataattttatacatgaagcagagtcgacaagataattctaccccagaatacaacacgatcacgtgccaattctctaatacaacatagttcaactaactcgattattctgacaagcagacatctacgattaggtaagatcagttgacaagttcagtggttcacattttttacagtctctgcatcagatgctcctaaataacagcaagactaatgccaactcattctgtaagctctattgccatgcggaggagacgattagagttttctctccccagccgaagtgaagtcccccatggtcctcctcgaacttgtatctgtcacagtacgacttcagtaacgatcttatcccgctgatgacattgctactaaatgggcatggtgtgaagccagccattgtcattcttgccctccattttccagcaacttcatatctctccacacgatcaggaccttcgcaagccaagatgttgacaatttcacgagcaagacattgccgctccacattcattctatccggactttcccttggaagtgtcgcgtccagtgaatcaaaaagtgcagcataataatcataaacctcacggaaccttgtctgaaatggagcagtattggtattggcatcctgctcaaccagtgtgacgagctttggttgcagacccttcaccattcgaaggagttggtccctttcattcataattgaaacgctctcgtcaggaaggtggtgcagctggaatgcaaaattgacaactagtgcttccccaggacaacaatctagcattgcaggtgtaacatccccaatgttagcaccaactgccctgaactcaaaagatatcccacagtcctctgcaagtttctctagacgttgaccaatgaccttcaaaccgccaacggtcctctgtaccgtttcaggatcatccacaccagttattctcaaatgacgtggcttatttgcattatttttcagaaactgtatcagtgtaatgtactggctgccctgattaatgtcaaagtctataatgtgcactctatcttcacctttgcaggcttcaagtatagcataattagcagccatgaaaccaaatcggaagcacgggcagatttcaaagaggatttgcattgccgaaagctgataaagagtcgggggctctttgcacgacaaggccttgtatatgcctttccctgaagctactattcttgctgcaagaccttccactagataggctgcaatcctctgagaagggtccccttggattgagaccatctgccggaggtccgttatgattgcctgtgcttcatctacattataatcagataatgccattgcacagtcaaagagcaactgctttggggtccgtggttctccattgttgctaccagcacaactgatgcttgattccgattcttttggtgagttagggagtatgacattcttcattggatcagcccattcatcgttaatgctacctgcctgggaaatctcatacaagatgtcatcactatcatcaagtaaagcatgctccagctcctgaagcttcatcctgatatcatcttcatcaaactctacttcaagttcagaactctgattgtctgatatagactgagaattctgctgagatacattggacaccaatggtgagtcttttgccacatctgagcaggaattgtctgcagaagatggagaatggccatcagctgttaccatgtacggcattggtgaggcctgttgattgtaaaaggagttctcaggattgtatggttcaggcccataacggaacagctgtgtgtcggacgcatatcttcgtgcagcgaaatttgaatttggagtgccaaatttatgtatgtaaagattatctgcgtaagtggttgacgggtctgctcgcctgataaaagacattacttttctgtagtgcttctaaacctactaggctaaatactcaaactcaaggcacagcttcctctgattatggatattgaacaaatacaggaggagggggtagcttgcttccggtagcacacacaggagagcggcaggagaggaggaggaggaggagcggagaaggcgaggaggggaagcggagaacggaaatgggaaggagagggagcaggagggaaggaaggaaaaggggaagaagagaagagaggagaagagatgggcctcgtccgaatcctgcagcccgggga

SEQ ID NO: 52547 - DNA, 627 bp, Oryza sativa
  Clone ID: PAT_MRT4530_54833C.1
gcacatcaaggacgggcatttgcatcataataaaacgtctagccaaagttggataccacacattcttcgtcaacaaactgctgctgcgacaaaacccaaaaccaaaaaaaaaagcaacctaacggaacggaggaaacaacccagtagttcttagttatgcagctctccctcccttttgacggatcaaaacctcatgcttgcagcatatgcatatcccaccaggccaccaccatggggtggtgaaccatttagtttcttgcgttgtggctccccaaaatgcccctctcatggtgaggaacacgctggtagccatttgatggcctgccactaccacggttgcccgcatattcgttgtcgcctccccctctagcataccctcgccctcctccaccgaaacgacctctgcctccccttcttccacctcttatgccgctgttaggcttccgctcctcaacatatatctgccgcccatttatttcaattggtgaagccttcaatgcattgtgaacaccactaagttcttcgaattccacgaacgcatagtagcctacggtctccttgcggcttttgatagcaacaccatcaggaatgaaccgcccaaacttcttgaactcattctcaagatca

SEQ ID NO: 52548 - DNA, 934 bp, Oryza sativa
  Clone ID: PAT_MRT4530_54834C.1
ctgggatgaatggccgaacaaataactggatgacaattttaagtatttcggttatacaggaacacaattgatacatggattatgctacagatgctatctctttccatagcttatggggagttgcagaaccagtttaacatgacacgacttttacacatggtacaagaaaaacgagttccatcattcaaggaaaaaaaatgaacaatgatgttcgtctcagttctcgctatgccattgtttgctggagctcacctcatattatcatctctgatcaaggcctccaaagaattgttccaagcttgtagagctgaaaacattggatgctactctttctgctcgttgtggagaaatatgtagttgatatttgataaacctagctagctgatgaacaatttctggactagtatcaatgtgccaatcaggttccagttgccgcacaaaagaggtgcggccattttctgtactacagaagagaaccttgtcctttatcaatccactgttcgtaaaaagtccagcttcactcagggcagataacaccttttctccgctttcatcgtcaagaatgcgctccatcagatagacatcacagaattttgcaatttctagaagaacctccaggacagaaggtctcactgtgacatggttctggagctcctctggagttgtttcctccaaaatcacaccaagtaaccggcatgtaacccttcgtccttcgctcactttatgcctaacaagctgctcaagagtcaggtttactggctggaaaagctggttgattgcttcctgtgctcttgaatctgctgaagatgaacaagcatccgttgaggtcaaagcacctggccgtgatctactgctggtgttgataggcctggagcaacgcgtctacgtgcctccgaggttgctcttgaggagctctcaacagtttccctcgtgc

SEQ ID NO: 52549 - DNA, 1695 bp, Oryza sativa
  Clone ID: PAT_MRT4530_54835C.1
gcaaacaatcacgcaagagaagctgagctgctgctcctgctcttaatgcaggcatggcacatcaaggacgggcatttgcatcataataaaacgtctagccaaagttggataccacacattcttcgtcaacaaactgctgctgcgacaaaacccaaaaccaaaaaaaaaaagcaacctaacggaacggaggaaacaacccagtagttcttagttatgcagctctccctcccttttgacggatcaaaacctcatgcttgcagcatatgcatatcccaccaggccaccaccatggggtggtgaaccatttagtttcttgcgttgtggctccccaaaatgcccctctcatggtgaggaacacgctggtagccatttgatggcctgccactaccacggttgcccgcatattcgttgtcgcctccccctctagcataccctcgccctcctccaccgaaacgacctctgcctccccttcgcaagtatatgccaccatcaactacaccatggctgtgtgtagtttccacctcttatgccgctgttaggcttccgctcctcaacatatatctgccgcccatttatttcaattggtgaagccttcaatgcattgtgaacaccactaagttcttcgaattccacgaacgcatagtagcctccggtctccttgcggcttctgatagcaacaccatcaggaatgagccgcccaaacttcttgaactcattctcaagatcagcctcagatacagaagatggcacgttcccaacatagacagatttgctctcttcatcatcctggacagcaaattcaccataaacatcggtttttggcttctcggttgccacagacgaagtcataaccgaatgctgtgcagcctggtttgtctcggttgcctggtgaggtctagtcggggctggctgggctacagggaacaccagtggagcttttgcggttcttagaatggaggcataggtcttctttactggttcaccaacaggttcctctacatgaggaggtggaacaggtggagattgcactggctcctccggtgccatcgccattccatttgtaaaggaagaaattggttcttcaggaagaggctcatctccccaattgtctgactgagaaactacttgctgtggtggctcagagtaagtatagttctcaacagcatcactttcttcagatgttattgggacagcactttgattttcctcttcgtgaatgtactctggaacaggttcgacgacggagttggatgccatgttggtctcgaagttgtcctgggcaataacaggtgcaggttgcacttgctcttcgtcaacgaaatggaaataatcattgagaacaaagtaacccttttcctggggagcaaggaaaaacatctggatgaatttcctttggtggctgtactccttggtctgtacaagaccagataccataactagcacaccatcaccccatgagttgagaaagttggctgttttgatctcgatttgggtgaaattcaaggacataatgagggagtgtatatccatcatggtgctggcggtggtgttggttccagcgaggtcgtcgacgcggaccatggtgctggcgtcgttgtagaactggtggacgacatcggggctctgctgcaggaggttgtagtagttgcgaaggaagtacgtacgcctagcccgaaactgcgaaccgggaccggc

SEQ ID NO: 52550 - DNA, 385 bp, Oryza sativa
  Clone ID: PAT_MRT4530_54836C.1
ttgttctttggaaggcactccatgtgccatgtgagggtgttggtgtctctagggtacctgcctcggcaggcaatcacacacacatatttatcacgagaaagagtacagctgcagagaataggaaggatccagacactcaaagagagaggagaggtaggagagatgggaggctatcataggaagctgatgaagagctggaagggtgcagctcataagtatctaggcatggacttcgcgctcggcttattgctcgttttccagacatactttaccgtctccaagcagtgagtgatcgctgcacccaacgcaattcggataacattgccgggacacgcctacctgacgatccacacgtctgtggaagagaagaggccacagctgcccc

SEQ ID NO: 52551 - DNA, 762 bp, Oryza sativa
  Clone ID: PAT_MRT4530_54837C.1
atgtcttctgggaaggggaagcggaagatggaagaaaagggagtgcctctgcagggagatctagaccctgataatgatcccatgaaatatgctttgtctgctcccagggtacagattattcccgggctgtggcgccgaattgtcagacgacggagaagcaagaatgatgccaagccctgggcatgtccctgtggatatgtaaataaacctatccagcatctgttttttgatctccctcgatttaagtgtggaagtagagaatgcaaggaaatgatcccggatgactatgaatttaagttctcacttgttgagaagcgaacgctaaagaagcaattgccaaggagtttggatatgaatacacatgatgatcttggcataaaagatttgtggaaaattatttcgatcttagagaaagatggagttgagacagtggatggttcacacaaagccaggatatcagggattactcatgttccactggatttcccagtgatatgcaaagagattgcggaaggacacccactattggccatcataagaacaggaaaaggatttgatgacttgcaatataatcagatttataaaccaccaaaagtatcgagaattgtggatggtaaatctgcggggcttcattgtattacacttgttggaggtgccatgcgcaaaggtagaaaaatgcattataagtttgtcaatacatatggggaggatttctgcaaactcagaagcttaaacagagatgatggaataaagggtggatag

SEQ ID NO: 52552 - DNA, 1855 bp, Oryza sativa
  Clone ID: PAT_MRT4530_54838C.1
gtttatctctcctccgccgccggcaatggcgtctccgcggcggcgctccctgccgctgccgctcctcctcctcgtcttcccggtctccctcttcgtcgtccttctcctccaccaccgctcctcgatccccgcggcggagctcctctccggccccgggccggacccgcgccgcttctccctcctcatcaaggtcctcgcctacgaccgcccggggccgctccgccgctgcctccgctcgctcgcagcggcggactacgccggggaccgcgtggcgctccacgtcctcgtcgaccacccgcgccccaacgcatccctcgatgcgtcgcgcgagatcctcgccgaggccgacgccctccggtggccgcacggggagaagcgcgtgcactaccgcgccgccaacgcggggctccaggcgcagtggatcgaggcgtggtggcccggctccgacgacgagttcgccttcgtcgtcgaggacgacctcgaggtgtcgccgctctactatcggttcctcaagcggctggtcatggcgtactactacgaccgcgagaactacagcccctacgtgttcggcgcgtcgctgcagcgcccccggtttgtcgcaggtaaacatggaaacaagatacagctggatagtgaaactcaccttttcttgtaccagatggttggtacctggggccaacttctcttcccaaaaccatggaaagaatttcgattatggtatgatgaacacaaatctaaaggaatcaaacctattcttgaaggcatgaaaactacagggtggtataaaaagatgggggagagaatatggaccccttggttcattaagtttgtccactcctgtggatacttcaacttctacacgaacttcctgaaggaaagggccctcagcgtctctcatagggatgcaggtgtgaactatggaaggagtgttggaccagattctacgttgttagatgggaagaatctggatttcaatctatgggaattgcagcctctaaacaagctaaaatggtacgatttctgctttgctgaagttcttcccggaagagtcattaggaaattcagtgaacttggttctgtgctcaagtcggtgcaattagaaaacaatgttgtgctgataagtctatactcactagaacagagaattgcaagaaacttgatttgctatcttgagaagtcagggatgcggaactacattttccttgttgacaatacagaatttctggatgaccttgctcatagaggacatcctgtcattgatgctatcagtttgctccagagcatcaaaatgagtagttctatatactcagatgactttgttaaggaaatagtggtcaaagcttatgtgataaaaaattgcttggacctgggctacaatctttgggtattaaatgggaatacaatttctcttggcagtaagttaaatgagccatcagatcaatcagttgatttctttgctgcagaatctgtagatttgatgtttctgaggggctcacagagctctaaaaaaacttggaatgaacttgatatattgagaatggctgatgggatgatgtcttcaaaaagcggcttttcttcttctcttgagcataagaattttgtccgcgtgctcactggagtgttgggaaacaatggtgctgtgaggctgggaaaactggatgaagaaattatggctgttgaattagggcctaacacctcaaacagatcattgtcagaaggtcactgtaaagtcttattctggtctcatagtatgacttcagattcagttcaaagtcaacttgaaaatagaggtttatggttaattgactcagattcatcttgtagtgctgttgtttgtggccaaaaacagaagtaa

SEQ ID NO: 52553 - DNA, 427 bp, Oryza sativa
  Clone ID: PAT_MRT4530_54839C.1
tttgtgggtttttttttttttctttttttttctttttttttttttttttttttttttttttttttttttttttttatttttgggggccaaagcaaacaaaggtttgggaaaaaccaaaaggggcccaaactttccaggggggtttccccaaaagggtatttttgggggtttacacaacaaaaccattggtttcacaaaaaaaaacttttggccttaccaggggcctacccgggcggggccacctttaaccggccaaaggggaatattccctcccaaataccaccaaaattctccctttgggaaccccccttttgttttaaaccgggaaaaaaaaaaccccaaaaaattgttttttgggacactttctgggggaaaaggtttttcccgaatcaaagaaacctttccttaaaagaatattccccccccc

SEQ ID NO: 52554 - DNA, 863 bp, Oryza sativa
  Clone ID: PAT_MRT4530_5483C.1
aatagtatatatatttttttttttttttttttttttttcttggtaatcactactaacacttgatagtatcatgcagtttcaaatgaattacagtatgccaggatggagacagtatcagggtctcctggatggattagtaatggcatggtgtttttagtacaccatgacaaaaaataatatgatgacctaccttgtaccgtttacacaacatataaattctctctatcactagcagatttgttgcaactattgaatagcaggtctctcaacaaagtacaacatgaatacaaagcaatacatccaccacaaaatatacagattcaatgtatgaagaataagctgtgggtgacctgaagggcgcattgtaagcctcagtaacttggtcttcgagagtatgcacgacagcgctagaaaaatttcaattttccatgtcgaagagcagattttgcccgacatacagccttttcagtgcccgctaatccagagcaagcatcaggtgcccccaaggtaactgcaaagtacagatagatggtgcacagaaagaccagaaccactagtgttgtcaagaggaagcgatgccgctcaaccagtgcagaccaactgccaacatcatccttcgatgattgaagcttctttggggatgatagaaaaaatgtgttctgtgacctcctgtgaggagatgataatgaatcaagaaccatggtggcgacaagctgacttgttcaaatcctcagctggtcccgatccgaggagcccttgttcctcctccttgcgcgcgctccctctctaggaggatggatgtgcggagagagggagagggagacgcggtttgtgcctttgtgggagcctcgtgcgcctcgtgc

SEQ ID NO: 52555 - DNA, 220 bp, Oryza sativa
  Clone ID: PAT_MRT4530_54840C.1
attcatttcctctccaacgaggcgacgctcaagacatgggttggggtctcttttttaaaggagttggcaggtggatccccggaccttatctggggcagagatgtgggctcgcgagagcttcaagccaattggcgccgccatgtgctgaaccagttttccctgtgctgagcctgtcccaggatggggttgtgtttaccatcctgaatgtaattctgcaggc

SEQ ID NO: 52556 - DNA, 174 bp, Oryza sativa
  Clone ID: PAT_MRT4530_54841C.1
atggaccgcgtcaaccaagggcaggtcccacacgtcagtagcaccaaggggagctgccgggcccaggaggccacaagcgacgagcggcggtggtgcggaagagggcatctgggacagaaggaggatgggaccctcaccgtgcctgcaaggcagcgagagagcggctggtggtga

SEQ ID NO: 52557 - DNA, 1203 bp, Oryza sativa
  Clone ID: PAT_MRT4530_54842C.1
atggctcggtgcagcgtctcccgtgttgtcttgttgctcttgtgttgcatgcatctgtcggctgcagctgcaggagcagcagtgtacaacgtcgagagttacgacgcgagacctgacggccggacggacgcgtccagggcattggcgtccgcctggtccgccgcatgccggtcgccggagccggccaccgtgtacgtgccagacggcgagttctttgtcagccactcggccttcgctggcccgtgttccggcggcaggatgacggtccagatcgacggcacgctggtcgcaccgtccggttacaccggcagtgccagctctggcggggagtggattgtgttcgaccacgtcgacggcctcaccgtgtccggcggcaccctcgacggccgcggtgagtcgctgtgggcgtgcaaggcggccggccacggcggctgcccggacggcgcaacatcgatgaaggtgctgaactcgagggacgtggtgataagcggggtcaagtcggtgaacagcgagctgtaccacgtcgtgatcgacgggtgcgagggcgtggcggtgcaggacgcccggatcgtggcgcccgggagcagccccaacacggacggcatccacgtgcagtcgtcgtccgcggtcaccatcaccggcgccagcatccagaccggcgacgactgcatctccgtcggccccggcacctccaacctccgcgtcgagcacgtcagctgcggccccggccacggcataagcatcgggagcctggggaaggagagcgaggagggcggggtggagaacgtgacggtgagcggcgcggcgttcgtgggcacggagaacgggctgcggatcaagacgtgggggcgggcggcgcgctcgggggcgtacgtgcgcggcgtcgtcttcgagcacgcgctcatgcgcgacgtgagcaaccccatcatcatcgaccagagctactgccccaacgacggcggccaaggctgcccccatcagagctccgacgtgcagatcagcggggtgacgtacaccgacatccagggttcgtcggcgtcgcaggtggcggtcaagttcgactgcagcgcgagcaaaccctgcagcgggctcggcctgcaggacatcaagctcacgttcgacggcggcaagccggcggaggcgacctgccaacacgccgacggcacggcctccggtgtcctcatgcctcccagttgcctgtaa

SEQ ID NO: 52558 - DNA, 552 bp, Oryza sativa
  Clone ID: PAT_MRT4530_54843C.1
atggcggcgcacacgcacagtgggtacccattgggcatgcctgtgaccgacgggcatggggttttgcccgattggcttctcgggcgtgggtcgggcacggtcacggataccacctcccccaggagcatggcaggaacagtggcagtgccaccacaacgaagggaagcaaatcaagcacaatactccggaagaggccggcgcagcgacacggcgattggcgagagattgcgagatccccgcgcccattttggcgagaggggcttcgcgagccaacggagcgcggacagcgcggacgcctggggcgcccgcacggtccccatgcgatttttgggcagatctcccatgagaaagacctcggtggcggtggatctggtgaccggacgaggcaactcacggggcttcggctccgccaacgcgtggccttggaccgtggcttcgcccttcccgagcccaggcgtggcgctttgggcggttcttctgcaagcgcggaatcggcctgcggagccacggtcgccactaccacgggtgcacgtatccgacgtggaggagtag

SEQ ID NO: 52559 - DNA, 843 bp, Oryza sativa
  Clone ID: PAT_MRT4530_54844C.1
gtaagtatacgtcgcatgcacgcgtacgtaagcttggatcctctagagcggcgcgtcgtcgtagtcgtcgccggagaccctcagctggtagtgcggtggtggcagtgggtccggcagggtggacgccgtcgctgcgagcatcgccgcacgtccgtcatcgtcggccggtcgtcgcgttgtcctgacgcacagaagccacttcagcaccggattatggcgcgctcgctgcgtggactcgcccagcgtcgggtcgatcagctcgcaccctctctcttctctccacagtggcaagcgtatccgaggaggtttgacgaattcgccgtagttgctggtgggcgtgttcctcttgccgtgacgatctccagcagagacgccgaagctgaacacgtcggactttgaccgagaaaatggcctccgatgcgtactcaggagccatgtatcacttgacacgtgaacaccaaaaaaaatcaataccactagctagtaagtacagtactgcagttacctgatcttatcctccaaaaataaagtgtacaaacacctgaaggaaaacatcacggtattaatcatttggccagcgagttgaatgctaaaacttaatacagattaccaagtactctcttcggttttaaattttaacgtgttactttaagtttaatttaaaggtctttaagttggtaaatagttaataagaacgttgtattttttttttttaaaattactttccttgggataaataattattgtcggataaatgggaagaatgtggagaagatggtgggataaataaggagaaagtggtagagaatagaaaattcgagggaagtggagaggtgttgtggt

SEQ ID NO: 52560 - DNA, 690 bp, Oryza sativa
  Clone ID: PAT_MRT4530_54845C.1
atgacgatgggtggtctattcaacccgttcgacgactacgaggccgcggcggcggccgccgccgcggaaggcgacaaggttgtgcacggcggcgccggccatggcggcttcttctcccccttgggcgccggcgccggcgacgacaagtatactaaattaatcgagatttgggaaaagaatgacttacattgtgaaacggaggaaatagatagaattgaaattttgcaagattggaaccatgcccaccccgtcacattttttattccttccatattcttccttcttctccccatcgaggggccggtgaagcgggcaaggctggcaacaccaaagcctagggagtgggagaggtcgacgacaaagagggacagcgtgatgagggcgctgtttgggacggcggagcagcaaccgatgaggttggcattcgtggcaaccgacgcccttgaaggacacgaaggtggagcagcaagcgacgctggtggcgaccaccatcacctctccatccgcttccccctccaccttgagcgttgtggcgtggatgcggagcaacaagcgatgagggcggtggaggaggtgaagatggcggcggcgccttggatccaatctccccagagctcgcgcgaggaggaggtgaagatggtggtagcgctttggatccagcctcctcggagcttgcacaaggaggagtag

SEQ ID NO: 52561 - DNA, 477 bp, Oryza sativa
  Clone ID: PAT_MRT4530_54846C.1
atggtgttgcggatactcaactccatcacgaggaccaaggcggaggagttgttcgcgcgggagaggatgggcgatggaacggcagcggcgacgggtgcgcaagagccggagcggcggcagtggcggtggcagtcgggaggacaggagcctagatggctgggtgcaaacgtgctcctaggcgacgcagcggcgatgagtagccgacatcctgtccatagcaccgagctcctgcgtgtcgactaccgacttggtcttggccagcgacgccctcgacgccagcaccatgggcgaccttggcaagctatccacccgcctcaacccccttttgctgccgcggcccatcaacgacttccggcgaggaagccgcatatccgaccactccgccaccagcgacggggtggaaagagccggggtgtgaggagagccccatcaccgcccatcatcatcatcccggcgctgctcgtcatgaccggatga

SEQ ID NO: 52562 - DNA, 351 bp, Oryza sativa
  Clone ID: PAT_MRT4530_54847C.1
atggcggcagcggggccacaaccccggcgacagcccatctccggcgcgaggaggcggtacggcgtgttgggagggccggcggcggcgcggcgcgtggctgcggatctggcgccgttgccgctggatttggctcctccacggctggttccggcccgtcaccgccggatctggccggtgccgacgacggagcgggcgacggcggcgggtagcgcgcgacgacagcggcggcaggtgctgacgaatgccgccggcgtgcttggtggtggtggcatcgtgcgaggagccgaggcggctttgcggcgccggcgcccaatgttgatggtggaggtggttggctgcgcccgtcagtga

SEQ ID NO: 52563 - DNA, 720 bp, Oryza sativa
  Clone ID: PAT_MRT4530_54848C.1
atggtagaatgcttggaaatcagcgccgtactcactcgctcccgccgctacgagccacctcccattccctctggccgctgctcgcgtcctcgtgtccctcccggccacacacagccccacctcctctccactcccgcgctcgccgccgccgccgccatcacctgctttgacttcgccgctcgagtctgtggactctgggcgctcgctactcgcgctgttccaaaggaggccaggcacaacaacgtccaggcgccgaaagccgtatcgtactgcgtgaggatggacgtctacgcgctctctctcctgccgacgctctctccctccatctcccgccaccgactacgccacgctccctctgcccgtcgccggctacgtgcggcggcggcggcgaccccgaaggcgacagatccggcgctgccgtggccggatctggcccttcggcggatggagcggcgccggccgcgccgcatcgaggaggagacggtgacggtgcaggtggtggccacatcgacgatggcgccgtcgctttcttcatcgcactcaccgttgccgatgatgatggcgtcggcgccttcttcaccgcgcgccaatgccgtgggattgcccgacgaccttaaccacagcgacattgccgggtacatgccctcggagcttgggctgctcgccgacctcgcactgctctacctcaactccaaccgcttccgcgcctcctcccgctag

SEQ ID NO: 52564 - DNA, 2732 bp, Oryza sativa
  Clone ID: PAT_MRT4530_54849C.1
ttgttagtacgtgcagttgccgcctctagccacaccctcttgcagcctccacagaaagccatagtagcatcacaacttcacaaggtagaagaagaggagaagggagatcggcaaatatggctaagggtcacgtcctcgtgctgccgatgccatgccagggccacgtcatcccgttcatggagctctcccaccgcctcgccgacgagggcttcgaggtcaccttcgtcaacacggaggtggaccacgcgctggtggtggccgcgctgccgccgggcggcgccgcggagctccggcagcggcggatccacctcgccgccatccccgacggcctcgccggcgacgaggaccgcaaggacctcaacaagctcatcgacgcctactcgcgccacatgccgggacacctggagcggctcatcggggagatcgaggccggcgccggcggcgggaggcccaaggtgcggtggctcgtcggagacgtcaacatggggtggtcgttcgccgtcgccaggaggctcggcatccgcgtcgtctacttctcgccggcgtccacggcgtgcatcgccttcatgcgcaagatccccaagctgatcgaggacggcgtcctcaacgagaaggggtggccggagcggcaggagacgctgcagctggcgccggggatgccgccgctgcacacgtcgctgctgtcgtggaacaacgccggcgcggcggaagggcagcacatcatcttcgacctcgtctgccggaacaacaagttcaacgacgacctcgccgagatgaccgtctgcaactccttccacgaggccgagcccgccgtcttcaagctcttcccggacctcctccccatcggcccgctcgtcgccgaccgcgagctccgccgccccgtcggccacttcttgccggaggacgccggctgcctggactggctcgacgcgcagcccgacggctccgtcgtgtacgtggccttcggcagcatggccatcttcgacgcgaggcagttccaggagctcgccgtggggctggagctcaccggccggccgttcctgtgggttgtccggccggacttcacccctggcctgagcacggcgtggctggacgccttccggtgccgcgtcgccggcaggggcgtgatcgtcgagtggtgctcgcagcagcgcgtgctggcgcacgccgccgtggcgtgcttcgtgtcgcactgtgggtggaactcgacgctggaaggggtgcgcaacggcgtgccgttcctgtgctggccgtacttctgcgaccagttcctcgaccggagctacatcaccgccgtgtggcgcaccgggctcgccgtggcggccggcgaggaggacggcgtcgtgacgagggacgaggtgaggagcaaggtggagcaggtcgtcggcgacggcgagatcagggagagggcgcggctgctcagggacacggcgcgcgcctgcatcgttgaatccgctttgatgcaaacttagataggctgctgcagctggccaactccaacaagggtcttcttcctcctctgcttctctctgttccatgtgagaacttctcccatgagagacctccgagcaaaccgtcgccaccttccatttcaccaacaccacatcatctcgctgtctcgaaaccctagcatcatccaaaagctcgtttgatgatatttgcattgcacgcaccaattgcagtcgactccgatcgcaccaatcgaaattgagcttagcccaaccgtggcgaggtggcgtccagcgaaccaacgtgatacatggggaagtagagaaacagtactgtccagccgctggacgaacacctcggcagtgataggacgatggatgtgaagcagcagcagcagcgggacaggagctcaccggcgacgccatgagatgagaagagagaaggagaagtggagtgagatgtgtgagagaatgggacggagatggtagaatgctcctctccactcccgcgctcgccgccgccgccgccatcacctgctttgacttcgccgctcgagtctgtggactctgggcgctcgctactcgcgctgttccaaaggtacgggaggcgacgcgttccggcccgacgccctgccgttcagtgcgctgctgctcggtttcaaggaggccaggcacaacaacgtccaggcgccgaaagccgtatcgtactgcgtgaggatggacgtccataagggcatctataatcagagccactcctagagtgccctcactaactgagggtactttaggggtactcacctctataatgcaggagcccaacgagtgtcccaacccaaaaaaaactcctctctctcctcttcctctctttcctattctacccatctcttccatctctctctctctttctccaccgggtgcacgcgaccttccctcctctctctctccagcgctctctctcctgccgacgctctctccctccatctcccgccaccgactacgccacgctccctctgcccgtcgccggctacgtgcggcggcggcggcgaccccgaaggcgacagatccggcgctgccgtggccggatctggcccttcggcggatggagcggcgccggccgcgccgcatcgaggaggagacggtgacggtgcaggtggtggccacatcgacgatggcgccgtcgctttcttcatcgcactcaccgttgccgatgatgatggcgtcggcgccttcttcaccgcgcgccaatgccgtgggattgcccgacgaccttaaccacagcgacat

SEQ ID NO: 52565 - DNA, 315 bp, Oryza sativa
  Clone ID: PAT_MRT4530_5484C.1
atggcaattcctttcttgatggctggtagacttcatggattgaggcatcgagctgatgcagctgggcctacattgcccccatttaggcctagtcatcgaggggtcgcaggcctccattttcgctgggctgtaacaaaaatagtaaaaataatgcatgggacctacgggcaaggagaggcaggagaggatgacagtgacgacgccgacgagctcaagcaggggacggcggtcgaccacttaggcaggccaagagctgggcagcatcatggccctaggcggagccgtctcccattcccgagcagcgatgctggctaa

SEQ ID NO: 52566 - DNA, 180 bp, Oryza sativa
  Clone ID: PAT_MRT4530_54850C.1
atggatggagacgtcaagtcgttcttccatagaagctcctacagagtagggaacagctcgacaacattgacaaaagcaagccccctacttcgggggtgggatggggcggctcggggaggaatattcccccagatgctggatggggggatccggccgatttgcccggatccagccgcctga

SEQ ID NO: 52567 - DNA, 654 bp, Oryza sativa
  Clone ID: PAT_MRT4530_54851C.1
ttagagattttttactgtccttgagggtgggcggtaccaaatcctgaccgttgatatgccctcatcggatggctgagattggatggtaccgcacaccctgcttgatgcagtaccgctggtggggagggggtaaaattgtaatttcgcgtagcgagggagaaggggtctctttgttccttctctcggttctgtttccttctccccgatctctccgaagctttggcgcacacaatagggagtagccatgccgtgggcggctgaactagcgcaggggatggagggatggcgctcagatccatacatccctccatccgctcgtggtccccttcgaggcgataggcgttgggcggcggtggtcggcggcggcaggcagcggtggtcggcggcggcgggcggcgatggtcggcggtgggcagcggtggaacggcgcgctccgagccgccccctgctgacacggcgctgcagcccgttgcgcggctgcaggcggtagagctgggggacggcgacggcgcgctcccccggcgtgcagtgcttggaacaggacgaggcaccaccggatggaatcaactgattgatgtcgaagtattcaatgagggtgatgtttgtattttccatttcaacaacgatgacgacgttcttgatctgaagatccat

SEQ ID NO: 52568 - DNA, 303 bp, Oryza sativa
  Clone ID: PAT_MRT4530_54852C.1
ctattgagatcttagccgcgccggagatcgagagggaggagcggcgacgcgggcgcccccgatccctcctcctcgccgccgacggcgtcgtaggtgtcacgagcaataattagtcatctactactacataccgatgtagtaacctatcggtggattgaggtttatttatattcttacttttatttataacattttttatttatttattatttctatcttctattatatattaattttaatttaaataataactcatatatatttcttccataatatttttcattcacaatacttatatatcaa

SEQ ID NO: 52569 - DNA, 485 bp, Oryza sativa
  Clone ID: PAT_MRT4530_54853C.1
ccggccgggtaagcaagaacacagtccctccctcgctctcgggatcgggggccaattggcgactcgatatgcttcggcttcttggcgggtaactacgactacggctccatttaagcaagctgataaacgcggcttaatcaaagattcaaggagagcagggaagcaggcagcgagtgcaacgggacacgtgaggtgcgggctagcacgtcggggggaggctgattgattcgttgcgtggagccgagccggccgggcgctgtcggtggcgaccggattggttggggtccccgcgggggttggtctcgttactgctctgccaccacgttgccccgcccccttgttgctgctcaccaccattgctcatcctaccacaggctaccacttcatcatcaagattttagcacagctactgctactcatttgatttactagtttagtactgtagtttgttttcgttgatccaaatcaactctgtttctttcagc

SEQ ID NO: 52570 - DNA, 317 bp, Oryza sativa
  unsure (1)..(317): unsure at all n locations
  Clone ID: PAT_MRT4530_54854C.1
aattcggcacgagaaattcatnvccttcttctgaatctcttcttcctccgagvgagagcatttcttgctttggtttgtgttttcttgggtgtgtcaggcacaagtccgaccttccatggccatcgcctcccgcatccagaagcgcgtgcttgcctccttcgccgccgccgccgcagccaagctcccggggggcggsccgtcgcggcccghagggcccgcaagagggggtgggaggaggttcgcgtctttccctacaggagcaggttacaggcgcaaggrgcccagstttttgagttttgggataccagaggcttttt

SEQ ID NO: 52571 - DNA, 136 bp, Oryza sativa
  Clone ID: PAT_MRT4530_54855C.1
ataggcaaaccacacgaatacacaattgattaggggccctgacaatacctctggtacatcacatcacacaaattcatacgttgatacacgcataatccccgaaacgaccagctgcttaaataaccgatggccctcg

SEQ ID NO: 52572 - DNA, 2018 bp, Oryza sativa
  Clone ID: PAT_MRT4530_54856C.1
tccggccggattcccggtcgaccaccgtccgggttggttcgctcgctccccgggattatcagccatggggcccacccgtcagtctcactccctcctcctcaccttcctcctcgtcggcgccgccgccgccgccgccgcggcctcgccggaggacgggagccccttcctccgcctccccaccgcctcggacctccccgtccccgccgggcagctcccccgctccgccgccgtcggcctcatccgcgccctcaacctccacccgcgcgacgcctccccctccccctccagccgcggtgatggcgacgtccccgccggaaccctagtcgagaggcccatccacctcgcctccatggccaccgggaagagcggcggctcgtcggctgaagacctcggccaccacgccgggtactaccgcctccccaacacccacgacgcaaggctgttctacttcttcttcgagtcgagggggagcaagggggaggacgaccccgtggtgatctggctgacggggggccccggctgcagcagcgagctcgcgctcttctacgagaacgggccgttccacatcgccgacaacatgtctctcgtctggaacgactttggctgggatcaggagtcgaatctgatatatgttgatcagcccacgggtactgggttcagctacagctccaatccgcgcgacacccgtcacgatgaagctggtgttagcaacgacctgtatgcctttcttcaggccttcttcactgagcacccgaattttgctaaaaatgatttctatattactggggaatcgtatgctggacactatattcctgcctttgcaagtcgagtgtacaaggggaacaagaacagtgagggcattcacatcaatttgaaggggttttgctattggcaatgggttaacggatccagcaatacaatacaaggcatacactgattactcattggatatggggttaattacaaaatcacagtttaacaggattaacaaaattgttccaacttgtgaacttgctatcaagctctgtggtacctctggcactatatcttgccttggcgcatatgttgtctgcaatctaatattctcttccatcgagacaataattgggaagaaaaattattatgacatcaggaagccatgtgtggggagcctatgctatgacctctctaatatggagaagtttctccaattgaaatcagtcagagagagcctaggtgttggagacatacagtttgtatcatgcagcccaactgtatatcaggccatgctgctagattggatgaggaaccttgaagttggaatccctgaactccttgagaatgacatcaaagtgttgatttatgctggagagtatgatctcatatgcaactggttaggaaactcaagatgggtgaattctatggaatggtctggaaaggaggcttttgtgtcctcatctgaggaacctttcacagttgatggaaaagaagccggtattctgaaaagctatggacctttgagtttcttgaaggtccacgatgctggccacatggtaccaatggatcaaccgaaggtcgctctggagatgctgatgaggtggacctcaggaaacctttccaacgcatcctcgagcttccagaggctcgattttaccatgtgatatacacactctgtcctcttgtgacacgatcagaggaacatggtttccccataaattagtataaagtgcttagtaggcacgtcagaatgattttaggtgatgacaagctcactgctaccgtacagatgttatttcccttgtacggtgcttgagtcactgaagtatcggtgacgccactcgattgttagcatgtaataaagcttagaattgttatggacagaagccaatctctttgttatgagggctgtttatgtccaggtcttgtatgctattataatacttatggcttgtgctatggatggtataatctgtgctccaaactatacagtaaatatttttgcgggaattgggcgttccaaaaaaaaaaaaaaaaaaaaa

SEQ ID NO: 52573 - DNA, 462 bp, Oryza sativa
  unsure (1)..(462): unsure at all n locations
  Clone ID: PAT_MRT4530_54857C.1
agaagaaaccaattanaacattgttttgcagaagtacgtgctgtcgaagatgatgtcggagaaggagctcctgggctacaacgacggcgagggccgggcgttcgaggtggtcaccctgccgtgcggcctcgtcgccggcgacacggtcctcggccgcgccccggagacgctggagaacgccgtgtcgccggtgtcccggaacgagccgtccttcgcgttcctaaggctgctgcagaggctggtcgggtcggtgccgctggtgcacgccgacgacgtctgcaacgcgctcgtcttctgcatggatcagccgtcgctcgccggccgcttcctctgctccgccgcctacccgaccatccacgacatcgtcgaacacttcgccgccaagtaccctcacctcgacgtcctcaaagagtatgccgatctttctttctctgatcgagaacaaatcggacgcctagcgcc

SEQ ID NO: 52574 - DNA, 4638 bp, Oryza sativa
  Clone ID: PAT_MRT4530_54858C.1
atggagcggcacggctgtagtcgccaccgccattgctccttcgtcctgctcatcgtcgtggtggtggtggcctacctcctcgtcggtgtcgtccctgcattgcaggcttcagtaatcgccgaggatgatggccgtgctctcatgcagttccagtccctcatcacggaggacccgtatggggccttggcgacatggggtggcagcagcggcagcaaccactctgcctcaccggcgacgccatgcgggtggtgtgacctccgcgggctcggcctaggaggcgccatcgtcgcccaatcgtccctgtccagcctcacctacctccggtggcttgacctctcccagaaccgcctgtgtggtggcgtccccacaccgctgccactctccctcgagtacctcaacctcagttgtaacgcgctgcaggggacggtgtcctcagagcttgggtcgcttcgccgcctccgggtgctcgtcctcgacaccaacaacctcaccggcggcatccctgcctccctcggaaacctcacctccctcaccgatctcgccctcaccggcaatcacctcagcagccacatccccagtgccctcggcaacctccgtgccctcaccagcctctacttgaacgacaacatgctcgagggatccatacccctctcggtgttcaacctcctctctgtagcattgtcacgccagagcattcatcatcagactcgggcgcggaaggaagagatcaaatcaagtgggccgtcgactaccgctcggcccagacgggagaggcgcgacaacctgcgcgtgaaggggaaggattggattctatctctaattcttcttgctgagatctcgcttcaagtcgatgccatggagaaacaagcgggaggattcgagaagatgctcgagggaatccagaacgccatcggcgctgttgcggtgaagcaggatgaaacacaagcggtggtgctccagatggataaagcgatggctagctggcgacctcaagtggatgcagcagtcaagggacttcaatctgagatgggtgagctgaagaaacaagtggagattctggagaagcttcgtggcgagttgggcaattcgtcgaacatgttgcaggcaggcgccatctccacgcggaagcaaggcgacgacaacgatcaacgtccaccgctacttcccacgccggagtcgttcgttgcttcgacgttggcgggagattctggctcaaatggccaccgcgttgcaatcaacaaccgggggaaggcaacaggagtgattattcctcctgtgccacctcaggtcacgggtacgactaattctccattttcccatcgctttgcttgtgattcattgcatcgggatgaagttgggggttctgaggatcgaggctataatcatcgggttccgaaattggattttccacagtttgatggggtagatccacaaaattggcgcatgagatgtgagcattactttggggtttatggtactcatccaatactttgggtcagggtggctaccatttactttactggaagagcagcctcatggttacgctcgtcgaaggctcatttgcggttttctgagtggtcgaatttttgcttagcagtggataggaaatttgatcgagataggcatcagatgttgattcgtcagatagagcagattaagcaaaccgggacgctcacgattgtgcataggttcactgaagggttgcgttttgacattcgtcatgctgttatgatgcaacgtcctcgcgacctagagactgctctggctattgcttgtttacaggaggaatggacggagactcagaagcccaaggaatttcgtaaattgggtgatcatgttctgcggattaaaggagcttatcctcttccacttcctcctagcaaggtgtcggaatctagtgcaggggctggcaagtcttcatctgaacctgtcaagactactgctattgctgacagaatgcgagctctcaaggctcatcggcgagcccaaggtctctgttatctttgtgcagagaaatggtcactatctcacaagtgttcaagttctgtgcagttgaatgctgtgcaggaggtgtttgctctactgcaacaaaatgacagtgattctggtgattctcctggagaggatactgagcctcattctctgttctccttgtcagtccatgctattcaggttcagggacatcatttttgttctgccttgaaggtgttaccacttcagagttatgatatgattttaggaatggattggttggagcgatacagccctatggatattgactggcagcagaagacaattcggtttacattggatggccagttgattactttatgtggggtgttacatcaattgtatcagtccggttctattgaaggtctagttcagttatacacccttgattctgagtctagttctgatttgccaattccggacaatattcagcaattgttacagagctttgcggatgtgtttcaagaaccacaaggacttcctcctgttcgggaatatgatcacactattccgttaattcctggtgcgcaaccagttaatgttcgcccttatcgttatacaccgttgcagaaggatgaaattgaacgccaagttgctgatatattggacagaggtatcatcaaacccagttcaagtcctttctcttctccggttcttttggtcaaaaagaaagatggttcttggtggttttgcgttgattatcgccatcttaatgcgattactgtcaaaaacaaatatcctttgcctataattgatgaactcttggatgaattagcgggcgcttgttggttctctaaattggatttgcgttccggctatcaccgactgcctttaagacgcatcatgggcattttgagtttcatcaccctattgcttcaccctattgcttttctcagtaaagcattaggacctcgcactcagggtctctctacttatgagaaggaaagtttggcaattatcttggctgtggagcattggagatcgtatttgcaacatgatgaatttgtaatacggactgaccaccgtagtttggccttcttagataatcaacgattatccaccacttggcaacagaaagctcttaccaagttattggggttgcgttatcgtattgtctataaaaagggtttggaaaatggagctgctgatgcgttatctcgacaatctcctgttgatatggtggagattttggcgctatctgtcagtattcctgcttggctgcaggagaaaaggatttggattggtaacaataaatctttgcaacagcaaattctggccaatttgcatactgcagctgtgggtggacactctggtttaaggcaatctgtgcacaattttgttcaggcttgtgatgtttgtcaacgagctaagtctgagcatatcaagttacctgggctattacaacctttggaagtacctgatcatgcttggcaatggaagcattggttaggaatggctcagttttggtacaactcttcttaccattcagccattgctatgactccttttgaagcattgtttggtcataaaccatcctatttcggattaactatcactgccattgatgctcctatgagtttggcttcctggttgactgatcgcaataacatgagtgctttgattcatcatcatttgctgcgggctcagcaacgcatgaaacatcaagcagatttacatcggtctgagcgtatcttcaccgtgggtgattgggtgttccttaagctccaaccatatgtgcagcaatctgtcatgaccagagccaacaggaaattatccttcaaattttatggaccttttcaagtcttgcaacgagtgggcagtgtggcttacaagttggatttgccgtctacaagtatgatccatcctgtggtgcatgtctctcaactgaagaaggcattggcaccagctgaaaaagttcaggcttctcttcccacgctggattctgaatttggtccattagctgttcctcatcgtattttggaacgccgccttcgtcaacggggtgccaaactaattgaacaagttcaggttgaatggaagggtacttcttctccagctattacatgggagaatcttgaggaacttcgtcacaagtttccagctgcaccagcttggggtcaagctggttctcaaggagggaggaatgtcacgccagagcattcgtcatcagactcgggcgcggaaggaaggatcaaatcaagtgggccgtcgactaccgctcggcccagacgggagaggcgcgacaacccgcgcgtgaaggggaaggattggattctatctctaattcttcttgctgagatctcggttcgtaacaagcatctcgtcatgcagttcaacaatctcactgggacacttcctccctgcgccggcaacaggctgccccgcctcaaggtgctcagtgtcgacagaaaccagctccatggtgccattccggtctctctctgcaattcctccaagctcgaagtgatccagatgatgaagaattccttctcaggagtcatcccggattgccttggagctcacctccagaacctgtgggaactgaccctggatgataaccagctagaagcaaattctgattccgattggagatttctggacagtctgacaaattgcagcaatctgaag

SEQ ID NO: 52575 - DNA, 348 bp, Oryza sativa
  Clone ID: PAT_MRT4530_54859C.1
atggctgacgatggcgactggcgacggcggcggcggcagcagctagcggcggcggtggctggcgatggtgactgccgatggcggcggcggcagcagctgcggtgcctgctggcgtcggggcagctcctagctgcttgctggtggagggcaacggcggtttgcggaggcggtggcagcggtgacggctgccgtgaatgtggaggcggtggcgacgtcgacggcggggaagaagtcgggtgcgaggcgaggatggcaacggcgaggtggctgggtgtttcggcagcagcggctgcggtggtggtgaccgtttctgcggtcaccggagacatgacggcctcggacggctag

SEQ ID NO: 52576 - DNA, 667 bp, Oryza sativa
  Clone ID: PAT_MRT4530_5485C.1
cagagaagattataaactttccatcagatattacatatacagcatcgtcagatggaatacaacagtataattcagcaaaccagtcatagctcaattgaaactaagttactaactactggtctattagggccagttctgattcacacacgcgcataatagaaaacataaacgaaatagtgaaggtagcatctgcagggacagtcggtcatatgtgtcggtcttgctggaactcgggctgctttcggctttcgagatgtcaatgtcacattcactgaaagttgtggtacctcctcctctggtcctcattggcactgccccgagagttgctgctgctgctgctgctgctgctgctagcattggagctgttgtaatgggatccttgatggcctcctgtagagtcaatgcgatccacgtccttgatcagcttttcatagtgcctcttcacatcatcaactgactttccaccaccaactgcccgtgccacattctgccagcgatctggcgtatccctgtcatatattgccagcgccctctcaaacaccttattctgctttgttgtccaggatgaactcatcctccttcaagaaaggccaaggtccctgtaatggtggtggtggtgtcactggtgtagtggtgtggtgtgaaccatgttgatgggagtaccaaa

SEQ ID NO: 52577 - DNA, 1385 bp, Oryza sativa
  Clone ID: PAT_MRT4530_54860C.1
gctggatgagccagcagccgcccccgcccgcggttgcttcccctccccaccacgtcaaaacccaaccccaaccatgatgctcctgcgccaccaccaccacccccacagcggcgccgccaccaccagcagcagctgcagcggcggcggcggctgttagagaggagggcacacaccaccaccgacaccgacacgctcgccatgccaccaagcgaggcggcggcgtgaggcgacgcagatctgaacggaggaggaataggaagaagggaggaggaggggagggagaggagttggaagacctggaggaggaggagatctctttcttgttcccgctcgatggagcggggggaggggaggaggggagattgctccgtgcaagtgaggaagaagagaacgcgaaggaaaagcgatggccctgattcaatcgctgaaaccatcaagtggtggaaggagcaaaaccagaagctccaggaggagaatagctccaggaaagcgccagccaaggggtccaagaaagggtgcatggctgggaaaggaggtccggaaaattcaaattgtgcttaccgcggtgtcaggcaacggacatggggtaagtgggtggctgagatccgtgaaccaaaccgtggaaggcgcctatggctaggatcatttcctactgcgctggaggctgcgcatgcatacgatgaggcggcaagggcaatgtatggtcccacagcacgtgtcaattttgcagataattccacagatgccaactctggctgcacatcagcaccttcattgatgatgtctaatgggccggccactataccttctgatgagaaggatgagctggaatctcctcctttcatcgtggctaatgggccagctgtgttgtatcagcctgataagaaggatgtgttggaacgtgtagtccctgaggtgcaggatgttaaaacagaagggagcaatggcttgaaacgtgtttgtcaggagcggaagaatatggaggtatgtgaatcagaagggatcgttttacacaaagaagtgaacataagttatgattatttcaatgtccatgaaattgttgagatgataattgttgaattaagtgctgatcagaaaacggaagtacatgaagagtaccaagagggagatgatgggtttagccttttctcctattagagtagtagtcatgctgcgggtcaataggaatatttcattctagctgctaggggatacttcaaatatctgcaacctgaagctttgtagtcatttacggttttcgtcttactgggtaatagctttatatatactataagccaactggtacaagaagttgtactgtgtgttgagtgcactgtggtaaaaatgaatctatatttaatgagcttactctgtcaaaccaaaaa

SEQ ID NO: 52578 - DNA, 276 bp, Oryza sativa
  Clone ID: PAT_MRT4530_54861C.1
atcgttaccactcgacgtgttgtgcagtggaagtaagtgctaagtagccgaaggaacgtctgggatgtagcgtgcgtcggtgtagaggaagtagtcgatcgcagcagctcgacgttctcctcctcgtgcattctcctcgccgtgctctcacagtgatgcaatcacaccaccggtcacacccctcacgaatatataggatccatgactcggccctccaaggcccaaaggactcctattcggatccctatccgaattaagctcatattggatctacgt

SEQ ID NO: 52579 - DNA, 114 bp, Oryza sativa
  Clone ID: PAT_MRT4530_54862C.1
atgattgagaaggcttgtgctccttgttcaaatggaagcagggaaatttccatcaggagcgtgatattccacacgacttctcccgaagaacacaccagctcggtgcctcggtga

SEQ ID NO: 52580 - DNA, 194 bp, Oryza sativa
  unsure (1)..(194): unsure at all n locations
  Clone ID: PAT_MRT4530_54863C.1
cnggggtgtcctgagcgttttttactggaattttttcaggtttttgcaggcccttccttggttggaattgattgatttttttttttggttttttttgttccgcttgtccacctttgaaggtttcagaggattccgtgggtcgcccgggtattcccgggcattccgtgcggggtttcgaggttttctttttttgg

SEQ ID NO: 52581 - DNA, 1966 bp, Oryza sativa
  Clone ID: PAT_MRT4530_54864C.1
atgcatccgtcacgctcactgcacgccaagccgccaagaagccacggtcaccacgcgcgctcgcgctcccagctgcccaccgccatttctgcgcccaaccaagatttccagttccagttccagcttctccccaaggtgttccagttccacatggacgtcggcggcggcggcggcggtggtggtgaagggaagtcgtcggagaagaaggttcttgctcagctggagcaggtgaggctcagcattgcgtcgagcgaggacgaggaggacggggacgcgccgcccaggagctccttctccggggcgagccacccgccggagccggtggatgagatggatacggtgttcgttgccgtggatggccgggacaaggcggccaagccggtgatcatgtgggacgcgtcgccgccgcagagcggcgcggcgagcccgcacagcagcatcgacagctccggcgcggcggccacggtgacgagcatcgcgcccagctgcaccgtcaccagcctcagcgccaagaccagcgtcagcagcagcgcggccagcgacggcagcgggtggagcaacagcacggccggcgccggcagcgccgccggcggaggcttcggcgggaagccgcacaaggggggcgacccgaggtggaaggcgatcctcgcggcgcgagcccgggacgggccgctcgccatgggcaacttccgcctcctccggcgcctcgggtgcggcgacatcgggacggtgtacctgtccgagctcagcaacgtcgccgtcggcggcggcggcggcgcggcgagggcgtggttcgccatgaaggtgatggacaaggcgtcgctcgagagccggcacaagctgagccgggcacagacggagcgggagatcctccgcctgcttgatcaccccttcctccctacgttgtacgcgcacttcgagaccgacaagttctcctgcctcgtcatggagttctgccccggcggcgacctccattctctccggcagagccagctcgacaagcacttccccgagcaagcggcgaggttctacgcagcggaggtgctcctcgcgctggagtacctgcacatgctaggcgtggtgtacggagacctcacgcccgagaacgtccccattccggccgactctgtacacatgttttgagacctacagattctgctgcttggtcctgggaattctgtccaggtggtgatttgctcacggtgcgacagagacaagcaggaaaacatgtgtccagaatatgctgcaaggttttatgctgcagaagtacttctagctctggagtatctacacatgttgggagttgtttacagggatcttgaagccagagaacgttcttgttcgtgatgatggtcacataatgctttcagatttcgacctctccttgagatgtgcagtctcgcctacactgatcagagcatcagcttttgattctgatccaagaagagctggtggttcattctgtgtacaacctgtttgcatggaacccacttcagtgtggacgttcggggtgttcctgcacgagctcatgtacggcaggacgccgttcaaggggcagacgaaccgggccacgctgttcaacgtcgtcggccagcagctccggttcccggaccacccgccgacgagcaccgccggcagtgacctcatcaggggcctgctcgccaaggagccgcagaggcggatcggcgtgaaccgcggcgccgccgagatcaagcagcaccccttcttcgacggcgtcaactgggcgctcgtcaggagccgcaccccgcccggcgtgcccagggctgtcgagcccgtcgccgtcgccgcggcggtgccggcgacggtgatgtccaagccgccgccggtggacaccgtcgagatggcaatccacagcaattgcaacagcaccaacagcagcaaaagaatggcagggcctccagaggtagagtctggaggcaagtacctagactttgagttcttctag

SEQ ID NO: 52582 - DNA, 1744 bp, Oryza sativa
  Clone ID: PAT_MRT4530_54865C.1
cccgggctgcaggaattcggcacgaggcaggcacgagacgagcgcggtcaccgcgacgtggtgcctcatgctgctcgccgcgcacccggagtggcaggaccgcgcccgcgccgaggtgctcgaggtctgcggcggcgacggcgccgccgcccccgccgcgccggacttcgacatggtgtcccggatgcggacggtggggatggtggtgcaggaaacgctgcggctgttcccgccgtcgtcgttcgtggtgcgggagacgttccgggacatgcagttgggtaggctgctggcgcccaagggcacctacctgttcgtcccggtgtccaccatgcaccacgacgtcgccgcctggggcccgacggcgaggctgttcgacccgtcccgcttccgcgacggcgtggcggcggcgtgcaagcacccgcaggcgtcgttcatgccgttcggcctcggcgcccgcacctgcctcggccagaacctcgcgctcgtcgaggtcaagacgctcgtcgccgtcgtcctcgcccggttcgagttcacgctctcgccggagtacaggcactcgccggcgttccggctcatcatcgagccggagttcggcctccgcctccgcatccgccgcgccggcggtcaggacgccacgtcacaagttgacacatctactgcacccagcagagcaaaaggcaaaatcaagtttcagaagcacatggaaaagtatgatttctttggcaaaattgttgtgccattctcttatgctataggcctgtggttgagtgagcggccgtttgattgggacgccgacgaacagaaaaacctgaaccgagaagccattagcgttgtcacatacgacgccacgctcggtgactcggtgagccagcgtgtgcaccatcagctcgccagcagcgcgcgccaagaaagaccagcagccatgtcggggtccggcgacgccgcgccggcgcggcacaacgcgggtcacggtcggcgacgacggcgcgtcctcgtctgggccagcttcgccgcgctggtcctgctgctcgtcgccgcggcggccgccatcgccgcgctcgccgtgctccggccgcgggacccgaccacggagctcctgtccgtgaacgccacgggcgccaccccgcgcgtcgccgcgctgccggccgtctccgtccagctcaacgtcaccttcctcctcgtcgtccgcgtgcgcaacccgaaccgggcggagttccgccacggcgccgccacgacggcgctcctgtaccgcggcgccgaggtgggcgccgccggcgtgcccgcggggacggtgccgagccgcggcgcggcgacgctgaggctgaacatgacggtgcgggcggacagggtggtggcggcggccggggtgggcggcctcctcgcggacgtgctcgccggcgagatggagttcgaggcgaggacggaggtgcgcgggcgggtgaagctgctcgggctcgtccggcggagcgccgtggcgaggtcgctgtgccgcctcgtgatcggcgtcgccgacgtgaaggtccggcgccaggagtgccacaacgagtccaagctgaacaactctgtggtgtcagatgttgtcgtcggcatgcaacccttgagcatagaggtgcaggacatcgaaggcaaaggttccggagacctgctctccggatcgtcggcgcacgccggtgatagatcggagtcaacttgggagaagttgatgtctagggatcatgagatcatgcgggatactaaaggctag

SEQ ID NO: 52583 - DNA, 2226 bp, Oryza sativa
  Clone ID: PAT_MRT4530_54866C.1
atgccacatttatacagtgccccagaacgcgagacgggccgcatcgcgcacgcgacgcgagaacgcttcgcctctgccgccgtcaagcaagcatgcatggttttgcggtggaggaatcaaatggaaagcatgctgctaccgccggagagcagggactggtcggagctgccgatggacgcgttctcggtgatcttcgccaagctcggcgccatcgagctcctcatgggcgccggcctcgtgtgccactcatggctgcacgccgccaagctgcctcacctgtggcaatgcgtggagatggttcaccacgaggccctgagcctgaaggaacccattgtcatgtccgaaatggctagggcggccgtggaccgctctgatggccggcttgaggcgttcgaggggcagtggtttgttaacgatgggctgctcaactatatacgggacaggtcaccgaagctgaagcgcctgtgccttgtctcatgctacagtgtctacaaggaagcgttcatcgagttcatagcaaagtgtccgctgatagaggacatcgccctcatcaactgtggaagtgtcgtcttccacgctttgaatgtgatcaccggaaaatcattcccgcagctgaagcggttcgagctacgaacggcatttgagcgaccttgttacgggtgcgatgtgccgctggggattccaacggtgcgccacctgcaacacctgattttagggggcatcatcgacatcgacaacgaagagccccctgccctcaccttgatcttattggcatcagggagtgctatgagctcaaggggaggaagccaacgagcactgaaggaggggagcagtggtggcggaggcgacggtggagtggaacttggggaggaggtggaggtgaaggcgagatcaatccacagatggaaggagttctactcggataaggctgagtctttgccatatcgtgagggatttcaggtgttgcagtggaatccatggacgccctgccggtgccggtgccggagaagctgtcgccggagacgagggactggtcggagctgccgttggacgcgctctccgtcgtcttcggcaagctgccgcgccatcgaggtcctcatgggcgccggcctcgtgtgccactcgtggctccaagctgccaagctgcctcacctatggcgatgcgtcgacatgtcgcactcgcacccccgggacgtgtcgcggagaaattgcgccatggcgaaggtcgccgtggaccgctccggcgggaagctcgaggtgttcaaggggaagaggtttgttaccaataatctcctcacctatgtcgcagacaggtcaccttgtctgaagtgtctttacctcgagtcatgcacaagtgtctccaacaaaggactcaccgagctcatcacgaaatgtccgatgctagaggacttgacgctctacagctgcagaaatatcgacggcgacgtcttcgtggtcgccggcaaggcgtgccgtcgcatgaagcgtctccacgtacgctggtgcggagcgttacctgcctacttcgacggcgacgagccggtcgggatcgcgacgatgcgcgagctgcgacacctgacgctcgaaggcatcggcgtcagccaggagaagctgatggccattgtcgatggctgccctcagctggatctcctccacgtgagcgggtgccccggcctcgccgccgtcgacgacgccctgcaagccaagtgcgccggcatcaagtcgttgacgcttcgcccctaccaggaactggaagtctggaagaaaaatgaaaaaatatatcaccacccatacaccgacagcgccaatccacaagccctggagaaggctagcaccggaccgaccgctgtcaagcgtgaccgaccgccgtctgttgtcgtccagctggatccggccgttgtggagtcggacctcgcccaccgctgctccaccgggcaccatcgtcgccgtcgccaccagcaaaccccaccgcctgtcgcctccccgccagatccaggcgtggatctggcggcacttccaccgccgccgctccctctcccgtgcgccaacgccactccctctgccctgccggtgatgcctcctccgcccaacgccgcgagttgccgccttggcctccgcccgctgctgaaaacggcgtcgccgacctctgccctggagtccgcccgcgtcggaacaggaggagcgggagctgtgagccccgccaccgccgtccttggtgatgggtga

SEQ ID NO: 52584 - DNA, 439 bp, Oryza sativa
  Clone ID: PAT_MRT4530_54867C.1
gggaaaactaacaaatgggaaattttcgatattgttctttcgggaaactttacaaccataatacctttttaggcttaatagggggggttttataaaatttaccccctttttttttttgaaaaaggaataaaatcactttgactccctcaactgaccaccgaatttaaatcgtttccctcaaccgtaatatcaaaaattttgactccccaaacttacaaaaccggggcaatttaactccctgggcggttttgggagggggttttgctgacctggggccccgtggcgcctacgtggcaattttgaccgagtttttgttccacgtggggatgacggggcccctacggggggggagaaataaaaaatttgcgggggacccatttttcattcacacaaaaagaaatgggggcccactgaaaaaccttcctcctccctttttccc

SEQ ID NO: 52585 - DNA, 317 bp, Oryza sativa
  unsure (1)..(317): unsure at all n locations
  Clone ID: PAT_MRT4530_54868C.1
tggcgtcgtgnactcgcgcatgtgggnttccccatcgcaacggctantgatgctccatctgttcttggctgctctgtaccctgtactcccttctctctctctctaggaaattgatttcgtgtaggggggcctgcttggcttcttcggatcttgtcttttattaatctccattttttaccatgggcttagatcttttgtaatgttgtgatgtacatcttgtctgtattttgttatcccaattggttcaagaggatggtgggggatgaatgatgcttcaaaaaaaaaaaaaaaaaaaaaaaaaaaaaaaaaaaaaaaaa

SEQ ID NO: 52586 - DNA, 390 bp, Oryza sativa
  unsure (1)..(390): unsure at all n locations
  Clone ID: PAT_MRT4530_54869C.1
ttgtttttttttttttttttgttttttttttttttttttttttttttttttttttttttttttttttttttttttttttttggttttaaaaaaagagagctggcccaatcttggggtggaaatcgtccttgccccccctcccatggtgtttatttatccaacgggggataaggcccacctaaaaattggtgggggaaacgggggttttaatttttttattggtgnnncaccttttggtgaatgggggggtcactccgggccacaatttgaggtgatttttggaaacgaaaaatgaataaccccggccccccaagggctggggtaattttttgatctcaagggggggctttaaggaggaaccggggggggttccgccccccccccgccccc

SEQ ID NO: 52587 - DNA, 1090 bp, Oryza sativa
  Clone ID: PAT_MRT4530_5486C.1
ctagtggatcccccgggctgcagggtttcagaatatggatagaacatcatgctacaactttacctgctatttggaaacatagagactttggatgtttcttcttattttaacaagaaagacatcaactttttttttttttttgctgaaatttttcattcagatctaaacctcaacattttctataccacaacatattgatactgggacagatggccttgaatgtttttcatgacccagcagttacataggttatgttgattatcctcatatatgtcttttgacttgtcggtgtctttatttgatttattattatcaacatgcataaactgtccggaatatgaatttctctgctttacaaaagctaacaatattatgtggttttatgtccttaaaactcaactgtttatttctaagtgtaattaattaattaattagtatgcactcatcgctccagggttcttttcataagtacggttggacaaataagttctatacatatggatgtaattaattggcatttggtttcttcataccaccaaacctgcgatctatttgttctgtgtcatatagatgtctagcggtagctttaacatatcttaaaatttcatactaatggttctccaattccccatgtcatgcataaaagggttgccatgctaataccaaatacaagtcagtataaataccaaatacaagttagtataaataccaaatatgccgtgatgacatttttttaacatgtcttgagtttctctggtttagaccatagactaatttggtgtttgttgtaaagaaaggttgaacatggagtaggcccaggttatgtcaactgtcatcttaaaatactagaggatatgatttggtaaagctgtagaggttagtttaatcataaaaaagtatcattttactttagccataatttgggatgtaaaatgagcgaaaaaactcagtgctctgctgaaatagtttgtgagagtaaagtggactttttttttttctgttaaaacatcgtgaacaacgagatgctttataggtctttctaccaagtactgggaagagacatttagttcacttgtttagggcagcacat

SEQ ID NO: 52588 - DNA, 1324 bp, Oryza sativa
  Clone ID: PAT_MRT4530_54870C.1
ttctttgctccgtgattatcatctcgtcctcgcatcgtcggagttgtcattagtctagtcgtctccctcgtctccggtgagctagctggtggtgtggtggttggttcttgggagcaatgggggcgtgcgcgacgaagcccggtgacctcaaggtgaagggcggcgaggcgccgctcgtcaaggaggacgccgccgtggcgccgtcgccgccggccgctgaggagaaggagaagaacgtcgacgaggctccggcggcggcggcggcggcggtggtggtggcagccgtggagggcgagccggctgaagccggtcgccggaggtctctcagcgacttgctcaaggaggatgcagagagcgagggatcagaggcggctccagctccaagtgcagaggcaaccaaggccgtggaaactgaatctccggctgccgctgctgaatctggaatagcagcagcagcagcagaagaggagaaagccgaggtggttgagccctcgcctgcgacgtccgagcaagtcgcagccggagaagaagaagaagaaaaggaaacagcagcagcagcagcagaagaggagcaagtcatggcggttgagacctcgcctgcggcgcccgagcaaggcgcagccgtcggagaagaagaagaagaagaagaagaagaagaggaaacagctgcagcagcagaagcagaagaggagcaagtcactgtggttgagccctcgcctgtgtcgcccgagcaacacgcagcgggagaagaagcagaggaaacagcagcagcagtggagcaaatcactgcggttgatccctcgcctgtggcgtccgagcaagagacaaccggagaagaagctgaagcagcagcagcggaaccagaagctgcccaagaaggcggcggcggcggcgcgcaggaggtagcggaagaggagaagcgcgtggatcctgactcggttcaggttgccgccgcggcatcatcaacaccatcaccaccatcatcagctgatgatgatgaggaggagaagagcaaggaagaagctgctgctgatgtttcagctccggcggcgcctgatgaaaactgacgcctctgcgcttctgcttccgcgagttcagcgttttctgaactctgaactctgaagacatttgttttgtttcctttttcttgtttctgagagatactactacctggatgcacatttggattgtctgagattgtttcaaatatgtcgtgcttgcttgcacaaatctttgagagttttggtactcttcccttttttttgtgttttgtgttctaggtgagtgtatcaatctgtattcagtttattgaacattttagtat

SEQ ID NO: 52589 - DNA, 370 bp, Oryza sativa
  unsure (1)..(370): unsure at all n locations
  Clone ID: PAT_MRT4530_54871C.1
cttttggtgggttggcttctcctccccctctngggctttttttacaatcttcgggggcttgcctcacctatggtttagtgggttgagatggcggccccggatgtcgagtaccgctgattcgtcggccgactcgcctgggccaccgaccaccgctccctcgagggcagcttctccacctacggcgagatcctcgactccaaggttcgccctcgctctcctacgccgcgtcttgagatgggttttttttggctggattatcacgttgactcgctctgtgttgaataccaatgggtttctttgttgggttgcttggatctgcgaactcggggggttttgctccggctgttctgatcccgttggtgccagatct

SEQ ID NO: 52590 - DNA, 184 bp, Oryza sativa
  Clone ID: PAT_MRT4530_54872C.1
atgcgcatcgttgtctacctcttcaccaggcccgaagatcgtcagagccgtctcctcatcaatcttctccgttcatcgccgccacagcaagctcatcaacgattgccactgttaatccctcaccgcatcgtgattgtgatccgttcttctgggggtaccgagctcgacaggcgccctatcgagg

SEQ ID NO: 52591 - DNA, 235 bp, Oryza sativa
  Clone ID: PAT_MRT4530_54873C.1
cgcgaccgcagcgtcatcgacatcgcacggcatcagaaagtcgttctctacttcagatgctgcgtgttcaaaggtcgcatgtaatgaaccagaaaaaaaatgcaggaggctatgtctaagcttttctattgaccactgtctaaaacattcttattgtcttattcgcaattttattgacctattccattatcgtctttttataacatggagagtcttgggtttttcctttaatttt

SEQ ID NO: 52592 - DNA, 520 bp, Oryza sativa
  Clone ID: PAT_MRT4530_54874C.1
atcgtcgtcctcctcctcctttcctctcttcggggaacccttcctcctcctctggctcgctcgccggaggcgatgacggcggaggcggacgacccgacggcggcggagacgctggagaagttccgcctctacgagacgcgcgcgaggttctacctgatcgggacgtcgcgggagaagcggtggttccaggtgctcaagatcgaccgctccgagcgctccgagctcaacatcagcgaggaccccgtctggtactcccagcaggaggtcaagaacctcctccagcgcatctccgagggcaaccgctccactggcggcctcaccttcgtcaccaaggcctatggcatcgctggttgcatcaagttcttggagtcatattatctgattttggtcaccaagcgctgccaaattggttgcatttgtgggcatcctatttactgtatagatgagagccagatgataaccattccacactcatctgtgcagacagatgttgcaacctctaagaatgagctaaggtaca

SEQ ID NO: 52593 - DNA, 501 bp, Oryza sativa
  Clone ID: PAT_MRT4530_54875C.1
atgtattttaggattgttttgggacgcgacatcgacctcggcttcaagttttacgacctcactgataaggtgcatagggtcctcggccagactcaccgcttcgactatgtcaacaacctcagtgtcagcgccaacttgccagttatgggcgggactctctggtacaccatctctgacatcttctccactaactgtgccatcgacaggttcggtcgccacgccggcatctctatgcaagagcacacaaaatacatggatcggaacttcctggtcgctgtgctgctggtgctctacaccttggatcaacaagagaattggtgccgacgcctgggcgccggtagcatgccagccaacgaagatggcatggagatgaccaatgaacaaacaattgaaaaggttgctgattgccatggagtagaggacttgacggcctccaaggtggacaccaaaggtgttgctatagatggaaggcggaactcctacacgcatgcatggcaatga

SEQ ID NO: 52594 - DNA, 408 bp, Oryza sativa
  Clone ID: PAT_MRT4530_54876C.1
aaaaaatgaaaaacaactttttttctatttataccccccaaagtttcacacgtcccatatgaggaaatctgaccttatttttaacttcccaacccctatactgttaaaacccattacaaaacccccccaaggggggaaatggtcccgggggccccatactccctaggggcaatcccatttttaaagggcccgttaaaacccaacaaaccttgaccttgaccgagattcccaccaaagtcgagatccccaacctgctggagttgtagctgctcccctttggcctgaacaatgttaatgtcccgatagggaaattgttccccccccaacccgacctgttcccaaacttggttgtttttcaattaaaacccatcttattgcaaaaaggggcttgcccctatcccatactgc

SEQ ID NO: 52595 - DNA, 2442 bp, Oryza sativa
  Clone ID: PAT_MRT4530_54877C.1
taagccatggcgtcctccatactctccgactgctcctcctccgccacctcccgcctcctccccctccgccgcgccctcctcgcgccgccgtgccgcttccgcccggccaccgtcgccgcgccgccgcggaggcccctcgccatcgccgccccccagctcccgcttctcccccgcgcgcgcggcacggcttcggcctcagccgccgccgccgccgccgcctcctctaccgactcagatgcttgtgccaagatcattgatgggaagttggtggcaaagcagataagagaggaaatcgctgttgagatcgccaagatgaaggatgcaattggggttgtgcctgggctggcagtcatcctagttgggtcaaggaaggattctcaaacgtatgtgcgcaacaagaagaaggcatgcgaagcggttggtatcaagtcatatgaggttaatttgccggaagacagctctgaggatgaggttctcaagcacatcgcaacatttaacagtgatccgtcggtgcatggcatcttggttcagttgcccctacctcatcatatgaatgatgagaacattttgaatgctgttagtattgagaaggatgttgatggatttcatccactgaacattggacgacttgcaatgcaagctgttggagttgctaatctggtcagagggagttggataaagcctggtgctgctattattgatgttggcatcaatccagttgatgatccagaaagccctcgaggttatcggctggttggagatgtgtgctacgaggaggcctccaagattgcaggactaatcacgccagttcctgcctaccagataagggttttgctcaaccttttcgtgtgccttttgctggactcgagcgagctctctccttccttgtctcgggtctcggcattgcatttgcattggggggcattgctattgcttcgcttgcgcttggccacccaccatttcggcgcggagaggagaccgcttcacccgccgatctgcgagaaaccctctccgcctcgcctcctccacctcccaatcttaacccaacctccccccttcctctcgcgtcgaccccttgctttgctcctccttcaaccttcttctttcttggagtttcttgagagagagagagagagagagagagagagagagagagagagagaggggggggagcggtcgcaggaggaggaggacggcggcgtctgctgcgaccgacggggagcggcgaggatgagcgcgtccaggttcataaagtgcgtcaccgtcggggacggcgccgtcggcaagacctgcatgctcatctcctacacctccaacaccttccccactgattatgttccgacggtgtttgacaacttcagtgccaacgtcgtggttgatggtaacaccgtcaacctcgggctatgggacactgcaggtcaggaggattacaacagactgagaccactgagttatcgtggagctgatgttttccttctggccttctcgctaatcagcaaggccagctatgagaatgtttcaaagaagtggatacctgagctgaagcattatgcacctggtgtgcctatcatccttgtgggaacaaagcttgatcttcgagatgacaagcagttttttgtggaccatcctggtgctgttcctatcaccactgctcagggagaggaactaagaaagcaaataggcgccccatactacatcgaatgcagctcaaagacccaactaaacgtcaagggcgttttcgatgcggcaataaaggtggtgctgcagccacccaaggcgaagaagaagaaaaaggcgcaaaggggggcgtgctccattttgtgatctaatcatcagtagacgacgaagaagaagaacgatgaagttgccaggctttattattgttgcgtcttgcttcagcgaaacagcattcatggtccggggatcctagtttactggcagctgcagcaaggcctctttgtcgaggcaatgagcgatccgtttgtttcattttctcctttctgccttgtgattatctcgtgtgactgacaagtcgtggcaattaggtaactttcctagatggtatttcctgtgtttgagaaaaaaaattcttgttatccctgtttcataagtagacatgatgtaatcgcactcagtttattcttttccttcttatttcacttcaatggaaaattatgtttccccttcaaaaaaaaaaaaaaaaaaaaaaaaaaatcaccgagattcttgcagcggggggaggccggcagccccgggctcctctacctcgggcagtcacgctgcagggagaaactcgcaccgcaatcgcgattggtagtgctgagtatctgaagcgtcgtggggagtgtggacggcctgcgaggggattggagtaggttaataaggagtagaatcgaacgcatggagaatctggcgattgtgacgaccctgtgtccgtgtagg

SEQ ID NO: 52596 - DNA, 3519 bp, Oryza sativa
  Clone ID: PAT_MRT4530_54878C.1
ctcgccttcctcgcttgatgagctaaggagatcgagttgaggacaatggccagcaatggcatggcgtcctccccttcctccttcttccctccgaacttcctcctccacatggcgcagcagcaagcggcgccgcctcacgacccgcaagaacaccaccaccaccaccaccatggccaccatggccaccaccatgagcagcagcagcagcagcagcatcaccaccacctgggtcctcctccgccgccgccaccgcacccgcacaacccgttcttgccgtcctccgctcaatgcccgtccctccaagaattccgaggcatggcgccaatgctggggaagcggccgatgtcgtacggcgacggcggcggcggcggcgacgaggtgaacggcggcggcgaggacgagctgtcggacgacgggtcgcaggccggggagaagaagcggcggctgaacgtggagcaggtgcggacgcccgaccccgcgcgtccgcccacacgaccaaaatattataggaaataaaaaataatttcctggttagaataaacacatttttaaaaaaaccaagaaaagattttcctcttctgttacattccttcttccttctccggccaccggagccgtagccgaattgtgcctcttctccggcgaggggagagggagagagggggtgtgagttttgctccttccggcgagtggtctcctccccgcgcggctgaggagatctctcgggacatcggggttggggcggcgtgcatgatggggttctcgctcacgccgatgaagatctccacgaggcttctgtggagcaccagcttccttccgccacaagatcgccgccaccatcgcgtcctcctcctccttcttataagatcatcttctccgccacagcaatctgtaaatatatacacatcgaacgcgacaagcgcgtttgattgattgggatttttctcccctgtcctcacgacaagtaattaaggggcgcgatctcgatcgctagcgttgggaggttgatacgcgatggggtccggccggctcatattgagcacggcgggcgccggggccgcgcagaggctcttcctcggctgcggcgctggcggcggctggagcggagggatggacggcggcaggactatgagccatcgaaggacgaaatgagtgaatcgaatgactggaggccctcctgtcgttcctttcttttgccctatttttaatcgctgttatatgttaattatgtgcaattaaagtgtacgtgttttgtcgtaagttgtgtttgttcaaattgtatgtgctggagatgaccttcgagcacgggaacaagctggagcaggagcggaagatgaagctcgcccgaaagctagggctgcagccgcggcaggtcgccgtgtggttccagaaccgccgcgcgaggtggaagacgaagcagctcgagcgcgacttcgaccgcctcaagcggccgctcgacgccgtccgcgccgacaacgacgccctcctcgaggacaacgagaacctccacgccgaggtcatgtcgttgaccgagaagctgcaagagaaggagacgacgaccgagggcagcgccggcgccggccgttgacgtcccgggcttgcctgcggcggccgacgtgaaggtcgccgtcccggacgccggaggaaccggcgctggaggaggcggcggcggcgttcgaggagcagcaggagcagcaggtgaaggccgaggacaggctgagcacggggcagcggcgggagcgcggtggtggacacggacgcgcaactggtggtcgggtgcggccggcagcatctcgccgccgtggacagcagcgtggagtcgtacttcccgggcggcgacgagtaccacgactgcgtgatgggccccatggaccacgccgcggggggcatccagtcggaggaggacgacggcgccggcagcgacgagggctgcagctactacgccgacgacgccggcgtcctcttcgccgaccacggccaccaccaccaccaccaacacgcggacgacgacgaggaggacggccagcagatcagctgctggtggatgtggaactagatttctcgcgcgcgcgcgcgcgcgcgtcgtcgtgcattcaattctcgtgttaaaaaaatcgttctctttttcatttttccgcttctttgtctgtaatgttgagtttcgatcggctatgagaaggaaggaggtgtatgcatgtgcatggtatggtagggtaacacatcggtgaatcaaatctgtcatggtgatgtacgagaattgaagaacatgggggtagcaataagtgcatggaggcaagtactcttttcaatggcacataccaaatcatgtcgtcgaattgagatttttattagtcttgaattcttcttgaaaaaaaaaaaaaaaaagaacggagatccatgtgggtttcagtgttggcagaaaggttgttggaatcggtgacatgctcaccaatgcaaatagtggcgctgaaggggagggaggcggcgtcggagctgataaacctgaacaaggagacggaggcgtcgtgcagcaaccgcagcgagaatagctccgagatcaacctcgacatctcgcgcacgccgccgcccgacgccgccgcgctcgacaccgccccgaccgcgcaccaccaccaccatggcggcggcggcggcggcggcggcggtggcggcatgatcccgttctacacctccatcgcccgccccgccagcggcggcggcgtcgacatcgaccagctcctccacagctcgtcgggcggcgccggcggacccaagatggagcaccacggcggcggcggcaatgtgcaggcggcgtccgtcgacacggccagcttcggcaacctgctctgcggcgtcgacgagccgccgccgttctggccatggcccgatcaccagcacttccactgatcgatcgatccatggatccaaccaaccaaccaaacaaccattggcaacaacaaactatcttgcagtgatgaagcgatcgacagtatgtacggggtgatgaattaacgatgatcacacaccaacgcaagcgcatgcacgtgtgtggaagattcagacgcatgcatttggattaattcttggagagatcgagcaagcttaattgggaagaacaatgagaaggttgtgtatgatgatgatgctagctacgagtattgaggtgatgaatgcattgaatttttctcttgggtttgaagaggatatcgaatcgaaggaacttgtagatgaataagcgagtgagatggaacgacgtacgtagggttagattttggagttcagtagtagtatattctgtcactttttatctattttttttatttattggggtcttattttttcccctttttctttacatacataaatttgtgaactttgtcagccagtgtttgttgtgtataggtgcatggtgattcttctttcttcccctaatctgtgtggatcatgtccctgtgttgaaaaaaatgttcattaaatttcgctcaagcaatctcacaattccgttgtaccctaaaaaaacaa

SEQ ID NO: 52597 - DNA, 313 bp, Oryza sativa
  Clone ID: PAT_MRT4530_54879C.1
ggaatcccaagcaaaacctttgggggggtctaatttatgcgggtttgggggaagggcttttaccaaagccttttggagaatggccagctttcctttggctccaagggtttggatgaaattttaggctccggtttctgcccaaaaaacatgaggaacccccttgggcccttggtggtgtaattaacaagcccgcaggttttgcccaggttttcgagctctccttgggggaaataattgaagctggggttaacgggcccaacattttggtttaaggggccgaaacgtttaaacaggaaagggttttgtcctggga

SEQ ID NO: 52598 - DNA, 407 bp, Oryza sativa
  Clone ID: PAT_MRT4530_5487C.1
ggttggttgtttttgtgtttcacaggttttttcatttttccggccaaaaaaagaccaatgaccaggttggctggatgaagaagccctaaatcaatcccacgcctgtacaacaaaaacgcggccaaccaacagggggaaacccaccattcctggtggatgaccctcctgctgccgattggtgggcacttactagctttgaagagggggaggccgggatccatgttcattgcaccctgcccggaggtgcttgtcggcccttaggccctcgacggccatccttggactgggggaaaactccactgcctgatggaccaggggttttttggcggggggccccctgaaaagacaagagcaggggcgcaccaccattttgggcggcaaagaccccatggaaatgttggggaggg

SEQ ID NO: 52599 - DNA, 3032 bp, Oryza sativa
  Clone ID: PAT_MRT4530_54880C.1
cgccaccatcgaggcagcgaccctcttgcggccgccgcggggtcgggggaggaagctgctgtcacgtgccctatttacgtcaagccgttcccctctgagctggcggtgtcggaccacctcgtcggttgccttgtggtggcgggaggagcctgtccctacgcggccacgtacctggctggtgatcccctcgcgtccagcatgggggtggtgaaggagctggtcgcatccttacagcgacatgcagagaaaaagctccacacagagccgaacaagaacgccgtgcgcatttgcacacaacgccgcggcagtaggcaggcagcgcaccagggcgacatgtacgcgattaatgctgcccggaggcatgggccgtctggccgccaaaaagtgcagtacgccgatcgttacccaaagcgatcgtcaaatccggggcacggccctttccgccgccgccgaaagggggcctgggtcgccgagcctcacgaggaaatgcccgcccagaagcgccctctccagccggccgactctgacgattccgacggccacgtcccagtcggccgcgccgcctccagccgcggcgggggtggtggagtctcgcacgagtcggatggagaagacgccgcgcgccgggcaagggagccgcctcgggaccagcgggacggggatcccgacgagggagatggcggcggtggagacggaagcggcggcggcagcgacagcgagtcgtctctgaacggcgccggcgacaaggacgatagttatgctctacaggcttacaagaagtaccgagatcggtttgtttctcttcgtcgacgtctcctgcaagatcgtttggaccgatctccccagcggcccagccgctggatgaaatttagtagacgtgtcacccggcatttgcccctgttgcacacgccgacttatatgcgccgggcggcgaccgctgccggtcgcacaaaatcggcgacgcagcatgatccaccctccgagcctgacccggcgcttcggtgtgaaacaccaggaggctagcttcggtgtttcacctcacgcaactcacgttctttgatcaaagccgtactcaaacgagcggcatggaagcgcatcccttgccttggccggtggccgctaccgctacgcagctggtccgagactccgagtacagcaggggtagcagttttcagcagagaaaggaaaagtacggcaggcggccagcctgcatgccccggtggatagccgccaccgccgccagatcctacgggcagagggccagaatgcccgcgcagaagcgccggctctcgtcgtcgccgtcttcgaggccccgcgaccacgtggagactaacgggatgactggtgcttcgaaggccgccgccggcagcggcggcggaggaggaggaggaagcggagggggagttccgctgccgccgaggggaggttccgccgccgccgccgccgccaagcgggcggctgacccgcagcctcagcgcgaaggcggtgagtttttcgtggcgtcgacgtcgaggcctcccatctcccccgcggccggccgcgatatgcatgtcgcgttcggggtctccgtgcgaatatggctaagaggcttgtgtgtttcgatgggcttggcagattcggacgcggagttcggcggcggcgtggacggcgacagcgagtcgtcgcagagcgacggcgacatggacgacccccctcgcggtgccacgacccgaatactagctccggttcgtcgtatagtacttcggtggttctgcgagatgccgccatgccggccggagctggttcataatagtgaaattagcagaaatacgaaaggaggtccaatgccctatctgtttagaaataatgaatgcccagcatgccgcactcactgtgcaagtagacgttctttgagggatgatcctaattatgatgcattgattgctgccctatatccagatattgataaatacgaagaagaggaacttgctttcagtgaagaggagaggagtcggaacaaaaagatccaagcaacaattgaggaaacaattcgaagacagtcagaggcagttggtaaaaagcgttccacagccaaagcaactgccactgtttttgcaaggaagtacaggagaaatatgcgaacgcgtggtagaggtaaaaccattgctcctgatatcgcccctactggctcagacaacgaggatagagaagaaggaaatgccattgataccaccaaggagtcatcttctgctgatgaccgctcttcagatttaatgccaaaaagaggtaggaaaaggcccgcatcacgagcatctcctgctaggaccattggcagcagtgaccatgtctttgaggagaacgatgagctgataggcggaaaagaaagtttcaccacgtctccattgcggggggagatgcttgcatggggcaaaaatggaacacgaagccaaacaagacatggcagtgttggtggttcaaatggcagaatggcaaagggtggacgcgttgcaaagttggtggaccacctccgtactactgatgatatggataaggagttcattgctctgcagttgtctcggcaagttgaagaacttgatatctttatgaggatagaccactgcaatggaagtgttacaacacaggactgcactacaggtgttgcaaaaatgcgtttatctgatggcctggaaagaataagggaggataaacttctttcagagcttcatccttcttttacttctcatcacggtgatctgagattgcctgtacgtcatggcgacgctcgtgtagggggccagcacggtgtacagcgtgtgcactgcccgcacggtgtacatcgtttacaccaccctcacgacacggggaagcggaaggcaccgtcgctggtgccgccgccggagcgagccgaatatcttgagaaggactcaaatgaagaggacgaggacctccaaggctccacgtgcaccagccgcccttccgtgctgcgcaggatctcgcccaacgccgtgaaaaaactaactcctgacaacggttggtttttcgtcaccgggatt

SEQ ID NO: 52600 - DNA, 443 bp, Oryza sativa
  Clone ID: PAT_MRT4530_54881C.1
tcttgggaatgaaaggatcaccatcaacgagcgagtcttcctcctgcaatctgcaccatcaagattgcctctgttcagcgttttttctcacgctttttcttcgtcttttcgtgcgcacttttctgacttattttcttttccgtggcggcgaggcctcacgaacgcgatgagatgctcgatcggtagacaggagggagggcatgcggcggaggcgacagcgtgttcctgcccttcgccgcacaacgcccacaggctccgtaactgtacacggtatggacatggcacgctcgatccttgtaatttgtactctactaccgtgtggcgttggactgttctcgctgtcaggtgtcaggcccgaccgcccaactttgagaggacctactccccactcgtagtatttgtaccgtctcataaggctatttacaatgctcataggtgacgtt

SEQ ID NO: 52601 - DNA, 172 bp, Oryza sativa
  Clone ID: PAT_MRT4530_54882C.1
agcaatcagaatgcgcagagttattttactgttgctaacggcatatcttggattaatggacagtggtgaaaaattacacctaagtacagagttgcttctgttgttgttttcttggtctaccaaacattatgggagggtccataactgaatactgtttgctagtatgtactaa

SEQ ID NO: 52602 - DNA, 410 bp, Oryza sativa
  Clone ID: PAT_MRT4530_54883C.1
gaagatgatggaaaattttcattcattcagggaatcaagacaaacaaaatgattgatgataagactcccacaaaagaagccaacgcaggagcggtggttggagatcttgtcgtgtttgaggggctcagagttgtggtaatcaccgtcgttgttgtcggagctgtcgttgttgttgttggcgtaaaccaagacacatcgttccaataaacattagttactgatgtgaacccgagaaacgcaacagcattcgagcttttggcaaccatgaaagatcctggcggagaaagggtggacgctgacgaacgattgaatgacagctggtacgtgttgccaccagacaaaggaactgcgtaaagctcccttcgtgtcttttactctggacggcaactgggtgctggttggcttaaaca

SEQ ID NO: 52603 - DNA, 2304 bp, Oryza sativa
  Clone ID: PAT_MRT4530_54884C.1
atgaacgtacttgacactcttgcagtgcagttttatttcaagggaaattttgttgtgcaaggtaaagagaagagttattgtggtgggagggaggcaatgtcttacatagaccgagataaagtgtcccttcctgagttagtaggacatctacgagaccactacgaagtaatggatggcacgcttcttcactggttggtgcctgggggagagctagatgatgggcttcgggcattagtagacgacaaggtgtgcaatttcatgtcggactgcatttgtgagggaggtgtagctgagatatatgcagaggagccaattctggttgatgtttcagattgtgaaccagatttgcaaagcatacatgagcaggaagaacatggtgctatccaaggattggaagacaatgttgagtctgagaagaggctggttgtttacaaacagcaagaagagatgtttaattttgaggcagaagatgatagtgatacagacagtgattacattcctggggatgagtctgaatcagatgaaggggaagaggctgagagcatcaaaaagcagtacaaacaactgaagaagaagataaaggcagggcaagcaaacattctggatgatgttgcttttgaggggtataaaaccaatccagtcatgcaggatggtgctgaagaaggtggtaatgaagaaggtgactctgatgagtccatagaggagataggcagtgatggtgaggttactactagagcaagcaattatgcaaggttcaaggaagattcaactgttccacattttgaacttgggatgaagtttaactccaaagctcagttcagggcagccattacaagatatgccttgagtgaaaggaaggtgatcaacttcatcaaaagtgatccaaaaagagtgagggcaaaatatgactggtccagctgcccttgggtatgtttgttgtcaaagacttcaaggtctgacagttggcagatagctactctggacaactgtcatgcatgcccccccagaagagataataagcttgtgacctcaaggaggatagctgagaagtatggcaagtttatatttgccaacccttcatggaacttggcacacatgaaggctacagtgcaagaggagatgtttgctgatgcttcaattgggaagctaaaaagagcaaagcaattagtgatgaaggcagctttagatgcaactaaagggcagtaccaaaagttgtatagttatcagctagagcttcttagaagtaatccaggcagcacaattgttgtgaacagagaggtgggaatggatccacctgtattcaagagaatatacatatgcttaggtgcactgaagaaaggattcctagcaggttgcaggaaagttatagggcttgatggttgtttcttcaagggtgcaactaatggagagttgatctgtgctctaggaagggatgcaaataaccaaatgtatccaattgcttgggcagtagtccacaaagaaaacaatgaggaatgggattggttcatggatttattgagtagtgatttgcaagttggtgatggggaagggggattctcaatgctgttcaaaaatgggctccaatggctgaacatagaaattgtgctaggcacatctatgccaactggaagaagcacttccatgacaaagaataacaaaagaagttttggaggagcacaagccatcatgaacacacatccccaacatttgagtagagcttggttcaagtggatcctagaggcaagattcttcccaattataaccatgcttgagacaattagaagaaaagtaatggttaggatcaaggaccaaatagcaaactccaatagatggaacacagttatttgccctggtatattaaagaagttgaatgtttacattgccgagtttgcattttgtcatgcaatatcaaatggggctgaggcatatgaggtgaaacatcatgagcatagatttacagtgcagctagacaaaaaggaatgctcatgcaggtattggcagctatctggattgccttgccctcatgctattgcttgcatattctacaagactagccaacttgatggttacattgctgactgctactcagtggaaacatttaagaagatttatgcacactgcctacagccactagaagggatgagctcttggccagaggatgatagacaaccactaaatgctcctgggtacatcaagatgccaggaacgccaaagacagagaggagaagagaggctcatgaacctgccaaagcaactagggcaagcaagattggaacaatcatcagatgtaggaaatgcaagtag

SEQ ID NO: 52604 - DNA, 292 bp, Oryza sativa
  Clone ID: PAT_MRT4530_54885C.1
tccttccataatattctaataacagaaatcacggatttcacttgctcgcccgacaagcgctaactaccaacgattgcgtttcgcgatcaggtacaatagtcaacagcgttgaccacccaaacaacacaactggatttcggttaaaacatagtcgttcatgtcgtctattcagctctcgttttccctccgggtttcttccggtgtaaagacggtccatctcctgcgctcctgggacggctacatcggccagctccctctctcctaggacaagtcgtcgtccaagtcaggttcc

SEQ ID NO: 52605 - DNA, 1401 bp, Oryza sativa
  Clone ID: PAT_MRT4530_54886C.1
atgtcgatggtggcaccgcgatgggcagaaggcgggcgggccgcagggcgctcgacggcggcgagtctctcccacgagctaggtcaccgggcggcgctacggcgcatcgatgggcaatgccgcagcgggcgacggtcggccgtcgacaaaatgcctccaaatgctgtacatcctgtagtgtctgaggatggtaggtttggttttgctcttgtgattgatgggatttccgaggtcgactacgatcttggggataattacattgcttccttttttcttgatgatagaggagatgcggcattggctggacttcgtgtggcagagcgtgcctattggaaggaatttgtggacagagtattgaaagataccagcagcattgatataactgcgtcaaatatagctgttcccacaaggctacctgtcgagctgcaagtcctgatcaaggttatgatccaccagattcttaacactcagcctggagcaatccctccactagcatttcattggtgttgcaatcagcttcttcagcatttggtgaattcagtaagaacccaaggacagccaactgttgaaccaaatgtacatggacatcaacgttgcaggggtgcaggttggtcatcggggattcccgaacgattggccgatcgaaatgtttcagaagatggaggtattggaggagttgattcgaggaggaacattagagagatgaatggtaaaattaaagagacaaatgcaagtcgtgagtcaccccgaatcctcaagcctactggtgagccaaacccatccactggtggcatacggattcagaataatcggcaagagcaacctgcagaaatgaccattttccatccatggaaaaacattactgatagaacatcagcttatgagctaagccatattgacaacttggttaatcatgaagatgatgagacaaagaggcagaaagaacagagtgttcacatcactctgttgtatgagatcaacctcatcaacgaagagcttttcgataccgtgatcagtatcaccggtcacaaacatggtgggacagtgatcaaattcagctacaatgcagtgtctcttgcacaagacatggagctaccatttgcagcatacggaacgtctcctctcaagccggcgaagctatttgtcccagctgattatcctcgaagctccccggtgtacgaagatggtgatgaacagcaccagggaatgtacagcgtgatttcaggcatggttgacaaggtgttccagcgtgccctgcgtaaactcccggtgccaatgtcgatcagggacatggcccggcagtggggcatctccgtgcgaacggtcaccaacggtggaggaacgttcagctccgggtatggccagtgggagagttgcaccgatgagtttgcaagtccatag

SEQ ID NO: 52606 - DNA, 1823 bp, Oryza sativa
  Clone ID: PAT_MRT4530_54887C.1
ccgccgcgctcgttcgtcgtctcgtcaacgaagcgaagcgccgtcgcgacttgcgtctctctctccccaaagctcggcagccccgccgcaatccgccgccgcgtctcgccggcgcaagctccagattagtgggtccacatatgaccttttctgggatggacattgctttaaaagcaagcacacactcttctacatcccagcaacactggttgcattcaaccaggtaccggtgtcaatatggtttgggttccactcacttgaatggaagaaagagaagtcctatggtactgtctgtaagagctgtttctgggaaatcagacttagatttcagtgatccttcctggaaggacgagaaaaacaggactgatggtggtagtttatcagcagataagtggaatggctatgtaaataaggatgaccgtgcacttctgaaggtgataaagtatgcctcccctacttctgctggagctgagtgcgtagatcctgactgcagttgggttgaacattggattcatcgtgcagggcctcgtaaggagatatactatgagcctgcagaagtaaaagctgctattgttacctgtggaggcctctgccctggtttaaatgatgtcattagacagatagtatttacattggagatctatggggttaagaacattgttggaattcagtttggttatcgtggattttttgagaaaggcttaaaagaaatgcctctttcacgtaaagtggtggaaaacataaatctttctggtggaagtttcctaggtgtgtctcgtggaggagctaaaactagtgagatcgtcgatagtatacaagccagaagaattgatatgctttttgtaattggtggaaacggtagccatgcaggagctaatgctatccatgaggagtgtcgtaagagaaaactgaaagtgtcagttgtagcagttccaaagacaattgataatgatatactattcatggataagacttttggttttgacacggctgtagaagaagctcagcgtgccatcaattctgcctacatagaggcacgaagtgcatatcatggaattgggttggtcaaattaatgggaagaagtagtgggttcattgccatgcaagcttctctttccagtggacagattgatgtctgcctaatacccgaggtatcttttacactagatggagaacatggtgtcatgcgacaccttgaacatttactggaaaaaaagggattttgcgtggtttgtgttgctgaaggtgcagggcaggatttactgcaaaaatcaaatgcaactgatgcatcaggaaatgtaatacttagtgactttggtgtccacatgcaacagaagattaagagtcatttcaaggacatcggtgttccagctgatgtaaaatacattgatccgacatatatggtccgggcctgtcgtgcgaatgcatctgatgctatcttgtgcactgtacttggacaaaatgctgttcatggagcctttgccgggttcagtggtatcacatctggtatttgcaacacgcactacgctttcctcccgatcacagaagtcatcacaaaaccaaagcgcgtgaaccccaacagcaggatgtggcacccctgcctcacttccactggccaaccggacttccactgaattggagttaatttagcattatttttgctaatcatgagactagtaacagctcatgttaccacaaaggtgatcaataaataatgttgtaacgcgatgacaagtaactctggtagtttattttcagcaccaatatttttgtgtatctcaatgctgaaaagattcctttttcttcgaaaaaaaaaaaaaaaa

SEQ ID NO: 52607 - DNA, 484 bp, Oryza sativa
  unsure (1)..(484): unsure at all n locations
  Clone ID: PAT_MRT4530_54888C.1
gggtaaacgcaaaaccgggcgccggcggcgggccaagggcaacacaggtgggcgggggtcacacggaggggggcgcctacaagtggccgtatcgcatagtgccgggggcgcccacggcccgggaagtaatgcggcgttacgcgcggcgggcaaggcgcgcgcgtcgtcagcgccagacgcttcccccgctcccggtcccgcctatgcggtggggcgtattcggcgcgcggnccgccccgcgccgttttggggcgggggcgggggttccattaaggtccaggtctggctcgtcggcttttgcgtcttcgatcgtggtgggttgcgcacgcggcgcaggttgggggcagccttccccacccccgccggcgtggtccccttccccgtccccgtccccagcttagctggcgtcgtccccgtccacagccacgccatcgagccgtgctgtgtatatgcaccggagaggaagaagagagagatgagatag

SEQ ID NO: 52608 - DNA, 249 bp, Oryza sativa
  Clone ID: PAT_MRT4530_54889C.1
atggaggcatcgggccgcgtcgacggcaacggccgcacgccgttgttcttcaccttttcccctggcatggtggtggtgtacggacgaaagagagggaggaagcatggggtggtgctcgtcgccgacgaggactaccatgcgtttgtgcagcagccagtgcagcagtttaggcggcgggatgcagtgagcacgggcaaccacattggcggcaatagggcaacaatgttcttgagtgttgcatttgattga

SEQ ID NO: 52609 - DNA, 2826 bp, Oryza sativa
  Clone ID: PAT_MRT4530_5488C.1
tacctgccaacccctagaattccgaaaatgcccctggaccccgactcctcgccggcgccgccgcaccgggactggttcttcccgccggcgccgcccttcctcccgtcctccagagcccgaacgccgagggcccccttcccctccacctcccgctcctccaatccatactccttcccggaccgccggccgcctcctaccccgcgctcccgctcccgctcccccctcccgccgccggagcagcagaagcagcagcagccgcccccgacgacgcctcctcccgccccgcgccgtcgcgacccccggtatgctggcgtccgccgtggcgatgtccgaacgctcaccgccgagaaagcggcggcggcggcggcggttcctacggccgcgcaggtgcacgggagcaagtcagcggcgtcggcgaccaccctccgatggtcagggatggtatccgtggcggctattgtgctctgcttctcttcccttgtccgcagtaactcctcgctacatgatcaggtccaccatttgaaggctcagcttgcggaagctactacaaaattgcagtcttgtattacagagtcctcgatggatatgagtagcatattatcatatcagagcaataacagtacttcgcagaacagaggtcttaagaatttctcattgctgctctcgctttctacgctgtacgccccattactcattcttaagtacatggaccttttcttaaagctgaggagttcgcaagactccgaagaagaagttcccataaacaagcggttggcataccgagttgatatatttttatcacttcaaccatatgctaaacccttggttctacttgttgctacattgttacttattggtcttggtggcctggctctttatggtgtaaatgatgatagccttttagattgcctctggctgtcctggacctttgttgctgattcgggcaaccatgcaaacgcagaaggctttggaccaaagttagtttcagtttcaattagtatcggtgggatgctggtttttgccatgatgcttgggcttgtaacagattcgatctctgagaagtttgattcactgaggaaaggaagaagtgaggtcatagagcaaagccacacgctggtccttgggtggagtgacaaactgggatcattgctgaaccaaattgctattgctaatgaaagtttgggaggaggaaccattgtagtgatggctgagaaagacaaagaggaaatggaagcagacattgctaaaatggagtttgacttgaaaggaacagctataatttgtagaagtggaagccctctgattctagctgacttgaaaaaggtctcagtttctaaagcgcgtgcaattgtggttttagctgaagaaggaaatgctgaccagagtgacgcacgcgcattgcgaacagtcttgagtttaactggggtcaaagaagggctaagaggtcacatagttgttgagcttagcgaccttgacaatgaggttctagtcaaacttgttggtggagaccttgtggaaactgttgttgcacatgatgtgataggtcgtttgatgatacaatgtgcacgtcagccaggccttgctcagatatgggaagatatccttggcttcgaaaactgtgagttctatattaaaagatggcctcagttggatggtatgcaatttgaagatgtgctcattagctttcctgatgccattccatgtggcataaaggtggcatcttatggtggcaagattattttaaatccggatgacttttatgtcttgcaagagggtgatgaggtgctagtaattgcagaagatgatgacacatatgccccagcgccattacccaaggttaaagaagctgtttacatagacattgttcaccccgaaagaaatcctcagaagattcttctttgtggatggcgacgggatatagatgatatgattgtggttatgagaggttacctacctaaagattttgttgttcccaagtctcctgaaagaatattgttttgtggttggcggcgtgatatggaagatatgataatggcctgtccatttgaaaatgtactcgatgcttttctagcgccagggtcagagttgtggatgttcaatgacgttcctgagatggacagagaaagaaagctgatagacggaggcctggacttcagtcgtctagaaaatattactttggttcaccgtgaaggaaatgctgttattcgccgtcacttggagagcctccctttagaatcatttgattctatactgattctggcagatgaatctgttgaggattcagcaatccaagctgattcaaggtcgcttgcaacactactgctgatcagggatatccaggcaaagcgacttccattcagggaggcgatggtttcacatgttactcgaggaagcttctgtgaaggttcttggattggggagatgcaacaagcatctgataaatctgtcataatcagtgagattctggatcctaggacaaaaaatttattgtcagtgtcaaaaatcagtgactatgttctatcaaatgaactagtgagcatggcattggcaatggttgctgaagatagacaaataaatgatgtcttggaggagctatttgcggagcaggggaacgagatgcaaatacgaccagctgatctctaccttcgagaagatgaggagttaaatttctttgaggtcatgctacgtggtaggcagagaaaagagattgtcattggctaccgtcttgtggatgctgaacgcgccataatcaatccaccagacaaagtttcaaggcggagatggtcggccaaagatgtttttgttgtaattaccgagaaagaatga

SEQ ID NO: 52610 - DNA, 2769 bp, Oryza sativa
  Clone ID: PAT_MRT4530_54890C.1
atggagttcaccacagggacaatgggcaccctcctcccaaagttgggcaagcttcttaaggaagagtacaacctaaggaaaagtgtgaaggaaggaatcatattcctcaaggccgagctcgagagcatacaagctgtccttgagaaggtctcaatggtgccactagatcaacttgacacacaaatcaagttctgggctagggatgttagggacatatcctacgatattgaggacaccattgataccttcatgctgcatgtcaatggacttgagccaacaaacacaacttcacatgtaaagatccaccacaaaatagccaacgacatcaaatatctcaagaggcaaatcaaggaggtgatggatagacgtgataggtacaagattgacgatattgttgctaaacctcgaacagtgattgaccctcacctcttggcattatatgagaaggccaccaatcttattggcgttgataagccagctgatgatctaatcaagatgctatccatcggggatgagatatcgaggaatctcaaaatggtttctattgttggatttggaggattgggcaagacaactcttgccaaagtagtatttgacatgcttaaagggcaattcgattgtgccggttttgttcctgtcggtcagagacctgacatcaagagagtttttaaggacatcctaattgaagttaacaagcacaagtacatggtatttgatgcattggcattaaatgaaaggcatttaattgatgaactccgagaatatcttgacaataggagccccttccattcccatgctgataggtatctgattatcattgatgacatatgggagacatcaacatggaaaattattaaatgtgctttcttagatagtaacagtggaagtagagtaattgcaacagctcgtatttctcaagttgccaaagaaattgctaaagaatttggttatgtttacatcatgaagccactttccatcaataactcaaaaaagttattctatagcagaatctttggtgctgattacaatggtccaagtaataatcaaccggctgaggtaactgaaaagatcttaaagaaatgtggtggcgtaccattgtctataattacaatggctagtttattggttcataaaccattggaggattggtccgacgtgtatgaatctattggttttgggtctacagatcaaaatgaagtagttcataacacaagaaagatattgtcttttagttactatgatttgcctttatacctaaagacttgtatgctccacctgagcatatatccagaagatcatttgatcgagaaagactgtttgatatggaagtgggtagcagaaggatttatccgtgaggaacaagggaaggggttattcgagactagagaaaggtatttcattgagctcataaataaaagcatgatccaaccaacagaacaaaccctttttggctgcaaagtggatggttgtcgtgtccatgatatgatgctggacctcatccgcatcttggcaacagaagaaaactttttaaaagtactgcatagagggcatgagcagcagagcccatctttgcacagcaaaacaatccgcaggctagcacttcataagagtcggaaccaagataactttgccataggcatggagcagctgagattgttcaatgccatcgagtgccctattaacatgacttccccccttgtgaactcccacgttctacgtgtgctagccttagaaaattgtgttgtcatgggaggttgcctcaagcatctcagaaaactgcttcagttgaggtacctaggattgagatacacacgtattgatgagctcccaagtgaaataggagatctaatgcacttgcaaacactagacataatgaacaccgggttagaggcactcccagcgacaattggcaagcttaccaagctgatgcgtctgcgtgttgacaatggcacaagagttcatgccggggtagcgaatctgacgtccctccaagagctgttgctaggaaaaatttccgatgacacctgcccaaactttgccgtggagctgtgcacattgacagacttgagggtgctcaatatttggatcaagatggaagatgagggcacattgaacacactagtggagtctctgcagagtctacgtagaattcagaacctaaatattcgtctcgacataaaggacactggcatggagacaaagtactccatgatgtgtatttgggaagactgggagcccccacggcagctccgtgagttctatctgagtggttggactggtttcttgcctcgactaccggcctggatgaactccaagcgcatcccgaacctctccaaactggacatgaaagtgcttgccatggaaccatgggacctagacacccttgggagaatgccgatgctccactacctccgcaggcgtatttgcacgaagatatcttcatggacggttggttgtggattgttcccaaacctgcgatactgcatgatgaacatagagctcaagtttctgcagggagtgatgccaatgctcatggagattgaattttatgtgtcggcgtcgagccttggtgttcccaacgacgttggattggggaacctcccactgctcaactgtgcccatatttcccttgagtgcaagggtgcgacagggaggcaggtggaggaagcagagattgaactgaggcgctatcacccgaatcgtcctgccatttatgtgttccgcttagatgaagttcgattggttttgttagtcatcatgatcatttga

SEQ ID NO: 52611 - DNA, 666 bp, Oryza sativa
  Clone ID: PAT_MRT4530_54891C.1
ctccatccgtttcacaatataagtcattctaacatttcctatattcatattgatgttaatgtgatgatccccttttcttttttttttactagcaatagtgcccgtgcgttgcaacgggaaaaacaccatttgatagtggcaccatgaaaacgctttcggcccagatcttcccaagccgacccaaacttgggctggctcatcttcagcgagctgagtcaatttgacggcccgcaagccgagcagctgagcgcggcccacatatatgaggacggtccgatgcacttccgtggcccattgggcgcagcgtaattagcagcggcagcggcccaacgctgggcaaatctgagccatccgatctaatggatggctccgatcgtccccgcgtcggttgaagtgccaaccggaagagaggggcaaaaccctagctcccaaatccctctctcctgatcccatttctctccagcgatgagcgagcggaacgacggtgaagacggccccggtgagctagtgcgcgcgtgcggtgacgaccgccgagcggctcctgctttgttggctgaggagagggaggcacccaagggcggcgaaaagccgtgccacggcatcggcggtccggctaggcgtgccacggtgacgagcgccaagcggaggggaggaggtggaggggaa

SEQ ID NO: 52612 - DNA, 378 bp, Oryza sativa
  Clone ID: PAT_MRT4530_54892C.1
ctcgagcccacacaaaacggaacaagttttttttccaagggaaattaccaaatgcaaacggatttacaaacggaagaaattaactgccccctaaaaacagtatccactaaaatttttcctgtcccaaattaaatgagtgaatcacatggctttgttgctgaaaaaaaatgccaaaaatgtggggagatcggcggggggcgggtaccaacacttgaacttggccttggaggggcccacctgagggacgttaacccgaaaggccttggcgaggacctatgacggcacgggcggggctgctgaaaaaaacgttgccagaatggcctgggggccctggagctggctgttaaaggagcacattacagcgggggggccctggcc

SEQ ID NO: 52613 - DNA, 231 bp, Oryza sativa
  Clone ID: PAT_MRT4530_54893C.1
atgcagggttgccgcgaacgtagtgttcctgatgagttgtaccaaatcggtacgttgaggctacaaggctacaagctgatcgaaatgcagggttggcatgaaagtagcgttcctgacgagttgtaccaaatcggtacgtcgaggatacaaggctacaagctgatcgaaatgcggggttggcgtgaacgtagcgttcctgacgagttgtaccaaatcgatgataaaacatga

SEQ ID NO: 52614 - DNA, 384 bp, Oryza sativa
  Clone ID: PAT_MRT4530_54894C.1
atgggtggtgagcaaggatgggcatcggtagatctggcggcgtcggtggcttcccatgacggatccagcggcgaccacgacagatctagcttcctgtggcggatcctcgggcgactgtggtgtcagtggcgtcccacgacagtggtggtagagaaagaggctcacccctcctctcctccttttcatctggcgacggcggtgatggtggagaaggccggtgaggagggtgaggtgatggccggcatagaggacaagactttagttcttgatgttcatgtgttcatggtgttcttgatgttcttgtttgttcggtctgttcatgtgttcttggataccggcacctttgagtcctctcaaaggtgccgcctactgggtgtcagctag

SEQ ID NO: 52615 - DNA, 163 bp, Oryza sativa
  Clone ID: PAT_MRT4530_54895C.1
caacgatagagagattgtgacacccctcctactcatgcttgttgctgtttagactaagatcatacggggtgaaaaggtttgtcgtacttatgtatctgaaggtccttgcgattatattgtggaaataaagctgtcctttccttgtgtaaaaaaaaaaaaaaaa

SEQ ID NO: 52616 - DNA, 1749 bp, Oryza sativa
  Clone ID: PAT_MRT4530_54896C.1
atggacacccgcgtgccgcccgtccccatgggccgcgcgatggcggccgagttccggcggcgcggggacgacccggacgacgtgcaggggacggtggcgcgcgtgctctcctacatccactacgccctccccgacccgcccgtctccgccgccgcgcgcctctacgcgctcgccccgcacgacgccgtcgaccgcatcagcgccctccccgacgcgctcctccgcagggtcgtctcccgcctccccgtcaaggacgccgcgcgcaccgccgcgctctcccgccgctggcgcccgctctggcgctccacgccgctcgtcctcgtcgacgcccacctcctctcctcctcctccgccgcccccggcgctcccgacgactcctccaagaaggcgcgggaggcggcacgcggcgtcacccacgccgtgtcccgcgtcatgggcgcgcacccgggcccgttccggtgcgtccacctcacgtccagctgcatggaggagttccagggcatgctcgcgaactggctccaggtgctcgccatgaagggcatccaggagctcgtcctcgtgaaccgcccgtggccgctcgacctgggcctccccgccaccttcttcggcatggccacgctcacccgcctctacctcggcctctggaagttccccgccacggctgacctcccgcgcggcgtctcgttccccaacctccgcgagctcggcctctgcagcgtcgtcatggacacgcaggacatggatttcgtcctcgccaggagccccgtcctggagacgctctgcatcaaggggaacctgttcaggatgcgcatccgcctcgccagccgcagcctccggtgcgcgcagatcatcggctcctcctacgaggagatcgccgtggtggacacgccgtgccttgagcgcctcatcgtctccggcacatggaggcatgacggcgcctcctccggcagcgtcaagattgggaatgcgccggctctgcgcgtgtttgggtacttggaccctgcagcgaacgttcttgtggttggcaaaaccgccatcaagtccgcgacaaaggtgagcccaagcaatatggtaccaaacgtcaagatccttgctctggaggtgcgtttcggtgtccgcaacgatgccaagatgatccccaatgtcctcagatgctttcccaacattgagaggctccacatcaagtctggaaaaactgatgaaaccactggcaagctcaacttcaagttctggcaggagtctggtcccatcgagtgcattcggtcaagcatccagatgattgttttccatgattttcatggcactcggagtgaggttaactttctcaagtttttcttcgagactacgcgggtgctgaagatagtggtcattttgtttgacactggaagtttttcttcgatggatgagagccctgccggtgctgagctgaagaagaagcaggagccagttgctggtggatttcgcattgctagggcgcagccgtgcatgaggatttcgggcggctgttttaagccgtccgccagtgaaaatgtgatatttgcagagccactgccactggcgggagtggaggagtcaatctgctgccagccctccttctccttgccaagccgccaccatcgtgggcgttcttcctcatcgccgctcctcgtcaagcggcggctgccgcctgccatcctttttgtcgccgccttcggccctcctccttgccgaactatcgctgctctttgtagctgggcttgcacgcggtaa

SEQ ID NO: 52617 - DNA, 196 bp, Oryza sativa
  Clone ID: PAT_MRT4530_54897C.1
tttggatctactgcctatgacactctcggcagggcgaatttggcgtgtcatgattgacactcacatgaagggtggctctattggttgagctactagcaactatactagaaacatgtgttcctggatagagatatacatcggcggacaaatactagtgagatcgatacggtcgcaatgaaaatggagcacatgtacc

SEQ ID NO: 52618 - DNA, 297 bp, Oryza sativa
  Clone ID: PAT_MRT4530_54898C.1
acggcacgagtgctactcctccccctctttaccttttctacctcctcggttcggttccgtggttcgtctatggtttagttgggttgagatgtgctggcgccggatgtcgagtacctgctgcttcgtcgtgctgtgcctcgcctgtgccacctgacgacctgctccctcgatgcctgccttctccacctacggcgagatcctcgactccaagatcatcaacgacagtggagacggggagtgtcacgtgggttttggcttcgtcaccttctcctccgagcagtcgatgcgcgacgccat

SEQ ID NO: 52619 - DNA, 2035 bp, Oryza sativa
  Clone ID: PAT_MRT4530_54899C.1
gagacacaaatacaaagctattccacctaaaagaaaatgcaagaagaagaaagaacttcatctaggtgttgcaaacccatccaggtgttgcaaaccacttctggaatagcttcttccaatctagagaaagtggaagagctgaacatttctttcatcaaagagttgggcacaatcataacctaaaccaattggatgatctgaattatgctcatatttgctttatcccgaaaaaagaagatgctacttcacctaaccattacaggccaataagttagtacacagctttgcaaagattgtctctaagattctggccaatggactcactccgacaatgcatgagatgattaacatcaatcaaagagccttcataaggaaaagatcaatccatgacaatttcatgtatgtccagaacttggtcaaaaggcttcataggaaaaaattcaaaacactcattctcaaattagatatttcaaaggcttttgattctgtaagctagcaatatcacattgaagttctgacacaattaggttttggcactagaaggagaaatgggatttcgacactcttccaaaagtctagttcaaaagtgctcgtaattggcattcctgggcagcccattaaacatgcaagaggcctaagacggggtgaccctctctccccttttctcttcatcattgcaatggagccactcaataatatcatgaaactagctgaacaatcaagggtaatctctccccttggaattggaaatttgagattcagaatctccctatttgcggatgatgtagcattctttgtaaagccagactccacggagattgaaaacctaaaagttctcctggagctctttggggaagtttctggcctacgaaataacattgccaaaatagagatcctccctatagcttgtgcaaacatcaatatgcaacaaatattttagaatttccatggcaaattgtcttccttcccaacaacatacttgggccttcccctgcacacaaggaagctaaacaaaatttatttcctaccccttcttgaaaagatctcctctagactactgggttggaagagaaactttggtcaaatatattctatcagcaatcccaacctatcagatgaccaccttgaaaatccccaaattggtcatcaagaaaattgataaacttagaagatctttcctttggaaagggactgagcctgaaaacctcagatggaaggatgatcagaggccttgggcccaaatgaaactcccttgcaatgaaaaagacaggcatttgttcctcttttggcatgacaactggcttcaagaccaatgtccaaaagatattttgccagatcttttctcactagtgcaacggaagagcagaactgttgcaacataactctctaaaaactcttggttaacctctttcaggcagatcacaaatgtggagtccattcatgaacttgtccaactaggaacaatgctctctctaatcactctggaggaaaacactgaagatgacatatcatcatccttgaattcttcaagatgtttttcaacaagaagtgcttaccaagtacattttctaggatcagtgatgaacccctctttcaagatcatttggtctgctcatgcgtagcctaaacaacattttcacggatggctaatcttacatcaaaaagcacttacaaccacaatctactcataagacactaaccttgtaattgcatttgctctctctgctgacgggcattagaggacactgttcacctttttagggattgtaccttcacaagacaggtttgggagtcaatctcaacaatgcttggtctacctactaccccacggggatcagttcctgagtggattgcccctcttacatcttcggcaaatgcaacacaaagcaaagcaaaattcaatgccctgatctcaacttgatggcatatttggaaccaaagaaatacaacaattttcaaacaaacatccaattcctttgtggatgtagcaacgctaatcaaggaagacatagatttacggaattttgttttcaag

SEQ ID NO: 52620 - DNA, 231 bp, Oryza sativa
  Clone ID: PAT_MRT4530_5489C.1
atggtgggcggcggtgctgcgcccggcggcggccagcggcggcgctcccggtggcagccgccgcgggcggccggagttgccgtgtgcggcggcggccggcgggggcgtgcccggtggcggctgtgccctcacgactgccggactatagaggggttaccaactggaagtaaaaaggctttctccaccagtgattgtctgtggaagtatacatacatggaccccgtttggtag

SEQ ID NO: 52621 - DNA, 648 bp, Oryza sativa
  Clone ID: PAT_MRT4530_548C.1
acggaaagtacatggccgcctgcctgatgtaccgcggtgacgtcgttcccaaggacgtgaacgccgccgtcgcgacgatcaagaccaagcgcacgatctagttcgtcgactggtcccccactggcttcaagtgcggtatcaactaccagccccccaccgttgtccccggcggcgacctggccaaggttcagcgcgccgtgtgcatgattgcgaactcgaccgcgatcgccgaggtgtttgcgcgcatcgatcacaagttcgatctgatgtacagcaagcgcgcgttcgtgcactggtacgtcggtgagggaatggaggagggcgagttctccgaggcgcgcgaggatctcgctgcgctcgagaaggactacgaggaggttggcgccgagtccgcggacgtggagggcgaggaggacgtcgaggagtactagacgcacgctcgttgtgtagtggtgcgtgaggaggaagtgtttttgtgtccattgctgcactgcgcgtggttggccgttggcgaccccagcttgcttccactgccttgcgggggcgtggctgctacgttggggcgccgcctcgcgcgttgctgcgtgcgctggacgtgcgcaatcatatgatgtacgtagaggtgtgcgtcaaaaaaaaaaaaaaaaa

SEQ ID NO: 52622 - DNA, 180 bp, Oryza sativa
  Clone ID: PAT_MRT4530_54900C.1
atgtgccaaccgcacagacacatgttacagagagggaagcggagcaccaagccgaccgtcgctacgagagaccggtcaccaccgggtttacaacaccaccacgaagcggagactctaaaaaacgacgccctcacgaaggttgtggtgccgaaagacgccgttgtcatccgtccaaagaac

SEQ ID NO: 52623 - DNA, 278 bp, Oryza sativa
  unsure (1)..(278): unsure at all n locations
  Clone ID: PAT_MRT4530_54901C.1
cccagcgtccgcgagagtttcaagtaataaaattttgagtagacgagggctaaacaaatgaataaatgaaaattataacaaaaaaaaaaaaaaaaaaaaaaaaaaaaaaaaaaaaaaaaaaaaaaaaatgacggccaaataaaaaaaatccaaacttacaatacacatacatgcaactttttttctatgagaggagtgggcctaaatncattttactgtcctataaaaaacaacttcttnattttaaaaaccctctctttacctaactaaataacctt

SEQ ID NO: 52624 - DNA, 375 bp, Oryza sativa
  Clone ID: PAT_MRT4530_54902C.1
ctccccggccgttttctcccctccgaggcccatcccggtggagctggtcgcccgtgcagtggcccccgtcaagcccgccttcctccgcccgccccctgtccgcgacgcccctctggttgatggctaggcctccggcggcggcgcggtggtctcggtgaatagcccaagcgccagcttgagcgcgagcgcttatcttgaacagagctcttcctcgcttgctttgcgtccggtgtgggcggtagtggctcccgtgcgctcttgcttctatggcgctttcttgcgcgcttgtccttgtctttgatgcctatttgtgtcacaggcctgctgtccttgttgttgcttgcccgtttacctttgtggaccgggggggttcgt

SEQ ID NO: 52625 - DNA, 1571 bp, Oryza sativa
  Clone ID: PAT_MRT4530_54903C.1
ggcagccgccagcagcggcgacggaggagagagcggcgtcgcggcggcggcggcgatgtcggtgtcgtgcgggctggagtgggtggtgtgcctggggtgcacgcggtgggcgtggaagcggctcacctacatcggcgcctacgacagcgaggcgtggccggcggcggcgccgggggagttcgagcccgtcccgcgaatctgccgcgtcatcctcgccatctacgaggacgacctctccaaccccaccaagttcgcgccgcccggccgcgggtacgccggcgtcgacctcgccggcgtcgtcaagcgcgccacctacgagcacgtcggcaacacctgccctccctacatcgtctacgttgaccaccgccacaaggaggtcgtcctcgccatccgcggcctcaacctcacccgcaacgccgactacaaggttctcatggacaacaagctcgggatgcagatgttcgacggcggctacgtccaccacggccttctcaaggcggcgcagttcatcctggagagggagacgaagacgctgcaggagctgctgcagcagaacgggcccgactacaagctcatcttcgcgggggcactcgctgggctccggcatcgccgcgctcatgaccgtgctcgtggtgaacaaccggaagatgtttgggaacataccgaggagccagatacgaacggaaggaatcatgtagctggagcttgtgctctgaagcttataggagacctttattatgccttggacagcttgccctgcttgttgtttatcatgtgcctgagagatacatttaagcaagacaagagaaaatttaaagatccaagaagactctatgctcctggtcgaatgtatcatatagtcgagaggaaattttgcagatgtggaagattccctcctgaggtgagaactgctattccagtggaaggccgatttgagcatattgtgttgtcatgcagtactacttctgatcatgcgattgtatggattgaacgagaatcagaaaaggctttagagcttatgaaaggaaatgagaaaccaacaactccgcctgcgcaacaaaagatggaaagactgcagagttttgaggaagaacacaagaatgccctcgagagagcaaagaccttagatgttcctcacgcagttgacttgtctgaagtggagatccaggagggttctagccctacgccgccctctgatactcatagtgaagccacctcagaagcaaaatctgcaggaagaaccagttgggatgagctgatgcataagcttttcaccagggacgaaggtgggaagcttgttgtgaaggaggacattaaggcgaggaacattgttattgagtaataccgaccctcagacttttgatctggtaattgattcttttgcgtgcatatacagaagttcaacatgaaaatgttttttttttttttggatcgagccattttgcggtacgaaaactgtcccgtgtatatgtagacctatctgtgcattcttgaatccccaaagttttgttaatttacccgtacatgttttctatagcgtccccaagcaataaatcataatttattcggac

SEQ ID NO: 52626 - DNA, 492 bp, Oryza sativa
  Clone ID: PAT_MRT4530_54904C.1
aaaagaattgaactctatttgagaatctccatccgaacttggggaggaagtgcaagccttccaacatagtcatacatgtctccttcccgagttcatacatttgccctagagggtcttcagatgagttggagttgtaaatagataacctcaagaggcagactagtgtggatgcaactgagatcccccacagtactgcatgtgcagtactacatgcagtactgcagactaccctgatccgtgtgtggatgccctaagaacccaagattctccgatttgaaattttgggtaagacatgaaggggatgataggaatggaccatgtcccatacatgtcatgggatttggttaattaactactacatacaatcaaaagctaaatgtattttattttttgactctatttggaatcaacagaaacgtttgggcaagcgacggagctccatcccggcgagaaggcggcaacgggcgtggtgctcaagcccggagaggggat

SEQ ID NO: 52627 - DNA, 436 bp, Oryza sativa
  Clone ID: PAT_MRT4530_54905C.1
ttttatcgagagagtgtctcaagtgatgagccttctgataattcgaaaaggagaaaacttcattcatgtaaaagcagcatgtccccctcacccccaaaatctaggaacaggtaactatatgtttacagcatatttataatgtagattaatgctgttaaaaatgtgcgaattagcagttagcttcaacatgtttgtagatggtattgttttatggctggcatcattagttaatcctaaaagttgtttttatgtttggcatcaataatgtggctgacatacttactctgttctggttatctggaagccacaaattgcttagcatttgatgttttttaaatcatgaatacggctagtcatgccatggtttttctatgatttccatcctttctccccatgcgaggataagagatttttgtttttgtgtgtgtgttggggt

SEQ ID NO: 52628 - DNA, 515 bp, Oryza sativa
  unsure (1)..(515): unsure at all n locations
  Clone ID: PAT_MRT4530_54906C.1
cctacccccccccccacccccccccccccctctcctccccccccgcccccccccccccccccccccccgccgccagnaagaaaggagccggagccgnaacaaagcaaggcacctgcccacacctgaagagaagaacccacgccgcatcctcgagggagaggcactgcctcgccgcatgaaccgatatgggctccccgccgaagggcagaacaagccggattatgtccttgccctcacctgcgagaacttccccgcaaggcgcctacagaccctagacttcaaggccggcatggccaagtccatccaccaagctcgagtcctgatcaggcaacgccacaccagggacggcaggcaaagtgtaacatcccgccgctccaggagagggctgagtctgagaaacacactgacttctcaccgacaagcccatccggaggaggcccccccggtagggngaagaggaagaaccagaagaaggcaagcggcggtggcggtgatggtgaggaggaagatgagga

SEQ ID NO: 52629 - DNA, 2871 bp, Oryza sativa
  Clone ID: PAT_MRT4530_54907C.1
ttttttttttttttttttttttttttttttttttttttttatttgaagtttcgatcaacaacatttgcaaaattgcgacagcacaaaaaaattcagtacagtttttttagcaactaaaaacaagagcaaatttgctcaaattgtcccagataactctataaagcttcccaaatagatcactggaatagagcgcaaaaagaaaagcacagagaattgaatgggtcacgatgcatgcggtatcattcttcagctcaagccttgcggttgccggatgatgaacctttctggtctaccgggtccttgcttccaaccaagtctctgtaacgctgttcccagtcatctagcttcccgtttgatatgtcagcatgaatggcccttcggatgccttttacaaccaaaaagtactccaccataaggatgagcggtatgaacatcttccagcgattgttgggatttggaccatctattagcttttgatcaacatgaatggatttgctcccgtttgagacaacagtagtaatctctttcatcaagttcggaatccatggagttccatcagggagaaccttctctccattctcattagttttgcaccttccactgttctccaccaatgcaattggcaagggaaaatccccaagttctcgtttgctgactcctgcaccagcacgaatgtatcgcaaaagtgactcagatctttttgtaaagaaatcgttatagtcaagtccatcaggtggtgagagctgagcatgtgttaatacaaccaatgttcttcgccaaatggcctttccaaatgaattggtgacagctctaataacttgatcatccaacgtgtccattctgtatgcatccaatcgatccacataaaggaggacatcaatagtcttgcccagaagaaacctttttatgatctcaacagcctgctcattgatgtatccaccttcaatgagcccaggagtgtcaataatgttcaaggtgaagcctgccctggtgcgagaacacatcatcggcctgagaccctcggactggaaggcgctgacagtagcgaccctctcgccaacgatggagttgacggtggatgacttccccaccccgcccttccccatcaccagaattgtcaatgtgctcacattctcctccttgagcttgccgaggagctcgtgcagcttggtctgggtagccgccggaaactgctgcagccccacccactcgcggggtatcggcgccgccgacatatccgccctcaccttccttccttcccttcccttcccttcccttccccgggagatgcggatgccggcgagaggcgggcggttatgccctagcggcggaggagcggcggaggatttgcggcgaggtcgaggaggaggggctcggtgtcgggggggttttggtgaagggaagggataaggagaggaggagttgtacttttcggaggaggccttgcagccgagccgccacatcgccgacacggcgagctcggtggccacgtcggacacgcggaacatcttcttcacgagggccggcattgcgagggcgtggccccgcgcgctcgcgcggccttccttcgaggcgagcattgcgtcgagcaccgccagggccttctcggacacgctcttgtcggcgtctacgagggcctcgatgagcgttgggacgagccccgtggatgctaccctcgccgcgacgcgctcgtcggagctcgccaggtggtaggtggcgaccatggcagccttggtggcctgcgggcagatcggagccttgatgatcacgaccagcgcgtcgacgaccttgtcgaccttgtcatccgccaggtccacgaacgctccgtcccgcgacacggcctccttgatcgccagcacagcgttcagccttccggccaagctcccgtgcttggcaatggcgacgagtgaacccatcgagctagacgaggccaagaccctggccgcctcctcgtccaacggcatcatgcagaccaatgccgccaggacgtcctcgagaacgcccgcctccccggcggcggcgagagactcgaacgccgcggccagcacgcgccccgtgccgacggacacgaagcaccgccggttccgctcgctgtccctcgcgagcgcccggaccctggcgaccgccccggcggcgcgccccgccgcgccgcgccgcgccgccgactccgcgacgtcgaacagcagctcggaggcctgcacgggcgtggcggggatcttgggcgtggggatgcgctccacgccgcgggaccggttggcgacgcaccagtcctggatgacgcggcggatggcgtggttggggacgaggtcctcgtgccggagcggcgcgtgggtgacggggcacaccgcgcgccccgtgtccagccacgcctcgatcccctccctgtcgtacgtgatccccgtcggcgccgtcaccgggtcgcgcatcaggtccagcgagatcgggcaccggaagtgcgccgggatcgccagctccgccgccgcgccgccacccctcttctgcagcagcggcgccggcgccttcgccatcaccgccttccgcgccctccgcgccagcagcgccatcccaaactctcgatcgatcacccgagaccgagtcgccggcgccgctgcggaggaagaggccgccgcagccacagccgctgccgccgccgttgaggaagatgtcactgccatcgctgccgccgcagccaccgtggaagagcccatcgctgatggcgctgccgcggaggaacgaggtcgcgaggaggaagaggatgcgaacattttcgccgtgcgcgcgcgagagggaaagatgactgagattgggaataaaattcgctccccagaagtaaggtacgatatatccggagttggaaaccagatctattga

SEQ ID NO: 52630 - DNA, 237 bp, Oryza sativa
  Clone ID: PAT_MRT4530_54908C.1
atggcgaacgaggtggacgtcgtggggacgtctgacttcgattgggttgagcactcatcttggttttatgacaatgaggcggtgacaaaaacaacggcgacctccatctttggcttcgtcgccagatccaactcctaccgaggtcgcagcggccagacttggtgctgcctcggctccagcctgcatctccgccgctttgtcttcttgctctctctagcaggacagaaactccaataa

SEQ ID NO: 52631 - DNA, 487 bp, Oryza sativa
  Clone ID: PAT_MRT4530_54909C.1
cgggctgcaggaattcggcacgaggggcgcatttctcttattgcacagttacccctgcttccagcaacagtgaagagacacataatacattaaaatttgcccacaggagcaagcatatagaaataaaggcttctcaaaataagataattgatgagaagtctttgataaagaagtatcaaaaagagataacctgcttgaaagaagagctgcagcaactaagacgtggtatgatgggtaatgggtacattcctccaacagatcaagaggatcttgttagcttaaaactgcagcttgaagctggtcaagtgaaactccagtcaaggctagaagaggaggaagaagcaaaagctgcattgatgggtagaattcagaggttaacaaaattgatattggtatcaacgaaaagttccatatcctcaaatgtttcaggaaaggctagcctccgtcgacggcattcatttggggaagatgagcttgcttatttgcc

SEQ ID NO: 52632 - DNA, 435 bp, Oryza sativa
  Clone ID: PAT_MRT4530_5490C.1
gatagcaaatccgtttagtcttattaggaaatgtcatacatgaaagaatgtgattgacaaaaatatttttttagccttctgatttgcagatgctttattggagttgtgctgctcctcgcgacaaacatgaaatggagaagagaagggtatactcacatgcatatattatatattgatatttggcctattgtagaaactattggttttaagcatacatgccctaaaaagcatatggtttctatagtaagggttgataactccatattgatatgttctcttagaaatacatgaaatagaaatttgtgtgacatctagaaaaacaccttgattcacctttctaaaatgcttccagttatgtttaactaatgaactctggataaattaaacttgctgatgcaaaaccataatggatttgtaaaaaaaaaaaaaaaaaaa

SEQ ID NO: 52633 - DNA, 591 bp, Oryza sativa
  unsure (1)..(591): unsure at all n locations
  Clone ID: PAT_MRT4530_54910C.1
gggaccccgaaaaaagctttaaagatggcaattaggcatatgttgtatacctgtttttccaaaagggtggggggctgatttggataaaaagccccaaaaataaaacccccccaaaacacattgggggaattcgattcccccagtaaaagcaaaaaaaatgccctttcccaagggaaccaaaaaaaatttttttaacaacaaaattggctgggggaaattttttccggcccaggtttttttttggtaaggctttattttgggggtttctttaagggggtcaaaagggggcccaaaggtttttttatttgttggccccttggttggcccacttcctgggagggggggggccggattttaaaaacacgtccccaagggggaattttgggaacaaaaaggggggcctcttggagacatttaaacccggctccatggctttgggaacacccccattggccccttggttgaaccaaatggttgcccagggggggatccttaaaggggtttttttggcctttttcgttttttttttnnnaaccngntttttcttaccctctttttttttttttttttttttttttttttttctttctt

SEQ ID NO: 52634 - DNA, 510 bp, Oryza sativa
  Clone ID: PAT_MRT4530_54911C.1
gcacgagggcagaagcaagaagtgggcttaaattcagggaattatatgggaaatttagagatgtgcgagttccagaaatgtatctggaacaaacaagaagacgagtccttatcatggaatgggttgagggggaaaaactgtcagaagtcagagaccaatatttggttgaggtcggagtatactgctcactttctcagcttttggaatatggatggaccatgcagatccacatcctggaaatcttttgcgtacagttgatgggaagctagcgtatttagatttcggaatgatgggagaattccgacaagaacttcgtgatggatttattgaagcctgtcttcaccttgttaaccgtgattttgatggtttagcaaaagattttgttactctcggtttacttcctccaactgctcagaaagatgaagtgacaaaagcattgacaggtgtatttcaaaatgctgttgacagaggggtgcaaaatataagctttggagatctgtcagggaatct

SEQ ID NO: 52635 - DNA, 473 bp, Oryza sativa
  Clone ID: PAT_MRT4530_54912C.1
acccctagaaaaacttatcccaaaaatggtcctttttggggcgccagagtggctggcgccgttgttcaacaggacggcgccagcctctttggcgccgtccccctgccgacgtggctgggcgatgttgaggaactcacaggaaccaaccacgtaaaaaataaactcaaacggacgaaatatgtggcatgtggaattttccaaagctccaccgaaaaacttctctccttgaaaacacaatcttgcaagcggaatttggaggttttaatatcgctgaacccggcagagcggggagaaacggatgtaactttttctgtagatgtccgtgcatatattatttgcctgattccgagtccatggacaggaatggaggcggcggggccagccatgctgtcgccctcctcctgccacgtcggttcgcgtgcgccacggtggcaggaggacggcgccagagaggctggcgccgtcccattgga

SEQ ID NO: 52636 - DNA, 481 bp, Oryza sativa
  Clone ID: PAT_MRT4530_54913C.1
gggaaaaatttcatttattaaaacaaaccgccaaaaactattccaaattttataacaggacccccccaaagaggggggaccctttttttaccccaccataaaaaaagggggggccccccccccaaaaacccgaagggccaaaaacaactttggggggggggggggggcccccaggggaaacccccccccggggggggaaaaggaaaacccccggggccggggcccgaactgggggccccccaaaaaaaccagaaaaaaacgggccttgggggaagaaaaaccgcccccgggggcaaaaacccgggaaaagaaatggggggcccaaaaacccaattgggggaaaaaattggggcccaaaaaccggggaaggggtaaattggaccccgggggaccgcccccaagggaggccaaaggggcggcacgggggccccacaaaccaatggcccgggttaaagaacgggggaaaaaaaggggggtgggg

SEQ ID NO: 52637 - DNA, 306 bp, Oryza sativa
  Clone ID: PAT_MRT4530_54914C.1
gaactcacaggaaccaaccatgtaaaaaataaactcaaacggacgaaatatgtggcatgtggaattttccaaagctccaccgaaaaacttctctcctcgaaaacacaatcttgcaagcggaatttgggagaatcagatgtaactttttctgtagatgtccgtgcatatattatttgcctgattccgagtccagaaacaggaatagaggcggcggcgccagccatgctggcgccctcctcctgccacgtcggttcgcgtgcgccacggtggcagcgacgacgaatcctactgccattgagtgctaca

SEQ ID NO: 52638 - DNA, 352 bp, Oryza sativa
  Clone ID: PAT_MRT4530_54915C.1
gaactcacaggaaccaaccacgtaaaaaataaactcaaacggacgaaatatgaaatatgtggcatgtggaattttccaaagctccaccgaaaaacttctctcctcgaaaacacaatcttgcaagcggaatttggaggttttaatatcgccgaacccggcaaagcgggggagaatcggatgtaacattttctgtagatgtccgtgcatatattatttgcctgattccgagtccagaaacaggaatggaggcggcggcgccagcatggctggcgccctcctcctgccacgtcggttcgcgtgcgccacggtgataggaggacggcgccagccactctggcgccccaaaaaggac

SEQ ID NO: 52639 - DNA, 525 bp, Oryza sativa
  Clone ID: PAT_MRT4530_54916C.1
cgctctcttcggtctctcttcccttctctccgggagatcagttgctgttgtggtgttttcttcatctaccgtcatcatgcagaacgaggagggtcagatggtggacctctacgtccccaggaagtgctcgaccaccaacaggatcatcaccgccaaggaccatgcctcggtccagatcaacattgggcatgtggatgagaatgggctgtacgatggccgcttcaccacgtttgctctctctgggttcatccgtgctcagggagacgccgacagtgctctggataggctgtggcagaagaggaaggctgaggtcaagcagcagtagatgttgctactagttttacctgtaagaactcgtttcgatttcatgtctctagctacttgatacaatgcctgttatttcagctggtactctgaaagctttaaggcttgactttcctggggtaaatcctgataatgtgccatccgagttgaagctttttatcacaaagggaggggtgggggggggggggaaaggtggcggcc

SEQ ID NO: 52640 - DNA, 622 bp, Oryza sativa
  Clone ID: PAT_MRT4530_54917C.1
atgtgcctagactatacggtgcccggtgtcctcccagtcacatgctccttcggttttcacgcctccccgccgataattatttttaaataatttaacagatttaatacagtataattctgataatttttacataactttcaaaaatcctcaacccctagaaaaacttatccaaaaatggtcctttttggggcgccagagtggctggcgccgtcatccaacgggacggcgccagcctctctggcgccgtccccctgccgacgtggcggggcgatgctgaggaactcacagaaaccaaccatgtaaaaaataaactcaaacggacgaaatatgtggcatgtggaattttccaaagctccaccgaaaaacttctctcctcgaaaacacaatcttgcaagcggaatttggaggttttaatatcgccgaacccggcgaagcgaggagaatcggatgtaactttttctgtagatgtccgtgcatatattatttgcctgattccgagtccaaaaataggaatggaggcggcggcgccagccatgctggcgccctcctcctgccacgtcggttcgcgtgcgccacggtggcaggaggacagcgccagagaggctggcgccgtcccgttgga

SEQ ID NO: 52641 - DNA, 702 bp, Oryza sativa
  unsure (1)..(702): unsure at all n locations
  Clone ID: PAT_MRT4530_54918C.1
ggggttgctggcctcgacgccggccgggtccccccttcaaacgccgccgccgccgccgctctcttcggtctcgcttcccttctccgggagattcagtcgctgttgtggtgtttgcttcatccaccgccaccatgcagaacgaggagggtcagatggtggacctctacgtccccaggaagtgctcggccacgaacaggatcatcaccgccaaggaccacgcctcggtccagatcaacattgggcatgtggatgagaatgggctgtacgatggccgcttcaccacctttgctctctctgggttcatccgtgctcagggagatgctgacagtgctctggataggctgtggcagaagaggaaggctgaggtcaagcagcagtagatcttgctactagttttacctggaagaactcgtttcaatttcatgtctctctagctacttcatgcaatgcctgtgttatcagttcgtactccgaaaaaattcgtgtgacttgatcggtttatcctgataatgttttatccatgttgaagctttattaaaaaaaaaaaaaaaaaaaaaaaaaaaaaaaaaaaaaaaaaaaaaaaaaaaaaaaaaaacaaaaaggttatagatgaatttgcctatgaagcccacataacgcagagaaaggcgttttngtactcgcctttttccgcgcctccgngcttttcctcctcctntcccc

SEQ ID NO: 52642 - DNA, 318 bp, Oryza sativa
  Clone ID: PAT_MRT4530_54919C.1
atggtcctttttggggcgccagagtggctggcgccgtcatccaacgggacggcgccagcctctctggcgctgtcctcctgccaccgtggcgcacgcgaaccgacgtggcaggaggagggcgccagcatggctggcgccgccgcctccattcctatttttctgtatggagttgcaacgccactctggcgcactccccctagccacctcagcatcgccccgccacgtcggcagggggacggcgccagagaggctggcgccgtcccgttggatgacggcgccagccactctggcgccccaaaaaggaccatttttggataa

SEQ ID NO: 52643 - DNA, 1940 bp, Oryza sativa
  Clone ID: PAT_MRT4530_5491C.1
aattgtaattaaagagaattttttgtattacatggaaaatcatcctcataagtcatgacattaaattttgttcagaacatcatgcacaaatgtaaactaaactatagaaaaaaaaacatgcatctgaagttgccactatcattgccaccatcttccatattacagtcatcatcatattcacaagggatctttagatgacagttgtccaccttgcagtaaccatattgccccagatcatgatccatttatcttgtcaaccttataagcattagaattattcttcccttgttgcatgtgatcattctggttcatgtttcctttattcttatataaaatagtctgcttctgtggtagtagctgattttggccataagtttgaatattcttatatataatagattgcttggttggtatcatgatccatttatcttgtcaacaattgaagcaacagccacattcttatttcgatttttccagcttttcaagaatacattagttccaatcttataagcattagaattattcttcccttgttgcatgtgatcattctggttcatgtttcctttattcttatatatagtagattgcttggttggtagttgcaaaaccttgttctgaacatggatatttgtgtcctccattgaattgtcagcgataaagtttgttgtgctgcactgtcttttctgtgcagaaataaccttcctttgtttcccatagtcatgttgttcccaattttgtttgttcttgtcttcaacacattgcttggtttttggttgcaaatcctcatttggaacatggctctgtatattcatcatattgttttcctcctgaaccatatcgttttcctcctcagcaatacaaatttcttgcaagggatggtcagaatacactctcctccttttcgaaatagggccatcaacactagcttctttgtttgtagatactcgatctaaacctccctgattcatttgttctttttccaacttgtttgtcttcgctttcaattccaaaagctcagcatcatgattctggacatgattttcgatcttttccaactgcagtctagcagccacaacatcttcactccagttatcatccagtctagtaacatttatattatgcccaggcttgtcatctccaagtatttggttcaatgcatctcctttccaagcagtccttccttcactagtgtctgctaaagctggttgttcaactacaagtttcttcaaattatccacatgcccatttagattcttgccagttttgcgcttgtgtgtttggatgtacacaatagctctgtgaggattctttgcaggatctttttgtctcttcgatttctcgctcatccaatgattgataagagcaatccactggtcaggaagcacatcagctgggacattgttgcaattagcttctttgctcttattcacatcaaaatacttttcttttagttttgctttatgtcccctccatctctctctaattgtttttaatatgaattcttccatccgaggagcataaaggaatctcatcattccaagaaatttagacaaaattccagcttcatctcctactgcctggttgagatcattgcactgaaccacaatcctaagccttttcggaaggttccaaatatctttcagttttgtcttcccacgtgtttcaattgttccattttcatctcgaacattaatttcaacatcatcatcagattcttcattgccttctccagcattcatactagcatcgtcatcagtatcttcattggcttctccaacatcgtcattagtatcttcattaccctcttgaacatcactacatattgtttcttgttcagatggtgtggcaagctgtttaggggcattttcttctgcaatgtgttcctctgacaaatattcctcatggctttgaacaatgcaccgccttctactccttgccat

SEQ ID NO: 52644 - DNA, 542 bp, Oryza sativa
  Clone ID: PAT_MRT4530_54920C.1
cgcgcgctgacattccgggcgtttgccgtcgacgccgccgccgctgcctccgccttgaggagctcgcccaccgcggcgtccagcgactcctagaaaaacttatccaaaaaatggtcctttttggggcgccagagtggctggcgccgtcgtccaacaggacggcgccagcctctctggcgccgtcccaccgccgacgtggtggggcgatgctgaggaactcacaggaaccaaccacgtaaaaaataaactcaaacggacgaaatatgtgacatttggaattttccaaagctccaccgaaaaacttctctcctcgaaaacacaatcttgcaagcagaatttagaggttttaatctacagaactttttctgtagatgtccgttcatatattatttgcctgattccgagtccagaaacaggaatggaggcggcggcgctagcatggatggcgccctcctcctgccacgtcggttcgcgtgcgccacggtggtaggaggactcccgttggatgacggcgccagccactctggcgccccaaaaaggac

SEQ ID NO: 52645 - DNA, 632 bp, Oryza sativa
  Clone ID: PAT_MRT4530_54921C.1
agttgtcaattatacgtatattcattcgtgatcattatcctttgcttatgaaattatggcgtgctacaagctcttgggatcatccatcgtagtcaagcttttaaaatagtttctgaatttctggatttttcactttttggtcctttgaaaaaacttatttcgcaaatagatccctggaaaaacttatcccagaaatgatcctttttggggcgccagagtggctggcgccgtcgtccaactagacggcgccagccgtccccctgccgacgtggcggggcgatgctgagaaactcacaagaaccaaccatataaaaaataaacttaaacggacgaaatatgtggcctgtggaattttcgaaagctttaccgaaaaacttctctcctcaaaaacacaatcttgcaagcggaattcagaggttttaatatcgccaaacccggcgaagccatggagaatcggatgtaactttttctgtagatgtccgtgaatatattatttgcctgattccgagtccatatgagaaaggggggggggcggcgccagcatggctggcgccctcttcctgccacgtcggttcgcgagtgccacggtggcaggaggacggcgccagccactctggcgtcccaaaaaggac

SEQ ID NO: 52646 - DNA, 303 bp, Oryza sativa
  Clone ID: PAT_MRT4530_54922C.1
gaattcacaggaaccaaccacgtaaaaaataaactcaaacggacgaaatatgtggcatgtggaattttccaaagctccaccgaaaaacttctctcctcgaaaacacaatcttgcaagcggaatttggaggttttaatatcgccgaacccggcaaagcggggagaatcggatgtaacattttctgtagatgtccgtgcatatattatttgtctgattccgagtccagaaacaggaatagaggcggcggcgccagcatggctggcgccctcctccctggggcggcgccagcatggctggcgccct

SEQ ID NO: 52647 - DNA, 108 bp, Oryza sativa
  Clone ID: PAT_MRT4530_54923C.1
atggagagcaagctgatggagccggcggtgaggtacagtcatgttgggctgcggacagaccccaagctcacaactgcattacaaaaggaaagcggaagccaggactag

SEQ ID NO: 52648 - DNA, 634 bp, Oryza sativa
  Clone ID: PAT_MRT4530_54924C.1
aagctagcggcgttgttcagacggctcgtgcccatgaaaactgaacattttgggatccaaaaaaacctgcctttgcttcgccgaagtcaaacagcaaggatggcaatactctcctggatttttcacattttggtccttttaaaaaaattatttcgtaaatagaccccaagaaaaacttcttctaaaaatggtcctttttgggcgccagagtggctggcgccgtcgttcaacaggatggtgccagcctctttgacgccgtccccctgccgacgtggcggggcgatgctgaggaactcacaggaaccaaccatataaaaaataaactcaaacggacgaaatatataacatgtggaattttccaaagctctaccgaaaaacttctctcctcgaaaatacaatcttgcaagcggaatttggaggttttaatatcgccgaacccggcgaagcagggagaatcggatgtaactttttctgtagatgtccgtgcatatattacttgcctgattccgagtccagaaacaggaatggaggcggcggcgccagccatgctggcgccctcctcctgccacgtcggttcgcgtgcgccacggtggcaggaggacgacgccagagaggctggcgccgtcccgctctg

SEQ ID NO: 52649 - DNA, 1864 bp, Oryza sativa
  Clone ID: PAT_MRT4530_54925C.1
tcccctccccccatccctcccccggccatggcgcctcgtccgcggaagcgggtctcgcggcccaagccacgcgccacctcccgcggccgcggcggcggggatgaggaccccttcttcgagtccgagcccaagcggcgccgcgggggcggccgcgacgaggacatcgagagcgaggacagcgacctggagggcgtggcagcggctgctgctggtggcgtcggcgacgatggggaggaggaggaggaggaggaggaggagcaggagacggcgggggagaagaagatgcggatcgcgaaggagcttctcaagaaggtgacggacgcggcgaggaggaggagggaggatgacgaggacgaggacgagggcgaggaagccggccggaggcgggtcgccgatatcctcctcaagaggcaattcgaggagagtggcaggaagcggatggagctcgccgacaggatattacaaccagatcctgaggatggctttaagatgctcgtgaagcaccgacaaccagttactgctgttgttttatccaaggacagtgataagggattttcagcatcaaaggatggagtcattgtgcattgggatgttgaaactggaaaaagtgagaagtatttatggccaagtgaaaatgtcttggtttctcatcatgctaagccacctctatcagctaaaagaagtaagcaagtattagctctagctgttagtgcagatggtcgttacttggcaagcggaggtttggatcgtcacatccatttatgggatgttcggtcacgggagcacatacaggcatttagtggtcatcgaggagcaatatcttgtctttcctttggaccagactcatcggagctattctctggttcttttgaccgtaaaataatgcagtggaatgcagaagacagaacgtacatgaactgcctatttggccatcagaacgaagtcttgacaatggatgcacttagtaaagataggcttttgactgtagcacgggaccgaacaatgcatctttggaagataccagaagaatcacaactactgttccgtgctcctgctactgcatcattggagtgttgctgctttattgatgacaaggaatttttaactggatctgatgatggaagtgttgagctttggagcattatgagaaagaagcctactcacataataagaaatgctcatccagtattccgtaacaaccttaattcgcttgaaaataatgttgaggaaaatggcatacataaacctgaaagtgtctcatcagcccaatcatgggttagtgctattgctgcaagaagaggttctgatcttgctgcatcaggagcagcaaatggttcagttcgtctttgggctattgaacctgattctaagggcattcggccattatttagtttgagactggatggatttgttaattctctcgccatcccgaaatctggacgctttattgttgctggtgtgggccagagcatggaaaccctatccattttcattgattacaatggaaaatatcgccttgactaacatccaatccgactaaaagaagagagcgaggacttgtagggtagtagtagatggttgatgccgaaaaaccccttaaatgttgtaagtcacactaaggacaaatcccttccaccttgcatttttttgcaaccattcccaccgatgaaattcgatacaagaggctgaacgggttaccttcacaagccatgggaatttggaggggttgttacagaccatttgagctgaagaattgagatgtattctgtagaggaagtcccgtcaggcattttgtagcattgcttccttcttaagtttaaagacagatttttttttacgtaaaaaaaacctcgtgccgaattcc

SEQ ID NO: 52650 - DNA, 253 bp, Oryza sativa
  Clone ID: PAT_MRT4530_54926C.1
cgccggcggccgtcttcggtcacgtcgcgccgccgtctccgccgttgccgccgcttgccgtcgccgccaagaggtgcgccgtggtgagaggaagctcggccgcccctcctctttcaccgccgaccaccggagccccttcgccgccgtcgacccgagccgccgcgccgctttttctcgtcgccggccgccgtcgtgcatcgtttgtcgtagtggtgagtaccatcgggttcgtctcgatgccctctacgcgtag

SEQ ID NO: 52651 - DNA, 156 bp, Oryza sativa
  Clone ID: PAT_MRT4530_54927C.1
ctcaattcagtgatgcaggcggcagcacccgcgtgggctccgcccatcgattgctcagctgacgacgagttcgcgcgtgcccagcgtgaagagtgcatgtacacggtttaagttctgtgaggaatcaggttattaggccattgcattctccaattt

SEQ ID NO: 52652 - DNA, 626 bp, Oryza sativa
  Clone ID: PAT_MRT4530_54928C.1
cccgggctgcaggaatcggcacgagggagagagagagagagagaactagtctcgagttttttttttttttttttttttttgacgttccaaactttttcttcaaactttcaattggttcgtcacattaaaaatttcctacacacacaaacttccaacttttcctatcacaccgttccaatttcaaccaaactttcaattttgacatgaaccaaacttctactcctaacattctttggtttcgttacagtcaactgcagacttgcagagaggttggtttgcttcttcagagctccatctcaaatcttaccgagaagtttccaccgagatctgtatagaaaagggaaatccatctctgatcgaattcagatgtgcccgtcagacccagatacgcggatactagcacatgtgaaaaattcaagtcagcgagcaatgttcacttcattccccacttgagtactggagtagtaacgcatatgaacgctcagacaacaaaatctattatattatcaaaacaaagtcttactatctcctagtacttccaaaagtcaagctccatagacaacaccaggttaggtaattaggttgatgaacgatgaaatagatggaaaaagaaaacagctagtatg

SEQ ID NO: 52653 - DNA, 1223 bp, Oryza sativa
  Clone ID: PAT_MRT4530_54929C.1
ggaggtccgaatccgaatccaaaacgtgtagaacttcatctcttgtcttctatggaccaaaagtgacgtggtgaggtagaagtagacttggagaaggtcttggtttggtccccaatcaacttctttgatcatccatgtattcgttacgctcggtctcttttccttcacccaagtaagtacctctagcatatcagctctagaccaaccttgcatgcacgtaagtgcttctgccatttttggtgtaagtctactacgatgtggactaatagtccttccactagtactaaaggttgacgttgaagccacggttgtcactagaattgtcatgatatcccttgcaatcttttgcatagttggatacttgatccatgcaaatttccaccaattgataatgtccaattcttgtctaggaggtaggtttggctccaaaatatccttcctaatagtattccttgacattaacttgaacaacggttgcaatacatcacagaacttgtgaaatccagcatgatcaacaatggaaagtgggtactcatgaagacatatcatcagtgcaagttttttcctcgcaagattttgatcaaagacatgtgtttccagcataactgaatgatgaggacatcctccactattaccagagagcaatttttgacaccaactacatttagctttccacacatttccgacctttacttgtccaaattcttgccaaatagcatattttagttttcttttgttccctactgcaacatcatcatctatctctatcacattagtatctttagagttagtgttgggtgttgtgactggtgctagggaaggagagggtgaaggcgtaggagaggtcacagcaacagcacctccagcaggtgatgagctagttcccggagttgacatttcttcagatacttgctgatccgaggacggagtgggcgggcttgctttcccatgcaccggcatgccgctgcctatgcgccgccactcgtgctccctgtacctactccctctcttgcgcggccgcatgttctctcccttgcactgccgcgtcgtcgcccgttgtccctccgcctgcttcctccctcccttgcaccgctgcttgtgagccgccacccgcgctcccttccgtgcgccgccaccgagagcccgagagagagagagagagagagagagagagagagagagagagagagagggggggggggtagcacgatggcgccgcccat

SEQ ID NO: 52654 - DNA, 751 bp, Oryza sativa
  Clone ID: PAT_MRT4530_5492C.1
aatgacagttgtccaccttgcagtaacaatattgccccagatcatgatccatttatcttgtcaaccttataagcattagaattattcttcccttgttgcatgtgatcattctggttcatggttcctttactcttatatatagtagattgcttggttggtagttgcaaaaccttgttctgaacatggatatttgtgtcctccattgaattgtcagcgataaagtttgttgtgctgcactgtcttttcttaggagcagcagttggttggttttggcctagtctaacatggctctgagcattttttttctctttctttattcttggatgcttcaacaacttttcgtgcattcatcacatggttttccttgttagttttttttttctgtgcagaaataaccttcctttgtttcccatagtcatgttgttcccaattttgtttgttcttgtcttcaacacattgcttggtttttggttgcaaatcctcatttggaacatggctctgtatattcatcatattgttttcctcctgaaccatatcgttttcctcctcagcaatacaaatttcttgcaagggatggtcagaatacactctcctccttttcgaaatagggccatcaacactagcttctttgtttgtagatactcgatctaaacctccctgattcattcgttctttttccaacttgtttgtcttcgctttcaattccaaaagctcagcatcatgattctgcgacatgattttcgatctttca

SEQ ID NO: 52655 - DNA, 1735 bp, Oryza sativa
  Clone ID: PAT_MRT4530_54930C.1
tggatcccccgggctgcaggacaacaccgaaacctacccatggtaaagaaataagtgagaaagggaagccaaatcttcaatttgaagacctcccggcggtatcttctcttccccattttgtgttcatattgaattatgtactggatttcttaacttgaaggtatgttgttctttccaggcaggatttgatatgcacaattttatcaaaattgcctcagaaagaggcaataaggactagtgttttatcaagtaagtggagatccatgtggacgcttcgctcaaaaatatctcttgatggtggagcagtgtgtggtagtcgcaggcgtggtcaaaataaatattgtcagagattcattaataatgttgaaaaagttctacagaattatcaaggaaagatggtggaagcatttggaattaagtttgaatttgacagcattctagttgataatctgaataagtgggttagttttgctgtgtcagcgaggacaaaacatctatcttttgatttagtgcctattagatttgctcgttgtgacgatcggttcatatttccatttgaacttttagacagtggaagcatttgccgtctacaacatcttcaatttagctttatctctttgcaaccaccttcctggttcggaggtttcccaaacctaaggaagcttgagcttaatttggtgcatgttacaagaaaggaacttgagaacatgttgtgcaactgttgctgtcttgagtggttgagcatggtcagatgccatctgaaggatgaccttagggtagatcgtccgatgtcccatttagcctacctgcttattagttgctgtgtcataaccaagatagagctccacgctacaaaactctctacctttatatatgagggtgaatttgttccaattgtcctcaatcatacgtcaaagctgaatctatggtcgttagataactcactgaagttttcctgtctcaaacacatacaattgtttgcgcacatattatctcatggttccgacaaaattctgtacttagcttatgtcatgagggctgcacccttcgttgaaaaggtggaagtgcattttgctagcggtcatagcctatggtttgcacaagaaggcccccttagacatgaacttgggcacgatgaatacaaatatctgaagaacctttgtgttacaggattcaaaggggctagaggacaacttgagtttcttttacatgttgtggaaaatgcaactgcactagacgttataactgtggatacaactgaaagaatgttggaaagtgacattaagaacgactatctctgcagtattgctcgtcagactatcgaacttcatatccgcgaggcactcccaccgaaggcgaagctctttgttctttaggctctgccaaaaagtctttaagcatgcatttagcggaatgtagtggtgtgctcccccccaccctcgatccgtatgatgtgcccggctattcaaatgcatgtctaggtgaagatgtgaggattgggacaggggatttctagatttttgtgtgtgtgtgtgtgtgtaaattctactgaaaggggataaagttcgattgttctgtcgcagtttcggtttctggatatatctgatgctgtctttgtggttataatgcctaatagcagaaaacctgtcttctgacaaacttgaaaaggttgtatatacgactgtttcagttgacaatccagttttctatttccaaaaaaaaaaaaacccacaac

SEQ ID NO: 52656 - DNA, 162 bp, Oryza sativa
  Clone ID: PAT_MRT4530_54931C.1
atggaagaggaggagaggtgccggatcgagggtcgtcgtcctcgttgggaagaaaggaaatggaagcagctggggccggcgagtgtcaagctttatctccgctgctgcatccttgtcgggccactaatgcacagagcattcacaagtcacagagtttgctag

SEQ ID NO: 52657 - DNA, 246 bp, Oryza sativa
  Clone ID: PAT_MRT4530_54932C.1
gcagcacgatcgctttcatcgttggcgccaacatcctcgccggcggcgccttcgacggcgcctccatgaaccccgccgtctccttcggccccgtcgtcgtcaccggatgttggctcaaccactggttctactggctcggccccttgatcggggtggaagcaaagagctgatgcccatccaccacagcatgaaatgtctatcactcatgccagttggcgagcggctcatgagacacctgtgctaaac

SEQ ID NO: 52658 - DNA, 282 bp, Oryza sativa
  Clone ID: PAT_MRT4530_54933C.1
atggaggactcacctgaggatggccggtggggctcggtggcggcggcgcccgggctcggtggaaagcggcgccggtcggaggagacaccgatcgggcaggtcggcaccgggcgggcggcgtcatgctcagtgggggtcggcgacgtgggtcggcccgtcacggatgactcatctgtaacgggccctaagataatgcccgatagagatagattaatctctatcgggcttgaactaaggcccgtcaccgatgactatttttccatttcccagatgaagaagtga

SEQ ID NO: 52659 - DNA, 957 bp, Oryza sativa
  Clone ID: PAT_MRT4530_54934C.1
atgttcatcttccatctccttctcccttcaagcagccggtggttgcagctgctactactcttcctattggatggcattaggaaggatgcaagcaagcagcaggtggttgcacctgctgctccttttcctgttggagtaggagagcttcttccaaatggacttggggatccccgacgtggaggcccgtgtcctgtgaccctggcggaaatgaaacagcgcaggagcacggcagccatgggcacggagggttgcgccggagagagcagcaagtgcgtgaggcggagcgcgagcacatccggccagacgttgaggatgaagggcttctctcctaaatggtgtgagtggatagcttcttttattcaagggggtcatgttggtattaaagtaaatgatcaaactggtaataattttcaaacgtataagggtctgaggcaaggtgatcctttgtcaccaattctttttaatatagtagctgatatgcttactttactaattaagagggctaaagatgtagatgataccattatttttttagagcatgatttacaacaagaaaagaatctgaaattgattttatctgtgtttgaaaagttgtctggtttgaagataaattttcacaagagtgaattattttgttttggtcacgcaaaggagttttatgatcagtattctaacatctttggttgtctaatgaaggtcaaagatactgtcttacatatgggttcttggattgtgaatgatgggaatcaaacaaggttttgggaagataaatggctaggaaacttggcgtttaaagataaatatccatctttatactctattgtccgaaggaaaagttctactattgctaatgttatgagttctgttccacttaatgtttccttcaggagatccttagttggtaatattcaaggcaacatattggctccggttttgggcaaagctgcaaaagtgtga

SEQ ID NO: 52660 - DNA, 357 bp, Oryza sativa
  Clone ID: PAT_MRT4530_54935C.1
atggaggacgaagatggaactgatcgccgagagctaagcaccgcagcaccactgttgttggaggaggaggacgaggagaggcaggagctaatggaggatgacgagggagatgagcaggaggagcaccatcaccacggggcaaagctgcgcaccacggctgaagcgccgccttacggccatggagttgcagaggactactggtggagggatgtgccggtgaggctccctggcgtcagttgcggggcggtgctagcgctggtcgactacgaggcgacgccagcatggtggagtagcagggcagtgctggcgtcgttgcgggccgctgacagtggttggctgcgggacgatgttggctag

SEQ ID NO: 52661 - DNA, 586 bp, Oryza sativa
  Clone ID: PAT_MRT4530_54936C.1
ttttgatcgagtcgtgtttttttttgtttttggttggatgcggcagatttggcggcgctgaggagctccgtggtgtgcaggaacgcgtcgccgcgggcgtcgtggtgcgcggagaaggagaacagcgggcagcgcgacgcggcggcgagggcggcggcggcgcccaagcccgctcgccccgcgggcggcgccgcgaagaacttcatggcgccgaccatctccgcggcgtccaaggcctcgccaaggaagaaggtgctcggggagcgcatcgagcagcagcagctctaccccgtggcctcgtcccccgtcaagcccatggcgtccgaggcgggcgccccgcgacgcctccggctctcgttcgatggggcgcccaatactgccccacccgccgcatccacgccggtcaccgcggcggccggctccaggcactcgttcggcggtgaggaggagcggagggtggagattcccccgtgcaagaaccaccaccacgccacggtctttgacgaccgtgcttccgcggaggcggaccagggtgcggttccgttcgatcccaggacgaactacctgtcgccctggcctcggtttt

SEQ ID NO: 52662 - DNA, 372 bp, Oryza sativa
  Clone ID: PAT_MRT4530_54937C.1
atgagcgacgaggagaccgcggagctcaggggcgagatgccgacgtggttcccgagccttgaggagctcctcgagtacgaggccacggacttcagccccgccgcgcagcgcgagaggttccggcacgagtccggggatgcggcggccgcgctgaggggcgccggcgccggcgccgtccgcccgctccgggagctcgcccgcgacaaacaagaaaccaccattagagcccacattctcaaaccaaacacctcaaatcaacaacaacaacaacaacaacaacaacaacaacaacaaccacaacaacaacaacaacaaccaccaccacaagaagaagaagaagaagaagaagatgatgatgatgatttaaattaa

SEQ ID NO: 52663 - DNA, 622 bp, Oryza sativa
  Clone ID: PAT_MRT4530_54938C.1
cggacgcttgggctttacatcctactggatatagggactacataatattttgattataggataaattagctgtttataaaatctgaattgaaatctttgaagatattttgttcattattctgcttgatgaggttctcagtgtaccagtgtatgataaacactaatcctactatattaggggggaggaggtctatgcaatgtactcagtttttacaccttactagaagcattataaaccaatttgtctgcttacactgttgaagctcttaatttgttaaatcatgtctcaagattaccaagatttgatatggagaaatctgtttttcaatatttttcatgtttcatctgcacgttaattagtaaaactctagtcctttattcttttttgtgcactcttgatttgctattgtttgttgacaaagaggaacttagctgtgtagttgctctagagaaatgaacacaagaaggtctttctgtaaataattttaactttaatgcaaactcttctctgcaagttgtcttgtttggggagaacttctgttatcttggttgaaatgattggtttgttctgcttaatttaatatccatgttattgaatggaataattgccatttgccacttt

SEQ ID NO: 52664 - DNA, 143 bp, Oryza sativa
  Clone ID: PAT_MRT4530_54939C.1
aatgacaatatcctttagatgtcaataggatcactgaggtcgatgcaacactatatacagagaatcgatgaaactaaattttcctcaagcgggcgtagccactgagtgggtacatagttacatacaaaagtgctgatgatttt

SEQ ID NO: 52665 - DNA, 392 bp, Oryza sativa
  Clone ID: PAT_MRT4530_5493C.1
cccacgcgtccgccaagccttcccgttgataggcttaaaaggctggggaaatgttcgattgggtccatttttatgggaggcttcttacttctaacaaggcaacttctaaaggcccttgggtggaaagaccttcccgtcaggttgggccttctttcaagatttatgtgggccatctcccttggcaaggggattactttaggttggttccagtggtcaatgagccttggaaaataatccacccccgaattgggtattacaaaaaaacctggccgttaccaggattttgtttttgaacaattgcctcacaagaaggattggatcaccctcttttgattcctttaatgacatttaatttgaaggtgccttcttcttaatgagaattgtatttttaa

SEQ ID NO: 52666 - DNA, 350 bp, Oryza sativa
  unsure (1)..(350): unsure at all n locations
  Clone ID: PAT_MRT4530_54940C.1
cttggtctttttgcatgtcaatcgccattgtttctgggggnggtttccatctatatttagggtttctttcttgctggccttttgagcgattgagtctgtgtatattgcattagcatgatctgcacacccttcccccacccaccccagaaaaaggaaacaactgcagtgagagtgagctactggtgaacagaacagaacagaagcgcatgcatccatggtgtgtccgtctgcaaaataattaagtggtggcctcgcaaccgaaccgacgaaggatttttgccataaccatatatatgatatgttggtggatgtatagtagtgcaccagcgtacatgaattaaacaaagttc

SEQ ID NO: 52667 - DNA, 215 bp, Oryza sativa
  Clone ID: PAT_MRT4530_54941C.1
gcacgaggcccaagtcgcgtcgcaccgaacagagtagagaaggacaggagcggagcgccatcagctcgtccgatcgagtgatccgattgctctcgctctctccacctctgctgctgctggcgctgccgccgtggcgcgggcgctcgcggcgagggtgacgacgacgaggggttacgccgcgtcggcggcgtcgaccgcgatgaggcgggcggcgg

SEQ ID NO: 52668 - DNA, 983 bp, Oryza sativa
  Clone ID: PAT_MRT4530_54942C.1
atgcgggcgagccggccggtggtgcacccggtggaggcgccgccgccggcagctttggcggtggcggcggcggcggtggcggtggaggccggggttggagcaggaggtggagcggcggcgcatggcggggagaacgcgcagccacgaggggtgcggatgaaggacccccccggggcgcccgggacgcccggcggcctcggcctccgccctcgtgcaggcttatattgccgccgccgcgctcgccgtcatggcctccaccgacgactttcccctccgtctccgccttctgttaccttgttgcagcagccatcttgcaatgcttgtggagcctttcactagccgttgttgatatttatgcacttcttgtgaagcgttctttgcggaatccacaggctgtgtgtatatttaccatcggagatgggatcacagggacactaaccctaggtgcagcatgtgcatcagcaggcatcaccgtgctcattggcaatgacctgaacatatgcgcaaacaatcactgtgcaagtttcgaaactgcaaccgcgatggctttcatcagctggtttgcacttgcaccgtcctgcgtcttgaacttctggtcgatggcctccagatgaggacacagcttgtatttagacataattttgggctgtttgtcagccagatcactcggtgcaacagccaggagaaaacgtagtgcagctaattatactacgaccaagttgatgaatgcctgtgtaatgaaatttggtgtcgaattgtttgtacaaaataggggatagtttgttctgcaagagggtggttgtgaagctctgcaattttttttttttttgaaaacggcatgtttcttgtaagaagctttttgtgatctgaaaacacagagctcaacgtgccgatttgttatgtcattttattattctgatgtgatcttcattcccgagaaaaaagcagaacaccaaaagcatcaaaaaaaaaaaaaaaaaaaa

SEQ ID NO: 52669 - DNA, 771 bp, Oryza sativa
  Clone ID: PAT_MRT4530_54943C.1
atgtccaggaccggccagggtacacaaacgacaaagttgacatacagatccactggggaacacctctccacaggcaccctcgacggcacagacgaagcctactcctcggaaaagccaccatcggaagcatactcgaactctggggcaagaggggagggcggcaccggcaagcgggccccacatgtcgtaggctcggggtgcaccagtccacggtggaccaagtccacgggaccggggaggggtgcaccacgtggcgcgcacgtggcggccacgtgggctgccacacgggcggcggcgaacggccccgatctacccgagggtagatcggacggctgcgagcgctcgcggctggcgcgcacgggcggcttaagccagcccggcggtcatggcgcgcggtggcgcaagacggcgaccgggggcgactggccgacgacggagagcggcggcgacgcggcagtgcgggcagcgctagcggcggctaagcggctaggcagcggcaacgtggctaggcggcgcgacagagagagaggaagggggaggggctcctcaccgacgatgatcgacaacggcgagcggcggaaggcgacgacgacggagggacgtgctccgggacgacctatggagcaaaatgagggagagatggcggacggggtcacgcttgagctcgcgaacccgacggcggcgatggcgaggctcggcggcggctctaacggcggcgagtgtcggccggaggtggctaaagcggcggcggcgggtggtgcacggcgctag

SEQ ID NO: 52670 - DNA, 201 bp, Oryza sativa
  Clone ID: PAT_MRT4530_54944C.1
atgggaggggagagggtggccgacgaggcggcgacgccctgcaccgccacctgtttgtctcactcatgggaggcggcgacgccctgcaccgccacctgctttttggccttctataggctatattttgagggtttatatacacccccacgccccgcgggtcacccacgggtgaaatatgtcccccgtcctctccccgcctaa

SEQ ID NO: 52671 - DNA, 228 bp, Oryza sativa
  Clone ID: PAT_MRT4530_54945C.1
atggaggttgcgccaccgaagctgtcatcgatcatcaggcgcaccaggctcccgaggagactcgacacgatcatggaggatgacagggaggccatggaatcaccaagggctcctcctcgcagcacaagctatgccaaggaggttgtcgacacctcaatgcactgcaccaaaaagggggtattccttgcctcgatgatgaaggcagggtgcctgaagattaaagcctag

SEQ ID NO: 52672 - DNA, 865 bp, Oryza sativa
  Clone ID: PAT_MRT4530_54946C.1
atgggcacaagaggacaagacagttcaaagtttgatggaaaacatacggccaaacatgttctcgaacatacctcagcggtgcaagtcgcatcaacagattataaggttcagataaaggaacatttggtgaataattgtggtatcagaagtaaagctgtcgacaaatggtttcaagcagttactgtggccacaggatttacagctgttgaggttgagaacttctactacattctaacatgtgcccatctatttgaatatttctattcagctgagatcaaagttgactgtgacaaattaaattcttggtttaacattttgatcatatgccaacactatgagtctgacatgattgctaaccacccaaacctttacgcggatccaagtaatgacccaagattctattcgcctgcaagaatcgttaaattggatcaaagtaaagatttgatgctgttgaaagtgagcaagagaaaagactcagtaatcactggccaattggttgcaagagacagagtatatgggcagctgacccagtatttgtggaaaggatacagcatgcatctagttgagctgaatgtagttggaggagcaggttgttctggtgctccagtgctgagtcaccaagcagcagtcattggtttataccatggccgtattgagtctttgggatatgcagtatctgctgcagatatctatgaattttgcctgggagctcaccagctgtgaatttgtcactggtgggagtaggaaaagtaccttttttgtgatgattggtggagtttgtgtgttggtgcagttctgtgaattgggacaactaggtatcttcttcaagatgattggtggagtttgtgtgtttgtgcagctgtga

SEQ ID NO: 52673 - DNA, 759 bp, Oryza sativa
  Clone ID: PAT_MRT4530_54947C.1
aaaagggaacaacaaacagacacggcgaggcaaaaagcgaacgggtcgtaaaaagggaaaaagaaacgaacgggcaaacgcgaacgagtgacgaacaaaacacgcataagaagcgcgaagacgattcaaaggaagaaacagaaggcaacaagaaggaggtagagaaaggaaaaaattggaaccgggaaaacaagcgacgaaatagaaaggagggagaaaagtgtaaagaaggaaatgggcggaatgtaaagagaaaacagaagaaaaaggagagaaaaattagtcaaaccatacagaagataaagaaggcggaagaaagcaaacacagagaagagagaaaaagaggtgagcgaccacagaaacccacggccgcgaaacaaacgacataaaaaaggaggagaacaaagaggaccaagcagaacagagagtagagggggaggatgaaataaaaatagtaaggagaagggagcgacacgcaaaagggacagaagaagtaaaggaaggagagaaaggaaaagaaccagaagatcagggagaaaacggaagaggagaggagaaagaagggaacagattaagaaacccagcgcccgggagagcaagagccgagagagagaggtagaaagaagccgggagggaggagagaaaaggaaaggaaaagagagaagagagaaaaagagaaaaagaaaagaaaaagaaaggaaggaaaaagaaaaagaaagtgaggaaaagaaaagggaaataaataggaattaggaggag

SEQ ID NO: 52674 - DNA, 394 bp, Oryza sativa
  Clone ID: PAT_MRT4530_54948C.1
tcaaaaaaaaaagatgattctctcctctggtcttgttcagtagggatgaaaatggagcggatagttttcatcccctgcggagaaaaataaatacaaatatcttttggatcggataattctccgattgttcgaattcagatacgaatacggatagctaatactaattatatatgttgatatttgtttccattagaagttgagttggttttcgtgctccgagaaaaaaattgttttcgtattcgtatccaatcatattcgattattattcgtattcgatataatccatatttgtttccgcattcgaactatccgtattcgtttctgtatccggaaaaaaaatatgaaaacgaatatgcattatctatccgtatgacttcctttataagtacggaga

SEQ ID NO: 52675 - DNA, 1224 bp, Oryza sativa
  Clone ID: PAT_MRT4530_54949C.1
atggcggcggcggcggcgccgctcgccgacgacggcgacgggatcgtagaccgtgacatgtggctcgcatgcgccgccccgaactccggccgcctccccgccgtcggctcggtggtcttctacttcgtcgacggccacgccgctcagttttgccagttccccgcccctctcctggagcagctcgccgtccccggcccccgcgtcttcctctgtacggtggccgccgtccgcctccgcgccgacgccctcaccaatgaggcctacgccgagatcaccctcgacccggtcgccgaccacgacgtcccgcgcctggcccccgctcccgctcccgcacccgccgccgccgccggtggccagcagttgcgttacttcgtcaagacgctgatgatttccgacttcgacttccgcatccgcttctccgcccccatggctgacgccaaaggcgtcttcccgccgctggtcgacgccaaagcggtccagcccctcctcgtcaaggacctccatggatctccgatgacgttcgactacggcaggaagggcaagagagtcacgctcgccaaggtctggaagaaatttcgggacgacatggacttcgtcgacggagacagcgtcatcttcatgcgtcgccgcgacgacgacgacgacgacggcgagctgtacgtcggggtgcggcgccagcgcacgctcgaaaggccactcaggaatacgatgcgccggtacaggcctccgaccccgccccaggcggccgtgcaggaggcggtactagccgcggcgggtcacgcggcggccggcgagcggttcacggtggcgtaccggtcgcggaaggacggcgacgagttcgtcgtgccacgcgaggcggtggaggaggggctccgcgccagactcacctcgctggcggaggtggagtttgtgtgggccgtcgaggacggcgcgccgcccatcgtcgggccacggggcaaggtcaccgccattgccaccggacagctgtggcgaaatctcgagattgtatgggatggaaactcggagatggacatgagtgccaacttttggcaagttcgacctgttgaggaagttgatatttctccttctactcctcctccgaagaggctcaagaattgtgagattgatgataccgcctctacttctgtttccgtcgacaatggagatgagcaagttccaacgatgaggcaacggctagaggcgctgattcctgataacatctga

SEQ ID NO: 52676 - DNA, 478 bp, Oryza sativa
  Clone ID: PAT_MRT4530_5494C.1
tttcctcgttttcttttctctccatcatcttgatcttctcccactccttccaatctcctctcttttctcctcattttctctttttttcctttttttctcttccagatttctcttctaataaatataagaaattaccattgtttaggtgtatatgtggcaagtttgttactttcgacctcgacctccgcccaccgccgccgccgccgtcctccgcctccttcccgcactccaacggctactacctcccctcctcctcctcctcctcccccaccgccaacggctacttctcctccaagggcaccggaggagtgtgacgtgttctcggggaggtgggtgcgcgacgaggcggcgcggccgctgtaccgggaggcggactgcccctacatcccggcgcagctggcgtgcgaggcgcacgggcggccggagacggcgtaccagcggtggcggtggcagccgcgcggctgcgccctcccggcgt

SEQ ID NO: 52677 - DNA, 261 bp, Oryza sativa
  unsure (1)..(261): unsure at all n locations
  Clone ID: PAT_MRT4530_54950C.1
ggcgnccctnagggggaggcttgaggatgttgaggaagaggaggaggaggaagnggttgccgttnagctggcctcgaagtttcagnncnctttaaggttnacacaggcgcgnttagtanatttttaggataanacttgcactatcttttttctctcttgaatnagctnaaangcgtttttctcccaggttgcacttacactttgatgtttccacaggcgcnctgcagacagatggtttatagccttggnggtttatctaac

SEQ ID NO: 52678 - DNA, 2289 bp, Oryza sativa
  Clone ID: PAT_MRT4530_54951C.1
atggcggcggcggcggcggcgctcgccgacgacggcgacgggatcgtagaccgtgccatgtggctcgcatgcgccgccccgaactccggccgcctccccgccgtcggctcgatggtcttctacttcgtcgacggccacgcagagcagttttgccagttccccgcacctctcctggagcagctcgccgtccccggcccccgcgtcttcctctgtacggtggccgccgtccgcctccgcgccgacgccctcaccaatgaggcctacgccgacatcaccctcgacccggtcgccgaccacgacgtcccgcgcctgctccccgctcccgctcccgccgccgccgccggtggccagcagcagcagttgcgttacttcgtcaagacgctgatgtcttccgatgccgagtaccgagaccgcttcgccgtccccatggatgttgccaaggacgtcttcccgccgctggtcgacgccaaagcggtccagcccctcatcgtcaaggaccttcaaggatctccgatgacgttcgactacggcaggaacggcaacagggtcacgctcgccaaggtctggaagaaatttcgggacgacatggacttcgtcgacggagacagcgtcatcttcatgcgtcgccgcgacgacgacgagctgtacgtcggggtgcggcgccagcgcacgctcgacaagccactcaggacgcgccgatccaggcctccgacaccgcttccggtggccgtgcaggaggtgatagctgcagcgggtcgcgcggcggccggcgagcagttcactgcgacgtaccgctcgcggcaggacggcgacgagttcgtcgtgccacgcgaggtggtggaggaggggctccgcctccgctccagattcactcccgagatggaggtggagtttgtttgggcccttgaggatggcgcgccgcccagcgtcgggccacatggcaagatcaccgccatccacgacactacatggatgtggcgatcagtcgagattggatggacgggaggttcagagatgaacaagtacgccaacttctggcaagttcgattggttggttcggacgattttgcttctgctgctcctccccctcctctttctccaaagaggctgaagagttcagagcagtgcccgtcgcgtccaccagagccccttccaggcagggtgtttctatgtaaagtcacagctgtccgcttggatgcaacaagaaatgagctctttgcgaccatgtccctcatcccagtcgccagagaccaagccatccagcctcaggcgcccgctgatccaggtccaagctcccctcaagtgcagactactcttgtttcatttgtgaagcctctcacgtgcaccgatgctgtcaagaatcggtatcggttcatagtgcccaagagagagaccgccatgggtgttctaccccagctccaattgaacgaacacgtgccgctctatatcaaggacatgcacggaaaggagtgggtgattaattatacatggaaagagtacacccacatgctttccagtggctggataaaattcgcgaatgccaaccgccttgtcacaggtgacaacgtagtgtttatgcgcagcatggacagtggcgagagatacatggggctgcgtcgcaccctcaagccggagccagtgtcagttgacgaagtgattgaggccgtatggagggcggcgcgtctcgagccgttcgaggtgacctacctctcgcgccaggacggcgacgagtttgttgtaccgtgtgggattgtacataatgctctacgagcgaagtttaccccaggaatggtggtaaacttcgtatgggctgttgaggaggacaggctgccgaatgttgggccacagggaaaggtcattgccatagagaactatgcaacctcaatctggaggatgattcaggttgagtggccatcctgtgcaggaatgaacagatatgttaatttttggcaaattcgtgaagttcttggagagagttcctttgaggcatccacttgcattgtgagaagtcaagattactcgccggcaccacagaggaatttagttaatgcgcttcagcttcctgacggaacaaaacagcttcagcaaaacaagaagtctgtttcctcgtcatccaccttccgactctttggcaaaaaaatgacacctggcgtgccaccaagaagagacaccagtggtctttctggacaggtatcattattcagccattatcttccccatgatgaggacgatggacaagttccaacgatgaggcaacggctagagacgctgtttcctgataacatctga

SEQ ID NO: 52679 - DNA, 349 bp, Oryza sativa
  Clone ID: PAT_MRT4530_54952C.1
gaagcagccgcggggaggggggaggggggagggagggaggcaatgggggactcgagcgggtcgggttcgggttccgggtctgtgtcggtggacgtcgagcggatttccttcggcggcaaggagcatcaagtgaggacgagatgcggttcattatccgtcgcgatatacggagacgaggacaagccggcgctcatcacgtacccggacatcgcgttgaaccacatgtcctgcttccaaggatttgctgttttgccccgaggtggcgtcgctgctgctccacaattttctgcatataccacataaatcctcaaggggcacggagctaggagcggctccaattccatccgat

SEQ ID NO: 52680 - DNA, 1671 bp, Oryza sativa
  Clone ID: PAT_MRT4530_54953C.1
acggcgcaaaccgcttcctacgaaaccgcgatctcagccgagcgtgaggcgcggcccaatgggttgaaggaggctcggccgagccattgggccggcgcgggcgcaaggaggcggcccattaggggcgcgcggaagggagagggggcggtccgggtggaccgaacccaccatgcgaggtcccgggtggggcccacatgtcggcgacacggttcacggagggatgggagcacgcgggcgccgtttagggtttcgggtggatgcggctcacgattggtgcgccgggtggaccgaggcgcgacgggcccacgtgcagccgcatggcgcaccgtggtccgtgcgcacggaggggctagccaggctggccggtttgactcggtctagccgagttggcaccgacgtggcgcctacgtggcagccacgcgggccggcgagaggaggaagacgagaccgaccgggagatggatggcgggcggcggcgcgcgtcggcggagcggccgcgaggcgaggcgggaggaagggagaccaccggagggaggaaaaaggagacgtagactccattcctcgactcggatgtggccgggactggacggaggcggcggatttcgacggcggccaccggcggtgagcaaaagggggaaaacacgccgggagagaatggggtcaattcgtggtggcgggagcatctctaggactctgggaacttgttcccagggtcggatggggcggagagactctgagagaggccggcgacggcgaggcgcggtgcggggaagggcggaacgccgccggggagggagaggggtccggcgatcaaagcgacggttcgggagtgttctacagtgatccaggagggtgacaacgaggaggattaggtgaagagctcaccgatggcgcgaaggaaaacggccgggcttcggggagggcggcgccgggtctggaggatggtgttcgcggcgggtagcaccgcgttggccgagcggcgacgcaaggcggcgaggaagggaacaccagcgacggaggaggccgcggcgttgggcgagcgttcttggcctgagaaacggtgcgatggtggagaggctaggagccgaacgagggaggggagtgcgggttttataggtggagatggggcttcgaggggaaggaaccaacgagggcagtcaaggggagctcggctggcggcctcgcggtcaagtggcgacagacggtcacgggaggcagaggatgtgacgccagctgagagggggaaaagcaaaaaaagggggaggggaaaggagctcagctccttgtcgattttggacgaggagagggaggatggagcgcgtgggaaaaaaaggcgctgcctccgcgtctttggacgcgagcgcacagagcagcggggtcgggcggcgacagggcatgggtggtgcaggcgctgacggcagcggcgaccaggcggtcggccaccacggcgcgcgcgcgtggagcagctggcacggccaaatttcgaacggcgtcggcgggaaatcggcgccggtgggggagctcgacgagagagagagaaacagagataacaaagagagagagaatagaaggaacagagagagctctctctctctctctctctctctcggccatggcgcacgcgcgagcacgcgaggggaggagcggcaaggaaggtgggccgaggggagg

SEQ ID NO: 52681 - DNA, 715 bp, Oryza sativa
  Clone ID: PAT_MRT4530_54954C.1
tcagatcattacttctcggctcccagagccattccacttgattaatcggctcccatagcctttttcattttctcggactcccagagtccagcaggaacccggtttgtccgaccccgccccggcgttcccaactattggcatgcgaggtttccttggacggagggaggaaatatggacttttaggccgagcgtgaggcgcggcccaatgggttgaaggaggctcggccgagccattgggccggcgcgggcgcaaggtggcggcccattaggggcgcgcggaagggagaaggggcggtccgggtggaccgaacccaccatgcgaggtcccgggtggggcccgcatgtcggcgacacggttcacagagggatgggagcacgcgggcggcgtttagggtttcgggtggatgcggctcacgattggtgcgccgggtggaccgaggcccacgcgggccggctagaggaggaagacgagaccgaccgggagatggacggcaggcggcggcgcgcgtcggcggagcggccgcgaggcgaggcgggaggaagggagaccaccggagggagggaaaaggagacgcagactccattcctcggctcggatgtggccggaactggacggaggcggcggatttcgacggcggccaccggcggcgagcaaaagggggaagacacgccgggagagaatggggtcaattcgtggtggcgggagcatctctag

SEQ ID NO: 52682 - DNA, 315 bp, Oryza sativa
  Clone ID: PAT_MRT4530_54955C.1
atgaacactaggaattatataggttcaggccacccggagacctggggcttcttccataaacatgtttcatttatggcagagaatgttgcttcacagctggctgtggaatacattcatcacccctacaagccttctgagattgatgcatctcacaagggtataaggagggttctggtcccattacaggccgggacgctgttgacgggcgatccaatcagtctcctggccaaaggagaggccaggaggtggggcctagggttcggccgaaccatcaccgtctcctctgatcctggccttccacgtatacgttgctga

SEQ ID NO: 52683 - DNA, 952 bp, Oryza sativa
  Clone ID: PAT_MRT4530_54956C.1
atagcccacactgccgggacactgctctccccccccgcgcgccggccatggccaccgcgacgctgcccctccgcctcctcgcctccaaaaccctagccttcccctccgccccgtccctcccggcctcgcgatgctccctccccgtcgccgcgtccgcgccccgccgctgctggcggctcctcgcttccgccgaggagccggcgcccgcacccgtggaggccgaggccgaggcggaggtggtagaggaggaggaggttgaagaagaggaggctgcggtgccggagcctgtggaggcgcagatcgcagccgcgggcgccgggaaggacgccgacatcttcgccgttgtcatgattgggtcgagacagtacattgtgatgcctggaaggtatatatacacgcagaggctgaaaggcgccaatgtcaatgatcagataatattaaacaaggtattactggtatcaactagagacaaggcttacattggcatgccagtggtgaccaatgctgctgttcatgcagtggttgaggaacagggacgggatgataaagtgatagtcttcaaatataagaagaagaagaagtaccagaggaaacttggtcacagacagccaaacacaaggttaagaattaccggcataagtggatacgaggacttccctgctgacccgatacttgagtatgttccagcttaagagcaattgtaagttctgtagttacaaacaactggtagtacattagaatacgagtgctaccttttcttgtctggaagaacagtttttgaacaaaatttgctttgttcatgtgttcgagtgctgccagtcatccagttgttccatcctttgtttattccaccatctgttttgttcattctgatattgtgtatcctagccaactgtattattttcactgtgcttaaaaaaagagagagcattttaccaaaaaaaaaaaaaaa

SEQ ID NO: 52684 - DNA, 330 bp, Oryza sativa
  Clone ID: PAT_MRT4530_54957C.1
atggcgatgaacggcgtcggtgacaagcaaacgggaagccagcgaaggaaaacggccgggcttcggggagggcggcgccgggtctggaggatggtgttcgcggcgggtagcaccgcgttggccgagcggcgacgcaaggcggcgaggaagggaacaccagcgacggaggaggccgcggcgttgggcgagcgttcttggcctgagaaacggtggagatggggcttcgaggggaaggaaccaacgagggcagtcaaggggagctcggctggcggcctcgcggtcaagtggcgacagacggtcacgggaggcagaggatgtgacgccagctga

SEQ ID NO: 52685 - DNA, 4116 bp, Oryza sativa
  unsure (1)..(4116): unsure at all n locations
  Clone ID: PAT_MRT4530_54958C.1
tagaggaccgaccgggcggaggatggaccccgagaagcgcggctacaggctccgtatcctttctttttttttttagctgctactgcgtcgttgcgttgagcttctgtttgccaggtcctagaccccaatagccttggacgagtgaggattcgttgtcccattcggcaaagcggctgcggatgttgttgctggcgaatctttagaggcatctttcgctcatttgactccacctactacttgtacacgcgccttctcggggagtgttggtggtgctgctgactttacgcccgattctatttagaagagtaggaacgagctgtaaaaccttgggggctgcaagcttcagctaaacataggggaaagtgaagatgactcaacaggtgtagtaggtgccctgatcacactgctagtcaatattatcaatgagcctgtccttgactggtaccgaagttgtggttttttaggtgtcaaaagcttccctcgacaaagtggctaaagtcaggctgttgtttcttaaacgggagaggaggccatgtctgctcggtcacaaaattgcaccaacaattgcacggactctacaggcgctgcatatgatctgtctcctagccagtacacattgagtatcgggtgtacccagatcctatgtgttatcgtgtattgtgcttctggctgctcagagaaataccagaggtttggggttatgatgaatattcttatgatacatacatcaaatggtgatctggatctaatctgctgtatctccttcattccctttgaaaggaaggttgctggcggcgatgatgacggctttttgatatcataggacataatggtatggtggggtctattttacttcatttgccatagtgtgcactgcctgggatttgaatttagtccgcaagaatttttgcatgcaaaagtgtcagctgatcgaacagttaagtcttgggatcttgaaacttttgaattgattggttctgctggacccgaggctactggtgttcgctctacggtccttcacccagatggaaaaaccctattctgtgggttagaccaaagcctcaaggtctactcttgtggagccagtaagatgtcatgacgttgttgacatgggatggagcaatttggctgaccttagtatttatgaaggaaaactcttgggatgctcctaccacgaatgccgagttggtgtttgggttgctgatatatcgctcattgggccctatgctcttggtgttttgcccaaagcaaatttctttgctgaggtggtacattctttagcaacgacaatccttcgaaaccgattgataacgctgccaagtccattcctgctctaagaggaaaaaattgaaattgcgggtccccggtcgaatctggaaggaacagcagaatcctgactcgggagcctgcattccaaacctattcagctgaactgaaataacaagagagaaggattcggattcggattcggtttaggtgtatattgggtgatgcgtgtggtgcacctgtgcccgcttctgtaatttgtttgtgttgcttccacttttcttccacgtagccgttgtggcctgccctaaattagttagggctgacgtgtgaggaccatgaaaaaaaaatacggcttgagctttgtgggttctgattgatcacatgataagaaatttctcgatttgtttctttacactacaccacagactgtttctgtgcctgtcgttatgcctagagacattttagaggacaaaacagcaggcagcattagtggaggaatcagagggagagctgcagttgcagatgatttccatgctcctgttcattcaaggaaactttcagttaatagttttgtgggtgatagtgttaactcaacaaaatccatgctaactgatcctgatgtttgctctgagggtttctctggcttaaaattctcttttggactaactccatattacaagaaagaagaatatgataatgtggataaagttgatagtatggataaaggtgataatacacaaatgacagaaaaattggacagaacagtgtcgttggagcatcaacttcagtcaaatgatacctctgagccaccatgttctactacagaaacaaccaaggtcaaatatgtcagaggagttgctgtgccattaggaaaaacaaagtctcttgttgagagatgggaaaagagagaggctactaatgttgagtgctcaccaccaactggttcttgtggtgaccgtgcagcagaaccaagtcaggcatatgagaaggacttgtcaacaattgatgaggcgatgattccaatcaatttgatgcagaaccatgatgaatttataaatgccgtaaaatctcggctgacaaagttagagatgatgcgtcatgtctttgaccaaaatggtatcaaaggagcgattgctgcagtggcaaagttgcctgacaatgctgttctagctgatgttgttagtactctgaaggggaaacttgatctcttcaacctagacattttcttaagctttctgcctgttcttgcggggttactgaccagcaaggctgaaaggcatgccattgtttctttggaattgttgttggatcttataaagatctttggaccagttattcgttcaacattgtcagctcattcagcagttggagttgatattcaggctgagcagaggcggggtggtcaatcagcacaacttgcccaagaactgaacctgtctttgcaagacttggtggtgatctgaagggagaagcaagttcaaaaatggttgatgtcagttcaacgtggtgattcattctcttctttcattaccaccaccccgtccgttcctctttgccggccgactagtctcaactctcaagtctcaaccgcccaccggtcacctggccccacctgtcggccggtgagcaagtacgcgaagaatcccacaggttacgtaaaagcggaagcccggaggccggagcagttggtcgccaccgtcacgcgcgttccccttccctcgccggagagagaaaccaccgacgcggccgcttccggaggaggaggaggagttggggtggaggggagctatggcggggagggtggaagtgtacctccagcttccaactctcggatgccacctcttcctcacgaacctgggttctataatgatcgtggtgccacagtggacatacctcttgattcaaccaaggacatgaagaaaaaggagaaagaactgcaggcaaaggaggctgagctaaacaaacgggaaagcgaattgagaagaagagaagaagctgcatccagagctgggattgtcattgaagagaaaaactggccacccttcttccctattattcatcatgacatttcaaatgagataccaatccacctacaaaggatgcaataccttgcattttcttcattgttgggattggcggcatgtcttttctggaacataattgcaactacagcagcatggattaaaggggcaggtgttatgatctggttgctagccattatctactttatatctggtgtacctggagcctatgtgttatggactgagagtgctttgaagtttggatggtttttcctgttttacttgatattccgtgcagtgctaacagtgtttgccccctttcagatccatatactgttctgcatctggtctgctgtggctcccccatccccttttccgggaaagtctctggctgggattttgccggctattgatgtcataggaaacaatgctattgtggggatattttacttcattggatttggactgttctgccttgaatcactactcagcgttgttgtcatccagcaagtatacatgtatttccgtggaagtgggaaggctgctgagatgaaacgtgaggcagctcgtggtgctatgagatcggccttttgatagagctgcttcgatggacgggagagaataggatgtgtcgttctgtggtggcgccttgtacatccctacacctatgttgttcgtatctaagttattccattttacagcagcatatagctaaaggattttcctgccttaatgtaatatatgttcactggggccttttatggatacctcaagagctttttaccaaaaaaaaaaaaaaaaaaaaaaaaaaaaaaannnnggggcg

SEQ ID NO: 52686 - DNA, 1865 bp, Oryza sativa
  Clone ID: PAT_MRT4530_54959C.1
ctgacttggacggagggaggaaatatggacttttaggccgagcgtgaggcgcggcccaatgggtagaaggaggctcggccgagccattgggccggcgcgggcgcaaggaggcggcccattaggggcgcgcggaagggaaagggggcagtccgggtggaccgaacccaccatgcgaggtcccgggtggggcccgcatgtcggcgacacggttcacggagggatgggagcacgcgggcggcgtttagggtttcgggtggatgcggctcacgattggtgcgccgggtggaccgaggcgcgacgggcccacgtgcagccgcatggcgcaccgtggtccgtgcgcacggagggggctagccaggctggccggtttgactcggtctagccgagttggcaccgacgtggcgcctacgtggcagccacgcaggccggcgagaggaggaagacgagaccgaccgggagatggacggcaggcggcggcgcgcgtcggcggagcggccgcgaggcgaggcgggaggaagggagaccaccggagggagggaaaaggagacgcagactccattcctcggctcggatgtggccggaactggacggaggcggcggatttcgacggctgccaccggcggcgagcaaaagggggaaaacacgccgggagagaatggggtcaattcgtggtggcgggagcatctctaggactctgggaacttgttctcggggtcggatggggcggagagactctgagagaggccggcgacagcgaggcgcggtgcggggaagggcggaacgccgccggggagggagaggggtccagcgatcaaagcggcggttcgggagtgttctacggtgatccaggagggtggcaacgaggaggattaggtgaagagctcaccgatggcgatgaacggcgtcgatggcgagcaaacgggaagccggcgaaggaaaacggccgggcttcggggagggcggcgccaggtctggaggatggtgttcacggcgggcagcaccgcgttggccgagcggcgacgcaaggcggcgaggaagggaacaccagcgacggaggaggccgcggcgttggggagaaccgaccttggcggtcaagcgctcggctggcggcagcggcggtttcatgggcgatgcgaaagtggcgacggcgtggatgctttgggcggcgaaggcggtggatcagacggccgaatttcgggtcgtgagcgcgggctggcggtcgcgcccgtggtccaggcggtggcaggcggtgacgccgatggtggctggtgcggcggcgacccacgcgcgagcgcgtgcgcgcggacgcgagggcgcggcagggctgacggcggcaacgaccggccggtcggccacgcgcgagcgcgggaaagagcgaaggcggtggcgggttttgggcggcgacggcgggaagcggcgatggcggcagcgctggcgtgggagagagagaaaggaagcagagagagagagcgaggaaagagagaggaagaagagaggcgatgcctctctctctcggcgcgtgcagcgcacatggaggtggagggagctgagtagaaatgggccgagcaagggagaaacggcccacaaccaagaaggacgctcgccgagaactcccgctccgagcgtggccgccgcaacgtcatcaacgccgccgccgccgccgccacgccgcccaacaactcgccggagcacgcctaattaagaggccaagttaattaattatgcatgcatgtataaactgttgaacgttttgttaccgttttctttatactatctagagtatgtcgtcatggagaaaggcctttgtattacttgcttcgaaaagcgtttaaatgaaaagaaaaaagttaagaaatttttgtgat

SEQ ID NO: 52687 - DNA, 591 bp, Oryza sativa
  Clone ID: PAT_MRT4530_5495C.1
atggggccatgccctcttcggcgatgctctcctctccccggcagcgtcgggcggtggaagcgagcggggtttggggcggtattgacggcgttaatttggtatttaacagccgtcaacaacgggatctctcctagatattcgttcgacagcatctacctctcctacgacggcgtaatttggctggagcagaggcgcgacggcggccacagcggggcggcggcggcggcgcatcgccggggttcaccgccgacagtgacgacgcacggcggcatcccgaggcgcgacgacggtgggacggcggcggcggcgcatcgccagagcgcgtcgagtacagcaccgtcaagccctagctcttcgagtggaaggccggcgccggtgccactgccgctggccatggcgatggcggcgatggtggtggcctcctccgctcttcctccgcctccatggacagctgccaccagtggaggtgacagagtgggggacatcgatgacggcgagaagggagaagatcggtaccctttcgctgctgctgcgacttcttgttgtgcttcagccatggaacaatctgctgttctgatgaacaggccatag

SEQ ID NO: 52688 - DNA, 499 bp, Oryza sativa
  Clone ID: PAT_MRT4530_54960C.1
tttttatagtatggataaaggtgataatacacaggtgacataaaaattggacagaacagtgtcgatggagcatcaacttcagtcaaatgatacctctgagccaccatgttctactacagaaacaaccaaggtcaaatatgtcagaggagttgctgtgccattaggaaaaacaaagtctcttgttgagagatgggaaaagagagaggctactaatgttgagtgctcaccaccaactggttcttgtggtgaccgtgcagtgagatctgatggtccttcctccttttcagcagaaccaagtcaggcatatgagaaggacttgtcaacaattgatgaggcgatgattccaatcaatttgatgcagaaccatgatgaatttataaatgccggaaaatcttgggtgacaaagttagagatgatgcgtcatgtcttttgaccaaatggtatcaaaggagcgattgctgcagtggcaaagttgactgacaatgctgttctagctgat

SEQ ID NO: 52689 - DNA, 497 bp, Oryza sativa
  unsure (1)..(497): unsure at all n locations
  Clone ID: PAT_MRT4530_54961C.1
cgagctcccatctatcgtcatcnaacttgaaatggagatgtccaggcatctaaatttcattctcctgttctttcaagttgcagccatactggctgaccctgttgctctgactgaactatcccaaaagaacagccggncctctanatcncacaagccacagccactggatttcccaagcgagaggctttaccgcgcttaccttgtcatccagcgtttcaagagcagtatcacgtccgaccccaagaacatcaccgccacctggaccggccatgacatctgcggtgagaagacttacctcggcttctactgcgaaacnncccgaggtaaggagctcacagtgacngcggtcattttgaatggcttcgatctgcatgcccgaagctnaaangcttcatcgaccagctccccgacgttgcactttttcatgctacctccaacancttcggcagcgacctttccccgcctcgtcaacctcccctatcttttacaatctaaac

SEQ ID NO: 52690 - DNA, 1041 bp, Oryza sativa
  Clone ID: PAT_MRT4530_54962C.1
gaggggagctatggcggggaggtacgaccggaaccccttcgacgaggacgacgtcaaccccttcgcgggtggaagtgtacctccagcttccaactctcggatgccacctcttcctcacgaacctgggttctataatgatcgtggtgccacagtggacatacctcttgattcaaccaaggacatgaagaaaaaggagaaagaactgcaggcaaaggaggctgagctaaacaaacgggaaagcgtatgggcctgctgtggtgatgctgcatccagagctgggattgtcattgaagagaaaaactggccacccttcttccctattattcatcatgacatttcaaatgagataccaatccacctacaaaggatgcaataccttgcattttcttcattgttgggattggcggcatgtcttttctggaacataattgcaactacagcagcatggattaaaggggcaggtgttatgatctggttgctagccattatctactttatatctggtgtacctggagcctatgtgttatggtatcgccccctttacaatgcgatgaggactgagagtgctttgaagtttggatggtttttcctgttttacttgatccatatactgttctgcatctggtctgctgtggctcccccatttcctttcaaaggaaagtctctggctgggattttgccggctattgatgtcataggaaacaatgctattgtggggatattttacttcattggatttggactgttctgccttgaatcactactcagcgttgttgtcatccagcaagtatacatgtatttccgtggaagtgggaaggctgctgagatgaaacgtgaggcagctcgtggtgctatgagatcggccttttgatagagctgcttcgatggacgggagagaataggatgtgtcgttctgtggtggcgccttgtacatccctacacctatgttgttcgtatctaagttattccattttacagcagcatatagctaaaggattttcctgccttaatgtaatatatgttcactggggccttttatgg

SEQ ID NO: 52691 - DNA, 1806 bp, Oryza sativa
  Clone ID: PAT_MRT4530_54963C.1
gcccgggagtggcacgagaagaaaaatcccctccgcctcctcccccaatccttaacctaaactccgatcccctccgccttccatggctgccatgggaagaactgtactaccttcctatgttcttctggatcgcatcgttcgatcggaggaggaagccgtcgaggaggagtcggagtgggcggccatggagtgcgcggactggaagtcgtacgggtgccaccccggtgacaaacgctaccccaggaacgccgctagggtgaagggcatgctgctcctggcgcgcctcgcggagcccccgggtctctccgagctctccatccgcctctccgccgccgccgccgtgcccaggccgccgccggccagcttcccccccggcgccgccgtcccgcccatccccaacttgcccgacgcgtcaccgtacgacgacccgccgctcacctacgtcgaggcggcaggcgacggcctcatcgccctcacctcgtgcttccgggatggctgcagctgctacctcgtctacgacgtcgtcggcaagtcgctctccatgatcccgggcctgcccgagtcctgcctcacctactgcagcatgcggcctctccccctgcgcaccgccgccgccggtggctacgcgctgcgcagcagctactcgctggccatcgtggctaaggacaggcggtttgacatggaagcggggggagacgtctaccgggatgttctctgcctgtgcccaccgcggccatcatcatcctcaagttccagggggggcatcacgccatggcaattcaaggacgccatcttcccatcacagatgccgggttccttccacggtgacaaggtgttctcgttcggaggccacgcgttctgggccgacctcgcaaagggcgtcctcttctgtaggtgcgacgatgctctctccggccgcaatgatgatgccgtgcaattccgctacatcccgctgcctgtagagtgccatcttaaaatcagtttcgccatgaggggtgacctccagctatgccgcacaatgagctgtgtcgacggcggcggtgactctatcaagttcgtctgcatcagtgacggcggatccagctctgcgcacaccggcgatcgtgcgataacgatgtggacactgaccctcgcaaccggggagtggctgaaagatgcacaactcatggtggcagatctgtgggagctggagggcttcgacaaggcgaggttgcccaaggccataccaattagccctgtcctgaaccctcaggaagatggtgtccttagtttcatgctcaacgatgccgatgcagagctgtacatggtcagccttaacatgcacagcaagaagctcctctcgtccttgaccctctcatcctgccctgatgacattgttcctcctttgggtttggatctttccaaagaccttcagaatctgtctcttcgccctattgctgctgagtctgttccagccaagacacagggacgcccaattgcaaccaagaggaggaggtcgtcattaccgtagtgacatctttgtcagtggacggctcgtgatgctggagcagacttcattttgccaggctgctgcttacttggtagggtagggatcgtattcttcgtgccgtcttgctgttttgcaagctgactctttaggttttatattgttgccgccaccgttatgaaatcagatgatgaacacaaatgttgaaacaacctctaatttgtcatcagctgtcaacctatatgtggttgcttgttgattttggttcactcaagaaaacatctgttacttaacggttactaaatcatactgtcttatat

SEQ ID NO: 52692 - DNA, 1782 bp, Oryza sativa
  Clone ID: PAT_MRT4530_54964C.1
acatatgtaattttagtgcttacatatgtaattttgagacttacattataaatacactaaaattacatatgtaatttagggacttacaatgtaaatacatgccgactattttttgatgaaaaatatagcgtaataaatatagctatacccaagttttattcaccaattacatttcgtttgtaaatatgtctaggcaagcggcgccttgcgcttggggacaaggcggagcgggacgcgcagcggcgtggtcagcccgggcgcctcgctcatgtccagctccgccgcgcgcatgccggcggggagctcccagtcgaagtggtgcaggagggcgaccagcgccatctccagcaccggcacggcgaagctgatgccggggcagatccgccggccggcgccgaacgggacgagctggtagtcgttcccccggaagtccaccgccggtccgccggccaagaaccgctccggccggaactcctccggcgagccccacgccgcggggtccctcccgatcgcccacgcgttgacgaacagcgacgtcctcgccgggatctcgtacccctgcacggccgccgccgccgtcgactcgtgcgggacgaggatcggggccggcgggtgcagccggagcacctccttcaccaccgccttcatgtactccatgccgcccacctccgcctccgtgatggccggcttcccgccggtcgctcgagcgatctcttcctgcagcttcgccatcacccgcgggttcgccgcgagctccgccatggtccattccagcgtcaccgacgtcgtctcggttgcggcggcgatcaaatccacgacgcggctcttgacgtgagtgtccgtgagctcggtgtcttcttctttcagacgcagcaagacgtctatgaaatcctcctcccctgctccgatgtcctctcgcttcttcttcttcttctccgcgtgctccgccattatcggcgagaggaacttgtcccactcctccatcgaggcgtcatactgcttctcgagccccgtagcccacctcaccgccttcgccgccatgcccggcagcaggtcgtcggcctggaccccggccaccagcgacgtggcgttcccgagcagctgcttcagcttctccgccgtcgtgcccgcggcgccggtcgccgcgcgcgtcaccaccgcgttggtatagctgtacaggaggtccctcagctccacggcgcccccgtccgccgcggcatcggcggcgcggcgggtcgcggcgacgagcgccgccgcctcggcggcccgcacgggcgcgaacgcctcgacgcgccgcggcgagagggcgtggacgacggccgtcttcttcgcccggcgccactgctccccgaacggcgcgaaggtgatgttcttggagccgtacgacagcttgtgcgccgccgcgacgagcgggcgggaggcgaaggcgaggtcgtggttcctgtacaggtccgccgcggcggccgccgtggacacgaccagcgtccggcgccgcccgagctgcaggaggagcaggccgccgtcggtgccgtaccggaggtgcagctcgtgcaacgagcggtgcaggagcgggcccaagagatgcaggtggccgagaaacgggaccgacggcggcgatggcgggagcttggcgcttcgacggcgtcggttcttgaccccgtagccgacgacggcgaggagcgcaacggcggcgaggaagacgtagtggtacatcctaatccttccaaccactcgcaaccaccaggatgtgttgtcgtagccgcaacaacagtctatcgccat

SEQ ID NO: 52693 - DNA, 457 bp, Oryza sativa
  unsure (1)..(457): unsure at all n locations
  Clone ID: PAT_MRT4530_54965C.1
acatagaggtngcacactcctctcgcctcgcttttcccttctagatctcnccnctctctctccgtctcttgcggtctcgcatcgtcagtcgccctcttcccncccctccnacctcctntcctctccagtctcccctttccctcccatctccccacggtagcgcgcaggacgacgcacnggngcacgaggngaggcgcacaggcgggcgtngcgagggatgcggcacggcgataggngancggctggcaaggggacaggcgcngcgaggggcgacacaggtgacaggcgaggtgaacacaccgagagggtttagcgtcggatccagtcttcaccggncgcggggcgcgggatttcaaggcggcgatggagttcttcccngggtgcggattcttcttcagatccagccggccancggggaaccttgcggctttctacttncccaacttgccctacgttt

SEQ ID NO: 52694 - DNA, 210 bp, Oryza sativa
  Clone ID: PAT_MRT4530_54966C.1
cttgggagagataagaaggaagaaaatggtggtgagaagaccaatgataacaagccgaagagcacattcaaagggaagaagatcaaagagactctcaagaaggcttttgactcaaatggtgaaagtggagatgaagataagggaaagaacatctctggtgtttgcttcatggcacctggtgaatcggattcagagtgtgaagacaatgag

SEQ ID NO: 52695 - DNA, 301 bp, Oryza sativa
  Clone ID: PAT_MRT4530_54967C.1
ggctcatgttctttttgagagagactgaacatctttaaggaccagttaccgcacaacaggagaggcatggcaatatcatggctttgcagaaactgctcgcgatgcaccaacagctggctatcattgtgtcccatttgcccaagcattgctttaacccagaggtataaattggacgggggaataccaacaggagaaatcaacatatgcacaagagatgaacaaagaagagagaaaaaaggggggcaagatgctatctactgacttagccagatggagcagacaagctcctttctatcaacaa

SEQ ID NO: 52696 - DNA, 201 bp, Oryza sativa
  unsure (1)..(201): unsure at all n locations
  Clone ID: PAT_MRT4530_54968C.1
aagatntnaggacagnagttatgacnntcggaattgagggntttgtacttcttttttctgcagaatcgtgatttagtccttagntcttangcacaacaccaatncagggtgtactanaaaaaaccttcgaaacaaaaaattactctgttcctgaaatctgctattactgtagctcctcatcgtctacantggnatctctgg

SEQ ID NO: 52697 - DNA, 513 bp, Oryza sativa
  Clone ID: PAT_MRT4530_54969C.1
atggcctctacggcagaagttgccgccgcggcggcgtcggcgtcggcggcggcggccgcagcggagacgaaggggaagggtgaggaggggaagaggaagggtatgggggatactggggatgatttggcgggctctgtgttcgcggggcgcggcgatgactacgagagatggctgcagtacctgtccaaggaggaggccgccgtgcacgcgcgcctgcgccgttcgcccgccgtggcgtccgcaacctcgtcgtcctctccatcctcagcgaggaagcatacaaaagcaaaaggcagcagcactggcaacgctgcagatgatcataatactgggcagagaggtgctgagggagctgcgctggcagagctgcgcgtgtacgcggcgcaggagcgcgtggagctccaggtgaggagggaaacgctggtgctggagctcccggcgaggacgcagcggcgtcaacggcggcaggcagagccaacggcggccgcgcgcggagggagctgctggttgtga

SEQ ID NO: 52698 - DNA, 222 bp, Oryza sativa
  Clone ID: PAT_MRT4530_5496C.1
atggagcccggggttggctccaaggattatataggggctgttcgacaggctgactgcgagagctgcagctgcgcacagcccaaaatatcccgtccgtttgctccatcagcacggccacagcccaaggccattactgggctgggcttgaccttcacaatccgagatgcagtactaagactgaattgcccctggacggagcgcggagacattgaaaacgtgtga

SEQ ID NO: 52699 - DNA, 330 bp, Oryza sativa
  Clone ID: PAT_MRT4530_54970C.1
attgatactgacattttacacgtgccgggccgtggactccaatgaaccacccgtgcagcacaggcgggggacccaaagtgaggggggcgagccacccgcaccgaaaactagaccccaacaaaagggacagccggagggagcgccaacattttctccgaccaaagggaaacgcaaggggggggagaatacactttaactgagacgacatgggtaaaacgcggggaacatacgccccagagtaactaccctggccggaacgaacataggagaaatgggcatgcaagtgacccgcccagcaaacaccaggcagggagcttccaggagccggcc

SEQ ID NO: 52700 - DNA, 905 bp, Oryza sativa
  Clone ID: PAT_MRT4530_54971C.1
ttttttttttttttttttttaacccggccgggaagctctcctccccatcactccgatggcgctgtccgcggcggcgccggcgaactcctcctgcttccacccgcgcgccgccgccgccagcgcgccctcatctctcagcgtgggcaccaaggtcttcgtcgggttgaaggcccagaccaagctaggctcgtcggagtcgtcgtgcccgaatgtcaccgccgggttctacaccgccgtcaaccggaggatctctctgggattatcaaacaagagggctaccagggcgcgcatttcaatgatgcctgttggtacaccacgggtgccttacagaacacctggtgaaggaacttggcaatggcttgatatatggaatgctctagtaagactacacaatgcctaatggatatcgcgaacgaattatcttcattggggacagtatagatgaagagtttagtaaccaagtattggcgagcatgttgtatcttgacagcgttgataacactaaaaagattcttctatacattaatggtccaggaggagatcttacaccatgcatggcattatatgatacaatgctaagcctaaaaagtcctattggtactcattgcctgggctttgcattcaacttggcaggatttattcttgcagctggtgaaaaggctgatgatatagaaaatgaagcaaatgaacttattaggatcaagaactatctttacagcaagttgtcagagcacacaggtcatcctgttgataagattcatgaagatctatctagggtgaagcgcttcgatgctgaaggagctttggaatatgggattattgaccgtattattaggccttctcgcatcaagaaagagggatccactgctcaaaagaaggatctacgtaatctgggacttggctag

SEQ ID NO: 52701 - DNA, 741 bp, Oryza sativa
  Clone ID: PAT_MRT4530_54972C.1
atgacgcgcgggatccggcaggcggtggccgtccccgcatggatccgtcggccgggcgccctcccctacaggatcccgctctcctcccctcaccttcctttcctccctagatccggcagaggggaggggcgtcagcggcggtgcggccgaagggaagcgcggaggccgccgccgggagcagcgtcctcggccgccgcggggaggccggatccgtcgctggccgctgtggggaggccagatccgtcaccggcaactgcagggaagacggcagcgggtctcgggcaaagtggcgacgacgatagtggtgacggcgacgacggtggcagtttaagcgcccgcgtgcggtactgtaaggaagtgatagcaagcatttctctattaggtgtgatatattattatcgtacctcatattatttcccaaaaaagatccatgtcaagatttgtgtccaacgacagcgtgatgatggtggtggcgactgcgacactatgtttagggtctatgtttggaggacggatggagtattctggtttgctgccgtatctgccatggcgattgaggtgatcgatcagttcagacttcagagcctccgtatgattgactggatcactggatccactcctccacttttgcccgaatccgtcgcagctgattgcgaaacagaagcgcacatcgctttacaagtttacagctgcttggcactatctcagcttcgttcttcatctataaatgatcagctttag

SEQ ID NO: 52702 - DNA, 253 bp, Oryza sativa
  Clone ID: PAT_MRT4530_54973C.1
caagcgccagatacctccttacttctctcttggaattcgaagccttgctgtattggaaggcattgcaatcagcttaaataccaactacaaagtcttgagcagttcatacccatggatagcacgaaaagttctcacagacaggtcaccaaagctacgatcaactatgcagacgcttctctataaggatggcactatccagattgaccgcgtggagtctatgctaactgagtcgcttcgagcaagaacagagcag

SEQ ID NO: 52703 - DNA, 1080 bp, Oryza sativa
  Clone ID: PAT_MRT4530_54974C.1
atgtccggggaattgccatcagctctagggaactgtacaaatctcaagatcatcaacctcaagtacaacagcttcagaggagagcttctgaagttgtcaccaagaattggcaacctgaaatccctcttgttcctatcactttccaacaatgcttttgtgaatattgcaaatgtgattcatgcactcaagaactccaggaaaatcaacactttgatcataggaaccaacttcaagggtgagaccatgccagaggatataccaatcactgatggttttcagagtcttcaggttctttccataccatcttgctcattgtctggaaaaattcctctttggctatcaaaattggccaagctggaagttctggatctgtccaacaatcaactcactggaccaataccagactggatccatgacctgaacttcctctacttcatagatatatcaaacaacaaacttacaggggatctcccaacggcaataatgttgatgccaatgcttcaacctgacaaggttgcaacccaattggatcccagggcatttgaacagcctgtctatgcagggccatcacttacatatggcaagaacaatgctctccctgcaatgctgaatcttgcaaacaacgagcttaccggtgcgatcccttcagaggttggtcagctgaaatcactcacattgctcaacttgagcttcaacagcttgtcaggacagattccacagcaacttttcgacctgacaaacctgcaggtggtagacttgtccaacaaccatctctcaggttcaattccaccggggctgaataacctgcacttccttacaacatttgatgcttctaacaacgacttagaggggtggattccagctggtgtccagtcttcatatccgtatgatttttctggcaacccaaagctgtgtgatcctacactcactcgcacctgtgattcagcagaggcacctccagtctccacgctcaccggagaagaaaccactccaaagatcgtctttgcaatcgctttcggtgcgttcttctgtttaggtgtggtgtatgatcaggcagtattatcgaggttttttggctag

SEQ ID NO: 52704 - DNA, 2073 bp, Oryza sativa
  unsure (1)..(2073): unsure at all n locations
  Clone ID: PAT_MRT4530_54975C.1
atgaggaggcatgggtggcagctaccttaccaccctcttcaggtggtggcgatagcggtttttctggcactgggttttgcgttctatgtgttctttgtgccatttgtggggaggagtgagctccagtatgtgctcatgggtctctacactccactgatagatctgcatctcctttcagtttggggtgacttcttttgcactactcccttctgtgttttggtcggtataatatgtggagaatgtttaggagaaatactacattatattacttgtgttgtcacattatacatatggtgtgcagcaactaatcctggtgatccaggcatttttaaagcaaagaaacatccaaaattaggcaaggatggaaagcaaatacaagaaatttcagagcacgaatcatgccagggaggaaagtcgttcagcgatggctgtagcattgttaataacagtgagagattaagcaatatgtttgaagggaatgattcatcttctcggcctgggttacatggagttctttgcttgatatgcaacccattcttctgcttatggaaaagattctttcactcagatgaccaatcttcggaacagcacatgagcgaagaaggcatgttcttttgcagcttatgtgaagtagaggtgttgcagcatagtaagcattgtagagtttgcgacaagtgtgttgatggttttgatcaccactgcaggtggctcaataattgcataggaaaaagaaactacaaaagattcttcattctaatggcttcagctgttctcttgcttataatgcagtggttagtgggcattcttgtgctgatactctgtttactgaagcgaggggagttctccggacagatcatctcaaagctaggaagtagcttctcaacagctgcttttgtaattgttgtgatgacatgtactttactagcaatgcttgcaacaataccccttgcccaacttttctgcttccatgttctgcttattaagaaaggcataagtacgtatgattatattgtagctttgagagaacaagaagagcagcaagaggttactgagcatcaaagcccgcagatgtctattattagctctgtgacagggtttagcacaactagctcatttgctcctcttcaacgtgggtcatggtgtactccgccacgtctattccttgaagatcagcatgtcattcccccagaaatgccacagaactcctcaagcaagaaggcaaagcatgctgatgtaaccaaacgaaaaccatcaggacctgtgaaaatcagtccctggacactagctcgccttaacgcggaggaagtttcgaaggcagctgcagaggcgaaaaagaagtccaaagttcttcagccaatcgcgagacatgaagatcctaaacatgacaagaggcgacccgacaagagagggcagtttctacctgaactttccgtcgatcacactacgaggacatctgatagctgcaccgacagcaactgcagcgacatggacatggaaacatgtggcagtttagccccattgcaacatgaagcgaggagcgttttccaaccaagcatcgcatcgtcgatcagaaacctcacctcatcacctcagagcagcctggactcacctgatcttcacccattccgtgtttcaatgtcaggagcagacgaactccgcagtttcatgtcactcgcagcatcagaatccactgctccaaaaagcattgcactttcaaggtcgacgagtggtgggtacgaggcctcgggaggcgaggaaagtgatcgcatcccgtcaaagatcgtgcaccggtcgtccaattgggccaatgccatcctcaattccggtaggcgagaaatggcagccgatctgaacttgccaacatctgaaagatttcttacaaacaccaggtttagctagctagtcatttgctgtgctgctagttgtgaatgggctgtaggatttactgacctgttactggttagaagtagtagtgttgttgcaattgtgaccaatatctgttccagccaagacaattgcctcatattgggtttngctgctgtactgctctaaaaaaaaaaaaaaaaaaaaaaa

SEQ ID NO: 52705 - DNA, 1144 bp, Oryza sativa
  Clone ID: PAT_MRT4530_54976C.1
ccacgcgtccggccctaatgtctaatcctcccagggctcagcgcataaacaagaatcgggatcggcaacaatggcgacgggggagaagacgactcgagcggggagcgagtcctcaggccaccattgggcgggttacagctgcagcgcaggagaggccagcagcccccgcctcccgctccggcatcgccctcccccgagagacttccgccgctacatcatcttcggttgcccttatcgccaccccaagaagccgaaagcacccgcaaaagacaaagtccaagagaaagtaccacagcagaccatgattgctagctggggcatggccaattatgttgaatataatcaagtgaagaacatttttcaggagattggtgagattgttggtatttatttcagtagcacgaggcatctcgcagttgttgatttttctacagaacaagctgctgagagtgcactctaccattttatgggatatcatctgatgggacgccctttaaaacttgcatggttcgatcccaaggactttgctgttctcagagatatacctactcgtggggagagaatgcctaattatttaatgcagactgtatgtgtgaccggctttgattcatccctcgagattggaacgattaggcacgcacttgaagaaattttcgcgaacgatcatatgaaaaaacttgtaactcccgtgaatctagatggcacaagcacagggaaagcatacataagatacgatgttgcgagcagctacaatggtgcgctccactgtgacggcgtgtccgagattggaggccgcattctgcgcgtcacaaaatggcctgatttttcatggtgcaagaaacgaagaatagggagagctggttgtgacaaggacgacgcaggattggcagtgccagatcaggacgacactcctaagtggcacacgcctagcacagggaagaggaccttgttcgacgatgggagtggcgatgaagccggcgttaccatgtgatatagtatcatgtgaattcaatcaattcatcgtggtgtgcatagattggaaacagtttacgctcaattaattagtcatgtttgctagtgcatttaaatgataatagtactgctaacttattgatttgatagtaaaaattcatgcctttttttt

SEQ ID NO: 52706 - DNA, 1237 bp, Oryza sativa
  Clone ID: PAT_MRT4530_54977C.1
aagcactatagtagtaggcaagacaacggaagagcatgcggcgtggccgatggatcgcacatacaaagacttgttttggtggttcggaacgtcaagtctctcgcgagggggggactgtggttctcacggttcgcgccccgcgggggcagttcactgctaccttcacgctcaaggtggagtgacaggaaggcaaccaaccaaccaaacaattaacttgcagtaaaagcaggttcagtacgggaatccgattccaacaaactaaaagactcgaaaacaaagagaaggcaccaacgaatctcttggacaccgacgactcgacgcctcaccaaccacgcccaaccaacgccaccaccaaccccactacgcacgcactcacccaccccacctgtcgccccgccgcgcccgacttcgccgtcgacgtcgacccgctgctgcctccgccgtccaacggcgacaccggcgcggaggcgtcgatggttgtggcgttgggcgtggtgacgtagacgtcgagctcgaacacgccggtgctggcgctcatgctggccgtcttccacaccacgtagccggtggccatcctgaacttgcccgtgccgcccaccacggacagctccctcaccgtggccgtggtgtcgtcgtggccgatcaccgcgatggtgctgccgttgttctcgccggcggtgaagtagaggttcacgcacatcatcagcgtcgggctcgacagcgacgacatcatgtagaacccctgcgcgcgccccacctccggggacgtcgccgacgaggtctccgtgagcgcgtcgtcgacgacggtggtgtctccgaagccggtgctgacgccaccgttggccgacgtcgggcccttgatgacctgcaccgccgtctggccgctgccggagacgacgtcgtgcatgaagaagtggaggtgcgtgtccgccgcccgcaggagcggcggcgcggcgcaggcgagcgcgagcagcaggaagagggcggcgggagagcgagaggtgggcgccatggctgaacctggactggacgaacactagctgctgctgctgcccacaggaagtttaatttatcaacaggtattctctcagaaagtgggagtaggtagcagaaatgactatattatttctactattaattaactaataataaccatgtgaagcttagactttacggcaggcatgcatgctgcaaagcaagcatgattcaggtcaaaaaaaaaaaaaaaaaaaaaaaa

SEQ ID NO: 52707 - DNA, 2001 bp, Oryza sativa
  Clone ID: PAT_MRT4530_54978C.1
agctttgtaactaggagcctaagccagggaggagcaatggcgagctcgagcttgtcgcgccgtgccctcctcctcttcttcttggaggtagccgtcgccatggcgctgcttcttccgggcggtcacgcgcgagtgtgcccgccgtgcggctcgacggaggtgccgtacccgctgagcacggcggacgggtgcggcgacccggagtacaaggtccggtgcgcggcggcggcggcggggggcacggcgcccacgctcctgttcgacgcgctcaacggcacgtcgtacccgatcacctccatctccccggcgtcgcagcgcctggtggtgtcgccggcgccgttcgtgtcgccgggcgcgtgcgtgtcggtgggcgcggcggcgtcccccggcgtgcagctggacccatcgcggccgttcaacgtcagctcgtccaacaccgtcatgctgctcaactgcacggagctgctgctgcggtcgccgctcaactgctcctccaactcgctctgccacgcctacgcgggcgccgcggggtcgacggcgtcggcgtgcgcgccgctgccgctgtgctgcacgttcgtggcggggggctcgtcgacgtcgtaccgcatccggctgggcccgcagtcgtgcagcgcgtaccggagcttcgtggggctcgacccgtcgcagccgccggcgacgtggggcagccgcctcgggctggagctgcagtgggcgacgccgagggagccgctgtgccgcacgcaggccgactgcgaggacggcgccgccgccacctgcgccgacgacccgtcggcaaccggaggcgcgggcacggtccggcgctgcctgtgcgtgtccgggctcgtctggaatcccatcgctggcgcgtgccagcagcagaatctcacggatagcggatccaaccatgcgcctctcattgctgggatcgtgtgcggcctaggcggcgcgctgctggtggcgactgcaggactgttcgcttatcggcggcagcagcgcatccggctggccaaggagaagctggccaaggagcgcgaggagatcctcaacgcgaacaactcgagcggccgcaccgccaagaacttctccgggcgagagctgaggcgcgccaccgccaacttctcccgcgacaacctgctcggcgccggcggctacggcgaggtgtacaggggcgtcctcgcggacggcaccgtggtggccgtcaagtgcgccaagctcggcaacaccaagtccacggagcaggtcctgaacgaggtgcgcgtgctgtcgcaggtgaaccaccgcagcctcgtccgcctgctcggctgctgcgtcgacctggagcagcctctgatggtgtacgagttcatccccaacggcacgctggccgaccacctgtacggccccctcagccaccccccgctcccgtggcggcggcggctggccatcgcgcaccacacggcgcagggcatcgcgtacctgcacttctccgctgttccgcccatctaccaccgggacatcaagtcgagcaacatactcctcgacgagcggatggatggcaaggtatccgactttgggctgtcccggctggcggagcaggggttgagccacgtctcgacgtgcgcgcaggggacgctgggttacctcgacccggagtactaccggaactaccagctcaccgacaagagtgacgtgtatagcttcggtgtcgtgctgttggagcttctgacgtgcaagcgcgccattgactttggccgtggcgccgacgatgtcaacttggccgtgcacgtgcaacgggcagcagaggaggagcgccttatggatgtcgtggacccggtgttgaaggataacgccacacagctgcaatgcgacaccatcaaggctctcgggtttcttgcgttaggatgcctcgaggaacgccgccaaaaccggccatccatgaaggaggttgcagaggagatcgaatacattatgaatatcgaggccggcaacgctcatctcaaggagctgcacagcttatga

SEQ ID NO: 52708 - DNA, 1450 bp, Oryza sativa
  Clone ID: PAT_MRT4530_54979C.1
cctcccaaatcccgccgatctctcctcccccctcggcctcctcccgctggctggcgcccgcgcgccgctcctctctcgccggccgccagcgggcggccgccgcttccccggcggcctcgacgtccccaacctcaagaagcgcggcggcgggacgcggagctggatccgcgtcgaggccgccacggcgtccgtgcagacgctggaagtggacaaggccaccatgatgcggcggtgcgagctccccgcccgcgacctccgcctcctcgacccgctcttcgtctacccctccaccatcctcgggagggagcgcgccatcgtcgtcaacctcgagcagatccgctgcgtcatcaccgccgacgaggtgctcctcctcaactccctcgacagctacgtcctccagtacgccgccgagctgcagcgccgcctcctccagcgcgccgagggcgacgagctccccttcgaattccgcgcgctcgagctcgccctcgaggccgcctgctccttcctcgacgcacaggcagctgaattggaaattgaagcatatcccttgttagatgagctgacatccaaaatcagtacactgaatttggaacgtgtacggcgattaaaaagtaggctagttgctctgacgagaagagtccagaaggtcagggatgaaatagagcagctaatggatgacgacggagatatggccgagatgtatctcagtgagaagaagttgagaacggaggcatccttctatggcgatcagtctatgttaggctacaattcagtaggtgatgggacatcgttttcagctcctgtatctcctgtctcgtcacccacagaatcacggaagttggagaaagctttcagcttgtgtaggagtaggcatgacagtgtgaagagctcagataacacagcaacagaacatattcaagagctggaaatgttactggaagcatatttcgttgtgattgacagcactctcaacaagctaacatcgctgaaggagtacattgatgacactgaagattttatcaacattcagttggacaatgttcggaaccaactgatccaattcgaacttttactcacaactgcaacatttgttgtcgccatttttggagtggttgctgggatatttgggatgaacttcgagacctcagttttcagcatacagaatgcattccagtgggtgctcatcatcactggggtgatcggcgctttcatcttctgcggattcctatggttcttcaagtacaaaaggctgatgcccctgtagatgatcatagcatccataggaccaatgaatcaaactcaattgtcgtctacgctgttgaggtacttgatcagaagcctgaatttctgcccgatgtaaattaccattcttttagaattctacagcatacctaccaaagaaattgaatgaaaaacaaaagttttcataccaaaaaaaaaaaaaaaaaaa

SEQ ID NO: 52709 - DNA, 1499 bp, Oryza sativa
  Clone ID: PAT_MRT4530_5497C.1
atggacgggctgcacggtacggacggctgcttctctcccgggcgggccatgtcgccgcaggtcaggccccccgtcccgcccgacgctgccagcggcgggcagtacttggcggagttgttgcaggagcatcagaagctggggccgttcatgcaggtgctcccaatctgcagcaggctgttgaatcaagagataatgcgagtgtctgggatgtttcggcaacccggcgtaggggacttcgagaggtcgcaacctgcaagcccaaatcagatgcatccgtcgcacatcgtgcccaatttctgtggtaatgcttttggtccatggaatgggatgcgtccagagagagtaagtttctctcaaggaccaggttggcaaggagcaccacaaagtccctcttcttacattgtcaagaagatcttgcggttggaaataccgacagatgcttaccctaatttcaattttattggtcgccttcttggaccaaggggaaattcgttgaagaggattgaggcctctacaggttgtcgtgttttcataagaggaaagggctcaattaaagaccctaacaaggaggagcaacttaagggaagggctgggtatgaacacttggatgatcccctgcatatcttgattgaagccgagttacctgccaatgtcattgacgctagactcgcaaaagcacaagaaatcctagaagagttgttgaaaccagtgctctgccgtggccatgaagcagcagcagcagcagcaggctatggcctgttcatcagaacagcagattgttccatggctgaagcacaacaagaagtcgcagcagcagcgaaagggtaccggtcttctccctcctcgccgtcgtcgatgtcccccactccgtcacctccaccggcggcagctgtccatggaggcggaggaagagcggaggaggccaccatcgccgccactgcaacgccagccgcacggagtttggctgcaggggacaacggcatgcaggtgagtggccatggcgagcatgctgggttgagctccgggcggcgtcgtggccggccaaaagggtccgggcggcgccagatccttgccaatctaggtcagtacatcgccgtccacccgcgcgcactcgccatggccagcggcagtggcgccggcgccggccttccactcgaagagctagggcttgacggtgctgtactcgacgcgctctggcgatgcgccgccgccgccgccccgccgccgtcgcgcctctgctccgctgcgaggaagaaggggaaaagaaaagaagagagagagaggaagccgtgcgccgggatgccgccgtgcgtcgtcaccgtcggcggtgaaccctggcgatgcgccgctgccgccgccccgctgtggccgccgtcgcgcctctgctccgcaccattgactagtaatcttctcaagtacaccatggggaatggtatgcgttatcagttggagggagcttcacgccccatgtcatcatttgtcgccacaggtgaggatgt

SEQ ID NO: 52710 - DNA, 1934 bp, Oryza sativa
  Clone ID: PAT_MRT4530_54980C.1
gtaaaacctgaacaatcgataattattcaatggcgtacagccaagtgcaaagaagtataacattcacaaggcagcttatacgttctaatattgcctattcaagggctttttacagtctacagcgaggacactctacaaccatccgcttaaaatctcaactgtaaggcatttcccagtagcaaccacagatctaatcatcttccaagctaaacatatccctctgtttctttataaaaaaagaaaggtgaacatatctgtacaaaaattcgttggcaccagttttacaactggaagcaagtgtgaaatgattactgcagcaaaagtaaccggcccgtttcaatatgaactccatgccgctcaaggttgacatcaatagtaaacagagatctgtgagttaacctgatggttcatgactgcatgcatgtgttcataactaaaatgcagcaatagtatctactacttcctaagtatttaaaatcatagaccaagaaaccacgctgctcatcatttccccaaaaaacctgtgccgtgatatacctgcaaaggaagagcgaaactcttctactaacaaaagaagaggccaaaccatttatgctacagaaaggctccgcagtttgtcacagtgaggtgtagggtagtccttggcccattggcgcctttggagttccacatgacagaatcttcccagcatgctcttgtagtctttaaaaacatactgctcaagattatctctagaagaacttcctcgtggaaactgctggtcgaattcttgtttgctgacaaagtactccaccccatgcttttcagtgacttttgatatagaaaagtagcttgtccttttaagggaatactcaggatgccttgctggaatgaaagcaaacaagatgaaaaacaaaacccctgcaaggtgcaccaacattgttaaatttatgcctgacccaccctgaaccggatgttcccgtctctgttgttgctgttgcctcactgttcctcttgctctgtaggcattgtgagactggaacatattatcatgggtcccataaaagaacgacctgaatatctcatctggatctaagtcttcttcataaccatagaagctacttcttgcttgcctttgtcgccttgtagttctctgcctcatgacattggaatactgataattaaactcatggtcctcaatggcacctgtttgatcataagttctccttgactgatcattgcttaggcacttgaaagccttgctgaccaacttaaatgcatcctctgccccaggagccttgttcttgtcaggatgaactttcagtgacaacttcctgtaggctttccttatctcttctacagagcaacttctctccactccaagaattgcataataatccttgttctttgtgatgttccgaaccactctaacattttcctcagtgtaacccttatcaacattagaaggaccaacagattctttacgcaaattttggctttcaccaacttcaccacttctagccctgtattggcgtacagcaccatccagggtatcatacttcttgggtgtgcccagcatatcatcaatcggaaggctggggtccaatctttgggcaattcgaaggaatttttctgctcgctgtctatctccagatgcaagtgcagtttctgcaagtttgacagacctcaaggcctcatctttgtttccatccatgcccttagtcagcctttttacaactggatcatatataggtaggacacccaaattgaaaaacttttgaacaaggacagattttcttcaccccggatcggagagatatccccggcacggctagtcggcgacggggagacgaggacgacgaggagcaccgccgcggcgccgccggagcggggagagaaagaggagagaactgcgcctcgtgccgaattcactgcagcccggggatccactagtt

SEQ ID NO: 52711 - DNA, 168 bp, Oryza sativa
  unsure (1)..(168): unsure at all n locations
  Clone ID: PAT_MRT4530_54981C.1
cactgctgcaagcccgcgggncgactctagaggatccccccgatgcttacccctcccgcgtctaccagtgtggccctttgatcgggttacagattcaccgtggcatttaacgggggctgcccgttgccttttggggacgggggcggaccctaaggagttgtaccaccg

SEQ ID NO: 52712 - DNA, 318 bp, Oryza sativa
  Clone ID: PAT_MRT4530_54982C.1
atggtcgccgccaagaccaccaccgtgtccacgcgcctccgccgctgcatgcgcgcgcacgacgagtacgtggtgcgcgtcggcagccaccgccgccgccgccgccgccttctcgccactgtgaccgcgcacccgggcgtggcgcgccggtgggtgcacaccacgctgtggcgccacgcccgccgcctccgctccggcgacgggatcaccgtcggcatgggcgtgcagtggaccccgccgttccgcgcgccggcggcggcggcgcggcggccgtgcacgctgcagctgtgcgtcgggcaccggtgcctggtgttctag

SEQ ID NO: 52713 - DNA, 360 bp, Oryza sativa
  Clone ID: PAT_MRT4530_54983C.1
atggctgtgcggggtggtgtgtggacaacaacgtgcagaccgacggcgggaggtcgtgcgacaccatgtggacggcggactcgtgagggcggcagccggaggtccttgcggatgatgggcgacagagggactggatttaaggtccctgctggagatgctcttagccaagtgtacatccagaagaacacggagtggagatttctgagagaggtggatggggaaggggaggtggggtacctacttgctagtccaccgtcgtcgttgctcacggggaggtgggctaagggaaggaggccactgctcaccatgttctacgctgagcgacggggaaccatagatctgacgggccccccgagttag

SEQ ID NO: 52714 - DNA, 963 bp, Oryza sativa
  Clone ID: PAT_MRT4530_54984C.1
ttcatcatctccatcccgcctcaactccgccgctcgatcgcctccacccgccgccgttccgtctacctctccgacccccggcgggcgccgccgccgccgccgcgcctaccatggctaatacgctgcgattgtatctcacttgcataaggaacactctggaggctgccatgtgcctgcagaatttcccttgccaagaggtcgagaggcacaacaaaccggaggtggagctaaagactagccctgaacttctgctgaacccagtgctcatttgccgtaatgaagcagaaaagtgtttgatagagacttcaatcaactctattcgtattagcatgaaggtcaaacaggcagatgagctagaaaatattcttgcaaagaagtttcttaggtttttatcaatgagagcagaagcattccaagtgctgaggagaaaaccagttcagggttatgatatcagtttcctgataacaaactaccactgtgaggacatgcacaagcataagctcatagatttcattgttcagtttatggaggacatcgacaaggagatcagtgagctaaagctttcggtaaatacacgtggtcggttagtggcaactgaattcctgaagcagttcatatgacacattcttggcgatctttggaaaacataaaaccccagcattgttagctatgctgtcttggcctttggcgagcaaatctggaaggatctttccaccactttgttttccttttgtaaatgcgttgacaaggatatgtgaattcttgatccaactagacctcattggcagctaaaatctgcccaggcaaaaaagattaggggaaacaaagtcatggtcagtaggttgaaatagattttttggccttttggttcaagaatcctggactgtgccggccaagttttattggaatgtggaatgtcaaaattgggggtgaaaaaaaaaaaaaaaaaaaaaaaaccaaaaa

SEQ ID NO: 52715 - DNA, 687 bp, Oryza sativa
  Clone ID: PAT_MRT4530_54985C.1
atggattcagtccgagccaaagcgcgtcgcgcagacccgaccttagcactagaggcgggcgcgtaccccgtacctggtctccatggaggctcggcggcgagggcaccgtcgatctggctggagctgaagcctcatgccgtccggccgcagccgtcaccgatgccgcggagaactacacaccggcacgatcaagatcctcctggagcatccgcagatggctgctcgcctccggacgtcgggcagcagcgccatcggcggaggtgcgcggagcatgtgatgaacgcagttggcaagtttgctgttatgtgcaggaaggagggcatcaagcaactgggagttgtgttgcatatgcagcccaaacctgtgcaccagccagaatgtaacaatgtcgcatctgttgatactgggatgtcaaacccagctgcaagggctgattccagccattgtattcctggtaggaaggctatgtccagcatatccctttccttctctggtttgactggtgaaagtagtgctggagattttaagattgtgggttcatctgctggaggcagcagagataatgctcttacacggtacaaggagaagaagaagagaagaaaggataattcagttcatgccatgaacaacattggcattccacataagtacagaagaacatcgcctagaaagcttgggcctgtttag

SEQ ID NO: 52716 - DNA, 159 bp, Oryza sativa
  Clone ID: PAT_MRT4530_54986C.1
atgggagtcgtcaaatcgtcagcagttgtgttcttgatggagtcggatcaattaaaggaaatttatccagaagagtccgagttcaaggaggatgcggcatggatcaaattgactggcacgcccgcacctcaccaagatttggacctgcactggagctaa

SEQ ID NO: 52717 - DNA, 1000 bp, Oryza sativa
  Clone ID: PAT_MRT4530_54987C.1
atgccgtccggccgcagccgtcaccgatgccgcggagaactacacaccggcacgatcaagatcctcctggagcatccgcagatggctgctcgcctccggacgtcgggcagcagcgccatcggcggaggatctgcttccctccatccccaccctatcgttccccattcccacctcctccccactacgccccgcgccgccgccagcctggggctgccgcccggccgccgtcctcgccgtggtaaggcctctcctgtcgccgctttcgtcgtccgcctcccctcccccctccctcgccccgacgtggtgtgcgccctctctccgtcgccgccatcgtcgaccgccttcctccgtcctcgccacctccctaagcaccaccaccattgtcctcccctcgaatccgcctccgtcgtcggcccatcagcgccggcgctcgccctcccgcatctcctcctctcaagtgatgcctcctgccgccattcccacaccgtgcagatcgggggaggtggaccttggcctggcggaggtccccactgcgccccgctccgccggccgccgtcgtcgccgtggtgcgcggagcatgtgatgaacgcagttggcaagtttgctgttatgtgcaggaaggagggcatcaagcaactgggagttgtgttgcatatgaggttgacgaagggggctccaggttctgttgttggagtatccctttctgatgatattcccaaacctgtgcaccagccagaatgtaacaatgtcgcatctgttgatactgggatgtcaaacccagctgcaagggctgattccagccattgtattcctgattgtggggtattgtcaatgatccttatgggtgagccaccctggcatcctcctggtcctgaaagttcatctgctggaggcagcagagataatgctcttacacggtacaaggagaagaagaagagaagaaaatatttacatgagaacaaacttactggagttataccgccggaactcgggaacatga

SEQ ID NO: 52718 - DNA, 996 bp, Oryza sativa
  Clone ID: PAT_MRT4530_54988C.1
atggaactatctagaacaacgaatcagatagtaatttttaatctattgttatatgatgacgagaagaagacctcccatttaaaggacctgcagtcacttggccccttgaagatctttcgtgtcgacttgaacgaagaaggaagcttcgatgaggccatcaccggctgcgtcttcgtcttcctcgtcgctgcaccggtggtcgtcgactcagaaaatcttgaggaggacattactgaaaccaacgtccgaggcactttgaacgtgatggggtcctgcgtgagagcgagggcgacggtgaagcgcgtggtcctgacatcgtcggtcgccgccgtgctccacgacggcaggacgacgatgcaaggcggcgacgatgggcatgtggtggtggacgagtcgtcatggtccgacctcgactacctcgctaccctgcccaaccacccatctgcaaattgggctaaggcgtacggggcagggaaggtgcggtcggagaaggaggcaagcagggtggcgcgggagaacggcatcagcctcgtcaccgtgctccccgtcatcgtcgtcggcgccgcgccggcgaccagggggttcaactccagctccctcgtcctcagcttgctcgccggccatgaggcgacgacggagatgctgaaggccacccaggatctcgccggcggcacgacgccgctggtccacctccgcgacgtctgccgcgcgcaggtgttcctcgccgagaagggcgaggcggcggcggcggcgggagggagatacctctgctgcggcgccaacaccaccgtggcgcggctcgccggcttcctcgccgggaagttcccgcagtacaatgtgaaaaccgatgggtttggcgacgttgccgaggagccaaggatgttgatctcgtcggagaagctggtcggggaagggttcgagtacgagggcaagaacctggacgacatgttcgacgatgctgtcgagtacggcaaggcgttggggatgctgccataa

SEQ ID NO: 52719 - DNA, 2369 bp, Oryza sativa
  Clone ID: PAT_MRT4530_54989C.1
acccgtgcctcccccggctgccgggttccgtcattgacgatgtggaccattcagcataactttgattagaagaatcacttttcacagttcgataacaatgcgttacatgtcatgatcctcttttgatgtaaaaacaaaagggattttacttgccgtttccaaactgtctatttaggttgctcaagtagaaaacaacagtaagtccgaatcacacaacatttttcacactaatttggacacagcaagaacagagacgctgttagttaaacgccgtccactatctagggttgttttatggttaattcagctctcaagtgtagtaccccctcgatgaagaagaggctgtcatcagccatgaacgatgaccatggaattgcaaatagattccggtatccaaccgcctttccaccggtgaaggtatagtagcccttgtacttgctgacaaactcgcctgatggccttgttcttgcggcaaactcgtaatctacagtaacactagtcgagcctttctcttgcatccctaggaacagaccaaagcaatggaatgcactttgctgatccatgttacagtgtgctgagagaaagaagccctgccctgcgagatggaacgcttgtgagtatatccgtccagatgggaaaagccgactgcactcctcacgcttcagatccaagtatgctatacactgtggatatggtcgatcaaattccaccaccttaagtggacgatatttgtaagctcgctcagcatatttcctacaagtcaaaacatctgcagcaagggtacgctgtcgatgtggtgcatcagctttgtatagaagtgcctcggtgacacatttagttgcctgttcatgatccagatcattgcatgcaaggaccttccgcagctttctgcaggtcatatgacaaaaccgaaccagtggcaacaaacgagtacccaagatctctcgcctctcctccagttttgggtattgagaacgtgcccacttgatcacaaaatcatagatggcgtcctctgatgccacctgcagatcattactccataggatggcttcaataccagccagaggaatattcatcgcttcatcttgaagcttggtcaaatctttgtacttgttggcaaggaatgccttggcagtgtcagtcagtggctgaactgcagcagccattgaaatgctcgaaggaaggtctagatagagcagtgcagattctgtagtcataggcaagcttcttagtaattgactgcaatgcctcatgcaagaaacaacctcgaatttatcagcaatcatcaagatatccagcagaagggttggctgatttgttgtcaactttccactatacataaagctcaaaagctccatgagggcattttcctctgtttcagatagacatacaatgatcagataaaagctatctgaagcagttattctaagagtagcatgcctctgatcagattctttcatgccatttgagaaaagcttataaaagaaagggctttccgcagctagaattgcagaactgatgtaaatagactttactctcaagacttgggtacactccatactccaggatgaatcgcagctgtctccatcctcaccatcttgtccaatatctggtggagattcttctatcatagctacaggttcctcattattttcctcataggtatcacattcttctgcttcaactttacaggtttccagatccgtgtattttcctgattcacattcccgagatctcgctctccggaagtaccgcaccgcgcttgctcccaatcggcagtgcgggcgaccaagagctatcccgcggagggggaagcaactgtctctgttggtggcccattttttttttgaatcaaaattaggatcacgaccaaagtattttccgacagctttctcgcggcggagctcctcccggcgtcgcttccgctggtgcgcccagtcggcgagcgaggagcacccttcccccgcggcgcccttggcccccgccgcgtcgtccccggcgacgatctcgatccgcagcacccggtcggagaagttgacggagttgaaggcgaacgcgaagctcgggcctcggctcgcccgcgagaagtccgggtccatcccccctctcctccccttccaatcaaccaaaccgcactcgtgcgcccgcgacctcctctcctcacctctccacctccaccgccaccgccgcctccatcgccgaaaccctaaccctagcgagagcagcagcagcagcttccagaaggagaaggagcccgcggaggcgaggaagaagaggcggaggggggcgtggtcgtaaatacgcgcgaacccgaggggccaatctgcaaaagcggacgaatcgcaaagcctcgtgccgaattcctgcag

SEQ ID NO: 52720 - DNA, 160 bp, Oryza sativa
  Clone ID: PAT_MRT4530_5498C.1
atggacatggccctggtcgcctgcggccatggttgggatggcgcgtcagatgctgcatgctctgtgcagcgaaggatgtgggtcggggtgcatgttgggaacatgctattccgaatacaccttggacctctaccgaacctctgtgccttttgggcaggcg

SEQ ID NO: 52721 - DNA, 871 bp, Oryza sativa
  Clone ID: PAT_MRT4530_54990C.1
atgatagatagtgggggtaaaaacacgaggcgagacgacacggagaaaaacaagaaagaggggcaacacaaacaaattcagcagaatgcgggccactggccaccaggaaacacaaccacgggaaacacccacagcgccaaactcggtccgctgcgcaccggtgacgaagaaaaggaacataacaaatcaggggagagcccctccaaggccccctccgggaagtcagaggcgcccagcgaggcgcccgacgccgagtccggcgcggagtcgccggaggccggcgaggagtccgggaagtccccggcaagcgcccccaaggactcctcgtcgagctcttccgaggaggaggaggcgtcgtcgccggacagcggcgacatggaggacgagacggccgccgaggccccgaccgcagaggaagcatccggccccgcggcggacggcccgccggagccggaagcagactcgccggcagcagactcgcctggccccggcacagccgacgaggcgggcagcgcgggcatgagctccggcgtcacggcggccgtggtggccgccgccgccgccgcgctctcgctttagatggcgttggtgtttcggtggcttatatattagggaggagctcggagggccggcgattcttgaggagttcggcgatttaattaggccgcttgctgcttaatttctccttagaaaaaattaggcaccttgggtctcggctgatcgtttggccgtttgtaatttgaacaacgatgtactaatacacagttgtgtctctgaatatggctgtatttgtgttcccaaaaaaaaaaaaaaaaaaaaaaaaaaaaaaaaaaaaaaaaaaaaaaaaaaaaaaaaaaaaaaaaaaaaaaaa

SEQ ID NO: 52722 - DNA, 180 bp, Oryza sativa
  Clone ID: PAT_MRT4530_54991C.1
atggcgcccgctaaactaaacaaatactccagcactgtggggcccagcggggcccagcggaggcgggaccagcaggtcggcgtcgatgcatgtgcggcgatatgtgcatgtgtgcttcaactgtccggcgtggcagttggcaagagtgatgctttcaatggcatagcatctgacctgtaa

SEQ ID NO: 52723 - DNA, 1969 bp, Oryza sativa
  Clone ID: PAT_MRT4530_54992C.1
aagagaaacaaaccaatctgcttctaattccattgtaaattgccgcatatttttttgtcggcacggtgaccacaaaacatttttcggtttgatgactacaagagggtaagtactaagtacactgtacacacccttgcatggttctttttttttttttttttgataacaattctgaggatagcttgttggatttttattgtatactgaatacatcaacaatattacaatcttctaaaatcctcccataatatgaatctcaagaattgaacgaatgaccataagcgctatattacatataacttctgtgagtgagcaattgaaagcccttgatgatgaacattcctaagaatatatccacctaagtttttaagttttcagccaatagatgctacagggtaaattctcttcacaaaaccatggcctgagggggtccgtagccgctccggtgcttcttctgccatgtccaggcaaccctgaggctctccaggagatcggtatgttgagcagtccagttcagctcgctgttgatctttgcgggatcgctgtacacttcggcatagtcaccgggtcgacgagggaagtagtcgaccttgatgtcaactcctgttgccttcttgcaagcttcgacaaattctttcactgacctacctttgcctgtgccaacattgtatatgccaactttgcccctttccgccttgttgagcgccttcacatgggcgtcaacgaggtcagtgacatcgatgtaatctcttacacaagtaccgtcaggtgtttcatagtcagtacctttaaccttcaaaccaggaattatccccagtgcagcatcaaagcatgcaccagatatacggccatgctcccgtaattcaggttttggagcctcgccaagccttccttcagggtcagaaccaatgacgttgaagtatcttagaatcatcacagccatgtctgccttcttggatttggaaaaatccaagatgatgtcctctgccatcttcttggctttaccatatgggttgatcggaaactggggagttccttcggtgataggcatcttctcgggttctccataggtggcacatgtgctagagtagatcagggttctcacattgtgtgctgccatagcctctagcacaactaaagtgtttgaggtgatgttatgatagtacctcaaaggctcaagtgtgctctcaccaacataagcgacagcagcaaagtgcatgacagcatcaaaagcattttctgcaaatattctattaacagcttttggatcgcctaaatcagcatagatgaactgcaaccgcccaggctctgaaaacaagttctgaagaaccttgattgcccccatatttcctcttgaaagattatccactatggtgactctgaaggaatctttcagcagccgaagcgcagcgtgcgaaccgatatatccagcgccgcccgtcactagaacatgcgtgactccgggttcatggatggagaacacactgggagtcctcctatggcagggcggctgtgtgagcatgacgacgcacatggcggtgaggagcgccaccatgaggatcttactgaggtaccgcggcttgcgcttcggatcggagaagtccatgtctgagatgaaataccaagatctggcaggcctctgctggggcctgttcctgttggtgggaagcatctggagcagcagcagcacaccaaatcccctcccagaaagaatcaaagttcctcggagacaagaacgccagagatgattcctcctgctcactgccggccacccggactagtagcctaccacctgctgggacgacttggctggctgcctcggcgacggcggaggagaggagggaaagcaggggagccacctacttcccgaggcagtggcggtggtcctagctctccctctccctctctcgttggccgcgagaagaggcgaggcgaggtgaggttgttgctcccggccgggcgggtccac

SEQ ID NO: 52724 - DNA, 435 bp, Oryza sativa
  Clone ID: PAT_MRT4530_54993C.1
atggcaaccgagcagccgtcggagaagaagccgccagcatcgggaggagagaagaaggccccgctccccaaggtggtcacgctcaacaaggccctcaagctggcacagacatgggtggacaaaatgagtgcatcagaccaggatgaacccaaagctaaggattttgagggtcgcccaccagggcttggtcttggtgctaaagtggcacctaatgtaaaacgtgcggctcctactgatccagtggaaaggaggttgctggggaaggtgaacgcgcaaaagagaaaggccaccgaggaggagaagacaattgctcaggaggtgaatgatgatagtgatgatgacagtggtgagactgaaagcagaactagtgcctttagcaagaagaggacggcgccttcggttactgccatgccattggggaagaaggccaggtga

SEQ ID NO: 52725 - DNA, 654 bp, Oryza sativa
  Clone ID: PAT_MRT4530_54994C.1
atgagcaagaggagcaggagcatgtgggacatgcaggagttcgtcggcagcgtggacacggcccgcgtgctgatgctcctcgcgcagcagagccagcacggcctgctgggcggcggcggcttcgccgccggcgcgcagccggtggtggtgcgcggcggcgcgcacgaccgcgtgttcgagtgcaagacgtgcaaccggcagttcccgacgttccaggcgctcgggggccaccgcgccagccacaagcggccgaggcagcagcagcagcacgcgctcggcggcggcgccggcgccgacgacgcggggctatgcctcgggaggcagccgacgccgccgcggccgcagccggcgaagccgagggtgcacgagtgccccgtctgcgggctcgagttccccatcgggcaggcgctcggcgggcacatgcgtcggcaccgcgcggaggccgaggcggcggcgacaacgacgacgacgacgacgaagaacggcgacgtaggcaaggcggcggccgtgaaggcctgcgacggcggcggtgtctgcctggacttgaacctgacgccgtcggagaaccgcgcaaagtgccggaacgtggtgggtctcggcgccggcgggcagggcgtacacaaggcgctcgccatgttggattgtttcctttga

SEQ ID NO: 52726 - DNA, 246 bp, Oryza sativa
  Clone ID: PAT_MRT4530_54996C.1
atgggctacccgtgccttcgggtcagcccggcatggcccgacccttattgggtcatgcctaggccgcaggtggagcacgtgggccggcacagcatggcacggtccggcatctgtgacgtgaggctgtgggtggccgtgagggagccaactggtggtggtgatggccgcgtgagatcgggcgccatggccccctttgggagcattgtcgaggcatcttccacctccctgatggaactttccaggtga

SEQ ID NO: 52727 - DNA, 180 bp, Oryza sativa
  unsure (1)..(180): unsure at all n locations
  Clone ID: PAT_MRT4530_54997C.1
atgctgatggtgctgagacttggatttcgccacgccggccactacaggaataagttcatcggagnatatatangnggnnncnncgncnnngccgnnnnccncnnncnnaaanccggcacacaccgcncccgccccgaggggagcgggaagganagctcgcncgagcccaacnaagagggg

SEQ ID NO: 52728 - DNA, 654 bp, Oryza sativa
  Clone ID: PAT_MRT4530_54998C.1
atgggcgtgggctggcagcggccggccggcggtggcgggatggaggcggccgggcgcgggctggcggcagccaggtgcgggctggggctggcggcggccggctggcggcggcgggattgcggccgggcgcgggccagcgggatggaggacgggcggcggcggcccggcgtgggccggcgggatggaggccggtcgccggcagcctcgccctcccctcctccagatccggccagaggggaagcggcgggatggaggacggccggcggcggcccggcgcgggccggcgggatggaggccggggacgggacgttggctgccatagccacggccaaggctgaggcggagaaggccgaagggagtaagtgggggtggaggtggcggcgcggacgaccgcttgggcttcaccagcgaaggtggcttctcccctgccgcctgctccgacttccccaccacgccatcgcctccgcgtgggctgcagatgctgatgccgacaccgacctggccacgctcgagcggcgtcgggaacaggacgcggaggaggaggagaggcagacgcgagaggagacagccacggaggaggaggccgttctcgtgtcagctgtgcccgccatagcaccctcccgtgtgcccaccgcgctcaccttgcgcacctag

SEQ ID NO: 52729 - DNA, 589 bp, Oryza sativa
  Clone ID: PAT_MRT4530_54999C.1
aagaggaggacaaagtaagcgcggctaagcttcgtgcaggcgcgcacgccaagtcgtcttcgccggtggtcgacgtctccaccgatcgatcgagatggcgtcgccggagaggcgatcgtccacgacgacgacgtcgtcgctcctcggcagctttcggacggcggtcaagaaggtccggttcctgctctccttcagcgcgacgcggtggatcctttcctccatcgtcggctcgcgcgccgggccgcggcgccgcgtcagcttcggcccggcggcgcggccgcctagcctgctcgactacgagggcagcgccatcgtgtcgccgccggccaggtcgggggcgccgtccaggacggcgagcctggggccgtcgccggcgaggaccgtgacgcggacgagcagcgcggcgtcctcggagctgctgaggacgtcgagcgccgggtcgtcgtcgtcgtcgcccgccggcggcggcggcgacgacgacatcgaccggcgagccgagctgttcatcgccaacttctacaagcacatacagatggagcggcaggtgtcgctgcagcttcggtacttggacaggacgccatccaggtga

SEQ ID NO: 52730 - DNA, 1813 bp, Oryza sativa
  Clone ID: PAT_MRT4530_5499C.1
atggcggtgctcggctcccttctgctcctcatcctcgccgccacgctctctgtcgctgttgcttatgatccgctcgaccccaacggcaacatcaccatcaaatgggacgtcatgtcgtggacacccgacggatacgtcgcgatggtgacgatcaacaactaccagacataccgtcagataatggcgccggggtggacggtggggtggacgtgggcgcggcaggaggtgatctggtccatggtgggcgcgcaggccacggaccagggcgactgctcccgcttcaaggccaacctcccacactgctgccgccggacgcccgccgtcgtggacctcctccccggcgtcccctacaaccagcagatcgccaactgctgccggggcggcgtcctcccggcgtacggccaggccccctccgccgccgccgccgcgttccaggtcagcgtcggccaggccggcaccaccaaccgcaccgtcaggctccccaggaacttcaccctcctcggccccggccccggctacacctgtggccgcgccagggtcgtcccctccaccgtcttcctcaccgccgatcgccgccgcaagacccaagccctcagtaagttgactacaccttcgtcttcgtcgccggcgccgccattgatgatgtcatgcttgtgtgcagtgacgtggaacgtgacgtgcacgtactcgcagcacctggcgtccaagtacccgtcgtgctgcgtctccttctcctccttctacaacgacaccatcgtcccctgcgccaagtgcgcctgcggctgcgacgcccacaagccctgcgtccggagcgagagggacgggaagaggctggcggtgacggggaagaagcacgacgcgaacgcgaacgcgcacgggcgcggcaacggcgtcgcggcggcggcaatggcggcgccgctgctgcagtgcacgacgcacatgtgcccggtgagggtgcactggcacgtgaagctcaactacagggagtactggcgcgccaagatcaccatcgtcaacttcaactaccggatgaactacaccgggtggacgctcgttgcccagcaccccaacctcgacaacatcaccgaggtcttcagcttcgactacaagcccgtcgtctcctacggctccatcaatgatacggcgatgttctatgggctgaagtacttcaacgaccagctgatggaggccgggccgcacgggaacgtgcagtcggaggtgctgatgaggaaggacgcgaggacgttcacgttcaggcagggatgggcgttcccgaggaaggtctacttcaacggcgacgagtgccagatgccgccgccggactcctacccttacctgcccaacgccgctcccccggcggcggcgtcgctcgtcggctccgcggtggccatggcggccttggtgttcttcctcatggcgtagtgcttagaacctgcagcagaattagcagataggaggatggttttggtctgaatatgatttgtgttttgatgttctgaacatactgggaaaaattgttttttttttaaaaaaaaatcttgtttttgaatggtaaaaaaattctgtaagtggaggggatatgagcataattttgggaacatatttgtacgacacaatcactcaatcaggatggaatgaggcgacaatgacgtttcacattctctgactgaagtcagttacatcagtagcatttaaaaattgttcactgaatgctgatgttgcatctgaaatgagctgctcagttttcatataatggatcattaggaaaaatcaactaagcttcattttgacaagtacatgtctcattctgata

SEQ ID NO: 52731 - DNA, 1619 bp, Oryza sativa
  Clone ID: PAT_MRT4530_549C.1
ttttttttttttttttttttttttttttttttttttttccatcctccaacatgtatttttctattcgattgccacgacgcgaaataaacaatgccaccacccttaagacccaattgacctcttctacagtttctatccatcacacaagggcagaaagtcataacagataataatacaacacggagaaaaagattaaagagaatgtactctggttcattaacttagtgatatctctaagctgccaacaaggtgccgtatctgatagcataacgcattctcaaaaagggaaaatgcaacaactaaccccagtaacccatgaacgtatgctttcctcaaaatgagaaccaacgaattcggtacagccattggtggcacttggcttcatcttgcactcgtgcttgtgctggaagccttctgttgtttggccttctcaaccaatggctttagctgcttcttttccgccagcatcttgagaaagttgaatagaaagggaatgtagttgtgcttcctcctgatgttctccgtcctccacttcttgaacttctcttcttccatgataatcttctcgctgacagtctcaatggctgatgtcacctctgcaagttcgctgtttaaggactctgctgctgaggactcattcatctcctgcaaaagctggtcccttctcttctccagctccttcagctcagcagtatatacatccttcctattcttaatgatggccataaggttaaacctaatctcgctctgggaatagcgttcaattcttttttgtataactggctgcaccatccttagccaatcaagatcatcaggcccaccagaacactgcccaaggcttatgggtccttccttcaatccatcaagctcatagaggactccttcaaaaggtaaatagcttatgaaatggtacacttcatcatccttacccgcagctctttgctcatctgagacaaatggctcaggcctggcaaaactgttatgggctgtgcgaatagaatcactgttgttaatagcaaggcccttcatgtcaggtgcaaaagctcctgtgaattccttcaagttggatagttctggacctatgtcaatttctgggcgattcatgaggattgacagaatagcttgagtagcacatgcattagggatgacctggctagcaaagaaaaggtttgggtttggatctttgacgacaggccgttcatccttttccccagccatccacttgaagagaaaaattagcccataaactggccgcagttcactaatagagtccacatcaagagagtaaagttcttccacctgaacaccttttacttgcatctcctggatcaattcggtgaaaacaccgggatcagactcaatcgtgcaccacgacatcctcgcgaaaaccctgaaagattacggtgacagccagggggcgcggatccaacctgggacagaaccacccccaaaaccgggatggggatgcacaaggacggcggcggcggcggcgccccctcccctgctctgctcgccagatgcgcgacgagcggaaggcggcgggggagagatactcgagtcgaggcgccctcacgtggctcctacctccgcccgatccgcagcccggggatccactagtt

SEQ ID NO: 52732 - DNA, 309 bp, Oryza sativa
  Clone ID: PAT_MRT4530_54C.1
atgccagggaccggtcatggctcggaggtggcggcaagcatggcagatcatggacttggccgtcgcagtcgctacctcctcgctctccggcgctctccgcccgagacggcccccgatcgtcgctgccgacggcgtctctcctccctcccgctggttactgtcgacggcgacagcgagctggagatggagatgctgctgaaggcgtcggcctacatcctcagcgccaccggttcgagcatcatgtacaaggccgtgctcaccgtccgccgcatcggcaggagcggcggcgtcgaccacctcgatgcctga

SEQ ID NO: 52733 - DNA, 2475 bp, Oryza sativa
  Clone ID: PAT_MRT4530_55000C.1
atggttgcaagctctgcctctctgctcctcttcactctgatccacccacttttgtgcatctcagctcaagatttcctcaagccaggctcctccctgtctgtacaggatgtgctccattcaccggatggcactttcacctgtggcttctacaaaatctcccccaatgcctccaccttctctatctggttctccaacttgaccgaaaaccccgtcgtctggagcgcaaatcctctccaccctgtgtacacctggggatccaaagttgagttgaaattcgatggtggcatgtttttgaaagattatgctggccagattgtgtgggctaacaacgttagctcttcagatacccagtatgctcaagctcagctcttggacaccgggaacctcgttgtgaagggcgaaagtggtaacactctgtggcaaagctttgattctcctactgatacattgttacccactcagagcatcactgctgctacaaagcttgtgtctacaaataggttacttgttcctggccattacagtttccgtttcgatgatcagtacttactttcactgtttgatgatgagaagaacatatcttttatctactggccaaaccctagtatgactatttgggcaaagctaagaagtccattcaacagcaccacaaatggggttcttgacagctggggacatttccttggaagtgataatgcaacattcatagctgctgattggggtcctggcacagtgaggagactaacactggattatgatggcaatctcaggctgtacagtcttgataaggtagacagaacatggtcagtgacatggatggcatttcctcagctctgcaaagtacgcggtttgtgcggtcagaatggaatatgtgtgtatacacctgttcctgcctgtgcttgtgcccctggttacgagatcatcgacccaagtgaccggagcaaaggttgcagcccaaaggtcaacctcagttgtgatggacagaaggtgaaatttgttgcactccgcaatactgatttcttggggtatgatctgagtgtttatcgttttgttcctcttggattctgcaagaacatatgcttgaaagactgcaggtgtaagggtttcgcctactgggaaggaactggtgattgctatccaaagtctgttcttcttggtggtgtaacactaagtaactttggcagcactggtaccatgtatctcaagcttcctgagggagtaaatgtgtcaaggtcctcatttccccattcacagcctcttggtcctaaatatggccctaactgtaatacaacaaacaacatttccatagcagattttttggatacacttaatagtgggcagagcatatcaaagtttttgtatttctacgggttcttatcagcgatatttctggcggaggtattatttgttttattaggatggtttattttgaggagggaggccaaacaactcagaggagtatggccagctgaggccggatatgaaatgatagctaaccattttcgcaggtacacctacagagagttggtgttggccactagaaaatttaaggatgagcttggaaggggagcatcaggcgtcgtatacaagggagtcttgaaagacaatagggtagtggccgtgaaaaagttggtagacgtaaacgaaggtgaagaagaattccagcatgaattgagtgtgattagcaggatttaccatacaaatctagtgagggtttggggattctgttctgacggtccacacaggatattggtttcagaatttgtggagaatggttcgttggacaaaatcttgtttggcagtgggggctcacagaacttacttggatggacacaaagattcaatattgctcttggggtggcaaaaggattggcatatcttcatcatgaatgttctgagtgggtcatccactgcgacatgaaacctgaaaatatattgttgggcgagaatatggagccgaagatcgccgactttggccttgcaaagctcctgaacagagatggatctaacatagacatatcacggatccgaggaacaagaggttatttggcacctgaatgggtttacagtctgccaataacagcgaaggtagatgtgtacagcttcggagtcgtgctcctcgaattgctgaagggagctcgtgtttcagaattggaaaagaatgatgatgaggacgtgaaaatggccctgggaagggtaatcaggctatgctcagagcaacttaagtcagatggcgacgatcagttttggattgccgacttcattgacacccgattgaatggccaattcaacagcgcacaagcaagaatgatgatggaattggctgtttcatgccttgaagaagatagagtcagaagacctaccatggaatgtgtggtgcagaaacttgtatcagttgatgaagtcagtagcacaccaacaggaggaagtgaggaaccacattcaaccagaacttcatcactaataagttattaa

SEQ ID NO: 52734 - DNA, 359 bp, Oryza sativa
  unsure (1)..(359): unsure at all n locations
  Clone ID: PAT_MRT4530_55001C.1
gccgcctccaccaccgttcgtccgattcctcgccaccacacccacccanccaccaatggcgtcctcccgcctactcctcctggncgngctgctcgccacggcggcggtgctggnggngtcgnagangtngnagcannnacgnnnacgaagnncacgncgnncgatnnncgagaccangnnnanannnncnnacgancccnannagtcgctnanttnanganngtncttntacgnagtncnnnnnancanatcncnnnnnttncgaatcntancngnntnnccnanncacnannaggantntacannacntnatncataccancncantnaaaangnanntntnncnnnttttnntnnnc

SEQ ID NO: 52735 - DNA, 289 bp, Oryza sativa
  Clone ID: PAT_MRT4530_55002C.1
aaacattagactgcttgccattttaatatatccaacattaacaagggcggtagtagaatcattagtacacatggttctacctcactctgtattttggcttttttttttctaacacattttaaatgatgggcctgaaacttaacagaagctgttttactactacaagggatgcagcaccccataggtcaaaatgttccccctttttttttcagtttttataccccgggaagaaacaggctcggcctaaagtccgaaaactccagggtttttcactagacagcagcagcag

SEQ ID NO: 52736 - DNA, 1566 bp, Oryza sativa
  Clone ID: PAT_MRT4530_55003C.1
atggcggcgaggccatgccaggcggcggcgagacctgggacggcgtctacgcgcattcgagaggctagccgagctaccacgcgagccaaggaggtgcgagggcgagctgtggcgaacggcggcgggcatggcgcggcgtgcgacaaggggaagtggttcggtggggagctcaccaacgagataaacggcgttggcggcgcggatggagtcgcggcgaggtggacgcgacggcggggcggcgcggcaccgagggtgcacggccggggaagaagggagggagaggtggcaatgggcagcctggagctcctcgtcacgcgtccacgcacgcactggctcctccggtgctcggtggcggacggcgagggcgagagcggggcgagcaacaacaatggcgcggcggtgatggaagtgaaacgagagaaggattcgatgggaggggctcgggtttttatagcgaaggcgagatcaggtcatcgatcgatgggcagcagctccggctccgaccggctacgcgacctccaggccttcgacgacacaaaggccggcgtgaagggcctcgtcgatgccggcgtcacaaccatccccgccatcttccaccaccacccgctgctactggacgatgcggaggaggatgcggatgttatcccggtgatcgatctgcaggcggacgttgaccgaggccatctggttggtcaggtgagggcggccgcccagtgtgtggggttcttccaggtggtgaaccacggcatccccggcgagctcctggaggagatgctggcggcggtgcggcggttcaacgagcagccggcggagggcaagaaagcctggtacagcagggacagcgggcggagggtgaagttcaactccaatttcgacctgttccagtcgccggccgccaactggcgtgacacgctgttgctggagctgacgccacggccggggccggcagcggaggagatcccaccggcgtgcaggggcgtggtgggggagtacgtggaggcggtgcagaggctgggcggggcgctgttggagctgctgtcggaggcgctggggctcccgccggagtacctcggcggcctcggtggggggctggctaccatggcagcgcactactacccgccatgcccggagccgcacctgacgctgggcaccacacgccactccgaccccagcttcctgacagtgctgctgcaggagagcaagggcctgcaggtgctcatgaggcagcgccagcggtgggtggacgtccctccggtggccggcgctctggtggtcaacatcggcgacctcctccagctagtgtccaacgacctcttccgaagcgtggagcaccgggtgttggcaaccaccgccgccgcggagcctcgcctctccgtcgcctgcttcttccgtcccgactacgcctgcaccagggtgtacgcccccgtcaccaccacgccgccgccaccgctctacaggagcaccaccatgccggagttcctctcgcattacagagccaaaggcctcgacggccgatccgcgctccaccacttcaggatccctcctccttcatctccaccacattaa

SEQ ID NO: 52737 - DNA, 318 bp, Oryza sativa
  Clone ID: PAT_MRT4530_55004C.1
tcttcatctgcctcaaccaccaccaccaccaccgccgccgctgccattccttgatccagtgaattgaatgccaatgacgacaattatcaaggaggctggatggtccaaacaacaacaaccacccccaaaaaagaaggaaaaaagaggacgagatctttgtgtgttaggagtgtgtagatttgtgtcactaattttgatccctgtgattaacctcgcgagagagaaaaaagaccttagctgatggagtgctgatctagtagtgatcttgtaatctgttgcctctgatttgtaatgtgattgttacaacccttgcattgc

SEQ ID NO: 52738 - DNA, 471 bp, Oryza sativa
  Clone ID: PAT_MRT4530_55005C.1
atggcccgttgccgctgcctcgccctcttggcgtgctttgccattgtgcccctagagacccttcgccatcacctcgccctcttgccgcgcacagccatggcccgtcgccgccgcttcgccctctcggcgtgcttcgccatcgtgccccttgagagcggagaaggccgtcgctgcttttcctgccgccgagctccttcgccacatcaaggccgagcgccgccttccccgcgtacccaagttaccgccgctctagtcgctcgtcgccgaagctccgctcgccgccagagttgggaaacgtcattgtcactgtcatgcttgaaggctgtcatcgctttccctgccaccgagctccttcgctaccgcatcgaggccaagcaccgaagttccttcgctgccgcatcgaggccaagcactgaagttgggaaattaacgaggagtggatggaaaaccaacggagtaacacggttctaa

SEQ ID NO: 52739 - DNA, 469 bp, Oryza sativa
  Clone ID: PAT_MRT4530_55006C.1
ttctccgtcgttaagccagatcgcccgccgctccgtgccctagcgccgccgccgccgccgccgacaccggaatcgccgggcagactgcgagcgcggagccaccagcgtggggcggcgggatgggcgaggaggccaagtacctcgagacggcgcgggccgagcgctccgtgtggctgatgaagtgccccccggtcgtctcgcacgcctggcagggcgccgtgtcctcctccgacgccgccggctccaaccctaaccccgtcgtcgccaaggtcgtcctctcccttgacctcctccgctccgaggagccctccctccaggcaagcctcccccgcccactccctctcccttgcggattcgaatggtagtacattctcttcgagcaaaatgatatgaccctatggccgtgggggttggtaatgtatgaacctcaaatgtagatttcatgcattatgcttgggaaaaatgggac

SEQ ID NO: 52740 - DNA, 248 bp, Oryza sativa
  Clone ID: PAT_MRT4530_55007C.1
gttgtccatagtagtagaatccaacaacaatgaagatcattttcgtatttgctctccttgctattgttgcatgcaatgcctctgccgccggtttgatcctcttagtcaaagttagaggatccaatatcaactacagtcgcatctcctactacagcaacaagtgctcagcccatgcagtgagttcctaaggttcaacagtatagcctagtggcaacccccctgcgcctgcacctgcctccgcgtcagtt

SEQ ID NO: 52741 - DNA, 222 bp, Oryza sativa
  Clone ID: PAT_MRT4530_55008C.1
atggagggcggtgggcggcaggagtggagctgggcggcggcggcggctggcgggagagggcggccgccatggcctgccgcagaggtggcccgccacccacggatgaagccgagtcgtggctcctcagggtggcgacgtctcgcgctgtcgcgcaaggtggtgtttgaatttcatgaagataaagataaagtgtttcacgttgatgtgatggaaaatgactga

SEQ ID NO: 52742 - DNA, 3609 bp, Oryza sativa
  Clone ID: PAT_MRT4530_55009C.1
tcacatagtgcacccattgccaccattgcaagcacatttgcgctcaaggtaatctataacccaagcttggaaacttgcatcacttgcaactcgcagatacgaacgaaagatttcttgttcaggcttggcaagaaaggttgcaagttcaattttgtcacttgctgggatggtgagatcttctatgcgcctccaaatacttgcattaggacctcctacaatggattgttcaactgatgcaagtttgttagcaagcttaaggatactacctgccagctcatcttgttcttcttctttgtggcttgttttatgcttcagagtcttcttggtaggtgatttcacagatctacgcttatgccctgaataagtgccatcagtagtaggactattgcgagctatcgtgtcagaatcatggccaccatcttccaatgcaaatatgtattcttccaactccttgatgctaccactgccatcactatcactgctaccatttgcattgaaccggtcaattgctagtgaaccatcagcttttgaacaaccaacaaataattcttcaaaggggtgaaagaatttgataggcttagtcaagtagttatatttagttgtaccaagtttgtttgaatccttctcagatgggtcaatgttaaatttgcatgatgctgcatcaaaaccatagccacttttccctaaagctgcacaaatccaactccatttttccttgcatagccttaagtgcctgtggacttggcttttggtgactctaatcccaaacttgtcttttaaagctatagcacattgctggtggtgttgtttcttccacttgaaggtactaggtttgtctttgcggagctctatataccactcaagcatgaactgagtagcatcatcactccaactgatatacttctcacgagagccaccttcctcgctagtaccttctgtacgctttcccatacacgtcttctcatcgttgacaaattcatcagacccattctcaagtatccaattatgaagagcacaacaagcaataaccaccattgattgggctttcagtggtatgaatggcttattcataagaatcttgaaacgattcttcaaagcaccaaaagctcgttcaatcgtagtccgaagtgaagaatgacgatagttgaaaagctctttagggcattttgggccttgaggtccatgtggcccttgagggccacggaactcttttaggtggtaccgaacacgacgataaggcggcaatatacccggcctagcagcatacccagcatcagccaaaaagaacttcccttcaggtattttaaggccatttggtcgagacagtgcatcttgcaacacaagggaatcatgagctgacccctcccaacctgctaggatatatatgaacctaaggtcaaagtcaacagcagctaatacattctgtgtggggtatggtttgcggcctctaaacctatccaccttcttggctggcacacttgccctgatgtgtgtaccatctagtgctcctatacagtccttgaaatatggataaaatttgtttttcttgctggtgatcttactatgtgtattggtagacctgatgtaaatgagttctcgagctatctcgcacatggctcgcagcacaatacgaaaatacctactcacagtctcaccggatcgccaaaatgagaatccaacacatgaaacagaatggtgttgtccaacctttttcagaaacattgccacttgctcctctactgaaacatgaaaggtgtcaactagtagtcccttgttcctaagacgagcacaaagcttgtagaatactgcacgggacattcttaattgttgagtgcacgtcctatctgaaatgttgatcagcctgattagttcacttgttctccatacatccctgtggactaggggcccatattttacccctttgcgactactcctcctacgatatttgttcctcaaccatatgatgatcaaaagacaaagtaccactacagccttcttccttagcaagaagtgatgcgtatattgttgtcgagtgttctccatcttttcctgtagcaatcgatggtgtttttcacagcaactgagcacgccggagtcagtacagctactgtgtttacttgacccataaattggtaagcccaacataggccatgaaccaaactggcccttaatcttttctaaaggaggaaacctgtgacctgtgctgagtaggttctcttgctgcctgcagggggttcggagttttattctctgatccccagggcatctacagtgtagcaaaatagcaggtacttcctttcggtaaggtacattggtcgcgggcctcgtattcggtgtttcagctgcgtggtctggaggaaggcggagacgtggctcggtgaggccatcgatcgattttccggtttttgagtttgacagggctgagagcatgagacgctggagttgttggatttcgctttttgcccaatgcagtctcacggccacgctgaacgctgcctccgagcgcggtgattttgcattgcgatcccgtccaataatgtgctgaactttgtattcatccagcattgattcattatcaagagcttctgctgcagcctgcgagagcaagagatggcaatcataagctccacgaatctcaacttcccgccattcttgaacaagcgcacagcaacaacacatcaaatgtgataggaaatcatcaatgcaacctccatgggcctgttcttcgcaattgaagcaatctttgagaatgttccacaggggaaaaagaatgttctcaaaccgtggtgcagtgcaggcatccttttgcttctttggagagtcatcatgatatgtttttgcactatcttcactgacttttgtgtgattagagtcagctttttcagaaaccttaggagtggcacatttctctggaatcgaacttgccacagttttagtcactcctaggaggtgttgaataacctcacattggcccatatccatgttgctttgtgatctttgaagttctacttggagcttctcactttcctttcgaagcgcttcgttaaatggcaagtttggataagagcatgacagagtcttcttgagcactaccgtaggatttgtacttggatcagggtttaacagagcatcttgaacctccttgtcttcatcatcaaaagaatattcacattgatccctttcaatgtattccatccgctccctgacgcgggcgttgtcgacgagggtgatgagcgggacgaggcggaggtagttgtcgatctcgttctgcgccttgcggaactggtacacgatgttccagcccatggcgaggaggtagaggtaggagcggtcctggcaggagtggacgagcaggtaggcgcggcggagcgcgtcctcgagctgctccagcggctcccgcgtctccgggtacttcttgagctccgacacccgcagctgctccagcaggccgccgatgagcttcagatgctgcgcgaaccggcggcagttgcgcttgtgcagccgcgccgtcgacgccgccttcacgatcatggagatgagccgcaccgcgtcgagccccgtcagctgcacgacggtcgccacatccccgaggttctcccacgacgccat

SEQ ID NO: 52743 - DNA, 252 bp, Oryza sativa
  Clone ID: PAT_MRT4530_5500C.1
gataggtgtttttttttttattttttttaccttatgttttttttgttaaaacagggaagatagttttttttttttttatttcaccctaggtttcacatgtcacatacgatgatacctgggcttattttttcacttccgaactacaattttgggaaaattcagtacaagacaccgccaagggtggtaatgctttcgggggccctatgggaccaagggtaaattccatatgtggatgggaaggtaaaagccaac

SEQ ID NO: 52744 - DNA, 219 bp, Oryza sativa
  Clone ID: PAT_MRT4530_55010C.1
atggcagcttccggcagcgcgacgacggctgcaggcgccaagcggcgtgacgacggtggctcccggcgacgtgtcgacaccaccacacaagaaaaaaaggagaggcgaggcgaggagaaaagggaaataaataaaaaggaggcagcgccggacggacggcaagacggcggctgcgcgcgcgtctggacagcggcggcgcgcctggtggctggtgcgcgg

SEQ ID NO: 52745 - DNA, 300 bp, Oryza sativa
  Clone ID: PAT_MRT4530_55011C.1
atggctgagctactgcggcagagcgatggcgtatgcttcgccgcgacaaaggcgccacgaccgctcctctcccacgggcagggcacggcatgcgaggacgatctcgccatggactacgaacgtggaaagaacttggccaacccaatgagcatggggaggggggagctgttcccgccatcccgcaccaccgacaccctcctcctatgccgacacaaccgcgggggaaggaaggggaatgaggcacgtggtcgaaggagatgctcccacgccgttgatgccctcctcctgcgccgacgctga

SEQ ID NO: 52746 - DNA, 318 bp, Oryza sativa
  Clone ID: PAT_MRT4530_55012C.1
atggctggcgacgaggtggctggcggctgggcagtgcctagcgacatggtggtgcacgagcgcgggcggcggctgggcggcccacgagcgcggacggcggcgcaggcggcggctagcaacgcggcggcccgagcggtgaccggcgacgcggcggcgcacgagcggcggccggcggcacggcggagcatggcaggcaagcccagtgggtatccgtcgggcatgcccgtgcccgacgggcatgggcatgggaggagtggagacggctcgtcagtggctcggctggaggtcgtcttcaacctcccgactgagcggaagtag

SEQ ID NO: 52747 - DNA, 1196 bp, Oryza sativa
  Clone ID: PAT_MRT4530_55013C.1
tcttttttcttttttttttttttttttttttttgacaacgaagcacatcttttattcagatcaatacttcagcagaacaatggttcccaatacaagtgcatcgatcgttctgaaattaaagcaacagcgaactgtcgtccataaaagaagttcacgacactccgacccactttcaaaaactggaaccacaataatcggattttcgaggtcttctcgaccatttatgaactaatgccaagctgagtgcgccaatcctcgagctgtttttttacttgctccgagcctgtagagccgtaagatatgaacttgtttacggcgttctccactcccagatactcgtacacatcgccctcaaaaacggggtgaacagatttcaggtcgtctagtccaagttcggcgagctgacagttcttcgagacgcatagagctacagaccttccaactatctcgtgcgaggttctgaacggcacgcccttcttcacaagataatctgctagtgttgttgcatccaaatagccagcaggcagcgaactttgtattctttttgagttgaaggagatattttgagcaaactcggtacatacttcaagcattcctaatacagccttcacgctgtcaaacaagggttccttgtcttcctgtaaatcacggttgtaggcctgcggaagtcctttacaaagggtgaggacagtcatgagatctccaaaaacacgagcagatttgccacgaacaagctccattggatctggatttttcttctgtggcataatgctgcttccagttgaaacagagtcacttggtgtgaggaatccaaactcctctgatgcccataagacccactcttcaccaattcgtgaaagatgaacagcagcaattgaattggcagcaagaaattccaatacaaagtcgcggtctgatactgcatcaatactgttcttcattggagctgtaaacttcaaatctttagcagttttgaacctatcgataggaagtccagtaccagccaaagcacaagcaccaagaggacagaaattcaaccgttccctgcagttgaccagccgtccagcatcacgctccaactgttcaacatatgataagaggagatgtggaagcaaaacaggctgtgccctttgcaggtgagtgtaaccaggaactattaagtcaacatattttgaagctaacagaacaagagacac

SEQ ID NO: 52748 - DNA, 637 bp, Oryza sativa
  Clone ID: PAT_MRT4530_55014C.1
tctcaatcttctatcggttctacgcggcggcggcgcaggggaaataaccaggaggcggctggcagcgcggcgtggcggtgcggcgatggctggcgacgaggtggctggcggctgggcagtgcctagcgacatggtggtgcacgagcgcgggcggcggctggggtgaggcgggtggcggggcagtggttggcgatgaggcggtgcacgagggcgggaggcggctggcgcgcggctggctccgcagcggcccacgagcgcggacggcggcgcaggcggcggctagcaacgcggcggcccgagcggtgaccggcgacgcggcggcgcacgagcggcggccggcggcacggcggagcatggcaggcaagcccagtgggtatccgtcgggcatgcccgtgcccgacgggcatgggcatgggtatgggattttgcccgatatgctttgcgggcgtgggtcgggcacgggcacgtgggtctcgggccgggcctggtttctctctgcccgtgcctgacccgacccgttgccatccctaaccaagaccactgctggttctatgctgttcttgtgaagcaagataaaacagagaataatgaaagtaaacagttgaagctgaatcgaattgttaaaaaaaaaaaaaaa

SEQ ID NO: 52749 - DNA, 568 bp, Oryza sativa
  Clone ID: PAT_MRT4530_55015C.1
cggacgcgtgggcggacgcgtgggttccccgattcgttcttggtctagtttgctgagtgagctgcagcgatggccgcgaaaggtcagccggtgaatgtgcagaaggagcaggtgaatatgcagaaggagcagatgtttggattggcagagaaagagatggaatatagggtggatcttttcaatcggcttacacaaacatgtttcagcaagtgcattgagaaaaggcataaagaagctgaactaaatatgggtgagaatagctgcattgatcgatgtgcttcgaagtattggcaggtgactaatttagttggacagctccttggaaatcagcctcaaatgtgagcttagagatgcaattgctcttattggtagtagaacatcattgtcttccttttttggcatggtagttcggcaaattattgagcacaatgagaggagaaaattgtcagttcctcccatttgtatctttgacatgagtctgcttgaccaacacataatgtttgagatacattccaacctgtatcagtactttcagcttgcagaaaggcggcatctgttggctgctgtc

SEQ ID NO: 52750 - DNA, 2587 bp, Oryza sativa
  Clone ID: PAT_MRT4530_55016C.1
cccacgcgtccgcccacgcgtccgaagaactcctcctcccctcccccagcattgccgtgggatgtggcggcggcggcggcggagttgaggcgatcaacaatggctgcggcgatggcggagtcggataataacggcagcgaggtcagccccggcggcggcgggagggactcggcgtcggcggcggcggcggtagcttcgccggtgaaggcgaaggcgagggcgttgctggagctggagacggccagcgcggcggcggcggcgtcggagtcgtcggaggcgagggtcgacgacggcaacatccaggaggccgagtcgtcgctccgcgagggcctctccctcaactacgaggaagcgagggctctcctagggagactggaataccagagaggcaatgtagaagctgcactgcgagtatttgatgggatagatcttcaagctgctatccagcgctttcaaccatcgctttcagaaaagccaccctcaaaacgaagtaacaaattacgttcagattcatcgaattcaggatcgcagcatgctgccagtcttgttcttgaagccatttacttgaagtcaatgtctcttcagaagttagggaaagcagtggaggctgctcaacagtgtagaagtgtccttgatgctgttgaaagtattttccaacgtggcatacccgatgtcatggttgaacaaaagcttcaggaaaccgttagtaaatctgtcgagcttctcccagaactttggaagcaagctggagcctatcaagaggcgctcgcttcttaccggcgtgctcttcttagtcagtggaatctcgatgatgactgctgcacaaggattcagaagagatttgctgtttttctgttgtatggtggcgtagaggctagccccccaagcttggcttcacaaactgaaggatcatatgttcctaagaataacttggaagaggcaatccttttgctcatgataatattgaaaaagtggtaccttgggaagactcactgggatccatcagtgatggagcatctaacatttgcattgtcactttgtggtcagacatctgttcttgccaagcatcttgaagaggttttacctggaatataccctcgaactggaagatggtatagtctagctctttgcaattatgcagcttcacataatgaagctgcattaaatttgttaaggaagttgttgaataagaacgagagtcctggtgacataatggccctcctgttagctgctaagttatgcagctcagattattctcttgcttctgaaggagtagagtatgcaagaagagctgttacaaatgttgattcatcagatggtcatttaaagagcgctgcgctccacttcttggggagttgcctggctaagaagtctagaatcgctacatctgatcaccaaagatctctcttgcagactgagtctttgaagtcacttagtgaagcgatttctcttgatcgtcacaacccagatttaatatatgacatgggtattgaatatgctgagcaacgaaacatgcaggctgctttgaaatgtgcaaaggagttcattgatgcaactggtgggtctgtttctaaaggttggagattgctatctttggttctttctgcacaacaaaggtattcagaagcagaggtggtgactgatgctgcattagatgaaactacaaagtgggaacaagggccattacttagaataaaggctaaactgaaggttgctcaatcgttgccaatggaagcagttgaagcataccgtgcccttcttgctcttgttcaggcacaacgaaaggcttatggtaccgtaaaaaatggcacagaggaggttgataataaagtgagcgagtttgaagtttggcaaggtcttgccaacttgtatgctagtctttcctattggagagacgccgagatatgtttacagaaggctaaagccctcaaatcattctcggccataacgcttcatgcagaaggttacacgcgtgaggtgcgtgagcagacacaggacgcactggctgcatacttcaatgcggtctcgaccgaggtggagcacgtaccatcaaaggtatccatcggcgccctcctgtccaaacaaggccccaagtatctccccgtcgcaaggagcttcctctcggacgccctaaggcacgagccgacgaaccggatggcatggttctacctagggaaggtccacaagcatgatggcaggctagctgatgctgctgactgcttccaggcagcctcaatgcttgaggaatcagacccaatagaaagcttcagatcactctgatggctcatcatcttactgcagcaacattgaggttttcttttttcgcgggttaatttttcttctctcctcttcttctcctcctacctttttttggtacatagctgggtggaatctggataccagctacatgtaacttttgtatccgtaggtgccagcgtgctcgtcacgctgttgtcggatattttgacaaaatgatgtaatttggctgctaaatggtaatagccgtatatataagttgcactagaactgtcgtactgtactgttgatttttacagatattagtattgaatataatccattgctatgt

SEQ ID NO: 52751 - DNA, 307 bp, Oryza sativa
  Clone ID: PAT_MRT4530_55017C.1
acgaccacgcgtccgaaccacgcaaaaaatctgccaaaagaagatcccccaaatccgccaccgcgctcacgccggcgcaaccatggcgacctccggctctttgagctcttccgacgcgttgggatccaccagctcctccccattctacttctacaccggcacctaccacatacgcttctgcttgtatcaatccggcctcagctgccccagcgactactccctttcccccgactgcgccccaagcttgtgctactacctattctactgcttctactgcggcgacggtcccacttttggatactcccta

SEQ ID NO: 52752 - DNA, 698 bp, Oryza sativa
  Clone ID: PAT_MRT4530_55018C.1
gcacgagggggggaggtctccgccacccgcgcgccgccgccgccggccgccgctgccggccgccgccaccgcccctccgcaactcatcggacggctgaacgctcgatcatctccgccgatctccgccgatctccgccgccttctcccgtgcacagagggtagggtcggggggaagaagggggaggtcctccgccacccggtcgccgccgccgccaccgccctccgcaactcatcggacgggtgaacgctcgatcatcgccgccgatctccgccgccttctcgcgtgcacagagggttctgcggcatagggtcggggggaagacgggggaggtcctccgccgcccacctctccaacgcctgaagggggagtgtgctccgccaccgcagcccccggaaatccgcagctccggccacgccaccgcatcgcccctccgcctccgcccctaatcccacggccagcatcctcactgctcgtcctccaccacgggcatcgcgcgtggcgtctgcagttcggctgtcttgttttctctgtcgccgccccaggcccccagtttgcttgttgctgtcgagacatcaccagttcgactgttgcttcgcctgaaggctccatggctgaccatcctcccacagtgttcttaaatgagctggagaactgggtgtccgtcaaaagtagagaatcaatcttgtctgtcaggttt

SEQ ID NO: 52753 - DNA, 141 bp, Oryza sativa
  Clone ID: PAT_MRT4530_55019C.1
atgggcgagtcgcgagtcgccggctcgaagcgtcgtacccgaggcaaaacgcccgctcccaactcggtgctggcgattgagccggcagtcaccagcaatctaagcgcgtcatacatgcgtaacgcgttcacgaagtccatg

SEQ ID NO: 52754 - DNA, 367 bp, Oryza sativa
  Clone ID: PAT_MRT4530_5501C.1
ggtaagaggtctcagctctgctcggatggagtccgcttccaccaccgtgccatccattgttgtgtatgtgactgttccaaacagggaagcagggaagaagctgtcacagagcatcatcagtgagaaactagctgcttgtgtcaatatagtgcctggcattgaatctgtttattggtgggagggaaaggtgcaaactgatgctgaagagttactcataatcaagactagagaatctcttctagatgccttgactgaacatgtcaaagctaaccatgaatacgatgttcctgaagttatcgctcttcccataactggtggtaacaccaagtacctggagtggatcaagaacagcaccaaggcaaactga

SEQ ID NO: 52755 - DNA, 621 bp, Oryza sativa
  Clone ID: PAT_MRT4530_55020C.1
atggatctctacctcgacctcaaggtcatggtgaacaccctgccggagtccaaacgctcccacctggcaaacaaggaggttcaaaacctcgtcgccaccatcgacaagggcacgggatcaggctgtggtggtcatggcgatggtggtagttgcatcgtctggcttatgggacactcactcggcgcttctctggcgctggacgtggggcgggccatgatggcggagaaagattacaatctcccgaccttcctcttcaatccgccacaggtgtcgctggcaccggcgatagacgtgcttctcccgacgaagaaagcgaggaggtccatacatgcagccagctccttcctgaaggcaagaatggacaaggtcctgaagccccacaaggagcgcatggagaagctattcgagcaactgtcgccgtgggcaccggagctgtacgtgcatgagagggatctcatctgcaagggctacatcagctactttgagcaacgggagcaggtgaaggagcggttccgtggcgtaggcaagtcggcgatggcgttgtcgtaccgtgacatgttgtttgccgcgttcgggaaggagaaggagcgaccgcacctcctgccaacggcgagactctag

SEQ ID NO: 52756 - DNA, 291 bp, Oryza sativa
  Clone ID: PAT_MRT4530_55021C.1
atgtcgcccaccctgctcctaacagtgagccgcgccggccacctcctcccccgctcgctacttgatgccgccatcggcctgctcctgcccgccgccatccccattgacgcatcagttgggaccaaatgcgtgagacaggagacaaggaaagtcaacgccctgatggttcggagaactcaatgcgcgtgcaaggttgtgatggttcgccgagatccccccgtcgcagccacatcgctctgccggcaccaccctgatgtcacccaccctgctactcgcggtgagccgcgccgc

SEQ ID NO: 52757 - DNA, 2326 bp, Oryza sativa
  Clone ID: PAT_MRT4530_55022C.1
atggcggaccagaacggcgccgcggccgtgagcgaagcggaggccgcccctgttcaggttgaaactggtgctgaaagtggggatgctgaaagtgagcagtaccaaccatttttctccatgtgccagccgattcgctctgttagctattcaaattcctgggatatgagcaacttggattcgatggatgataaatacatgctgagtgcaccttggcctgaaaatgagcagccccagtctgagaatgacatggatttgttagatggggatacaaatatgcagtctgaacccctcagcacagagcagcctagctccaatgcatgtgacccagttatatgtttaatggtgcacacaataagccttgaactgaaatatcttatccaactattctacataaactgtgataaccaggatgaaatagatatctgggatgggaaaactaagcaagactcatcatcccttcttgacagcaagctgtgcaactccggcagcggcgctgaaccttgcaacatggagggccaacaattttctttgtccttttcccgcaacactcaatctcaattggtgatgataaagatggtttctgttcattctgtgctcttaaagaacatattgatgaatcaatccgaagattacccagaattatcatcagattttagaccaggacaacaggaggatgcacatgagttcctacgttgtttgctggacaacctggataagtgcaccactgatcccaagccaaaggataagccctcatcttttgatgaagaaagtattgttaagcaggtttttggaggccgactaaaaagcaagttgacttgctgtgagtgtggacactgctcggagacatatgagcccttcttggatcttagcctggagattgatcaggctgataaccttattgatgccttggaatcttttaccaagttggagcgaattggggatgctgaggacaagctgaactgtgaacattgtaatgcaaaagtttgtaagaacaagcaacttatgcttgatagatcaccagatgtcgttgccattcatttaaagcgtttcaccagccttgatagatctgttgaaaagattgacaaacatgtggtgtacccactagaacttgatttgaagccattccattgtgatcctgacatcaataaggagctgaaatatgatctttatggcgttgttgagcattctggttcacctagctatggccattatgtttgttctgttcgttcttcaccgagcacttggcatctaatgaatgactcccatgttgatttgattagtgaggcaagcgcgctgaaccaggaagggtatattctgttttatattaggcagggcaaatttcagtggttttcaagtttgctggagcaaaaggatgacctgcatcctgaaaatacgagtggtgcatctcccgtttcagtattggagaatatagatgtggattgtccaacatcctctggtgaagcaaccaacagttctggtgataaattagagaaagatgaaactagtcaatgcaaaacatctttccttgaggagccagctaagggatgcccgattgatggtatcaacaaggctgacctaaaagatgaaatcgtgccatgcatatcatctcatcacgattgtgtggctaataggtgtcctggtagtgctgctgacattaccaatttggacagaccctcaactccttcgccaaaacgcaagcgtttcttctctgatgataatgagtttaatgtgtttgagtttgaggacttcggtgacgaagatgagacccctctgcttggaaaccttaaattcacatcaaaagctaagaaggctaaggttgaatcagcatctaaatcgacgaagggcccttgcatagataagaacgtaacacgattagtaaggagtatgccgtccactcggagaaaaggcattgtggactgcttgagccaactcaatgcagagcaggattctggaagctgtcctcggagtcaccctcttggcaaaaagaagctcggcatcccggttccaatcaaatggtagcatggtccgagtgccgaagcctttttttttccagctgtacatgttagtttagcatgcattttgttttatatccagaaccaacaaattttatctgcttgtcataacctgtatgaccggctagatggtgatagtgaggtacatttttgctgccttctgatgtggaatgcctcacctatatgtatggaacatgcactcggagtcccacttcatttgtgaaaaacagtggcaaagggaagagactaaaaactgaggagttttgtgtgggccggtgccgttcttcttcaaaaaaaaaaaaaaaaaaaaaaaa

SEQ ID NO: 52758 - DNA, 286 bp, Oryza sativa
  Clone ID: PAT_MRT4530_55023C.1
tggttaaattctacactctctttactgttggcgactcttttaccttttattatagtgtccacggtaagaaatcatagtgaccatatatttttgacgcaaatagtgaccatatatcgttggaacaactgtaggtgtgtgtctgatcgccgcgtaaactagtcgtttttggacctgatgaccttctggacatacgctctcctgatgaagtaacgatgcttacttgatcggtcccgttgtgatttgctccctgtaggctggcccagccttattcatggtcggatgacgt

SEQ ID NO: 52759 - DNA, 711 bp, Oryza sativa
  Clone ID: PAT_MRT4530_55024C.1
atgaggagctcccactgtgagagctactgcgctcctcccttgtgcaacctcccctgcctccccaaatccaaagacgattcgaccacggacgatgccgccgccgcgtcgtctccaactccggccaccgtcgtcgccgcagctttcgctgaggacaagcctcctccgctgcagaagattgaggcggcggtgacggcaaacaaggatcatgatgatgatggtgatggtggtggtgatgagggtagcaaggaagtggtggtgacagtggttcccaagagtagcctgaagaagactaattgtgaggacagtaagaatgtggtgaagggcaatgtgaaatggatggatttgctggggaaggatctcactcaagttaaagaatttgagccaagcgaatctggagactcggatgacgaagacggcaacacctgcatctgtgtcatccagtaagcagccccttggagatcatcccatgtaaattctctgaaaggaaaaaccgaaaaacaagtgtctgggtcagccattagttgtttatttgtcagtagagagatcagagagcccccccttgtgtcgttggtttatctggaattgtggatggaattggttgtgttgtactatcaatcagcagcagcttcaccagtacatgttgcacatgcatagagtttagattttagaagattcctgcaaagatctgatgaaaaaaaaaaaaaaaaaaaa

SEQ ID NO: 52760 - DNA, 3651 bp, Oryza sativa
  Clone ID: PAT_MRT4530_55025C.1
atggcgttggttccggtgacggcggacccggcgatggggagctcaggaagtgctttcctttacccacagctcatgtcaaccaactacactagttgggtaatacgtgtgcaggctatgatggaggatcaaggcatatgggaagcaatcgagccggcggccggggcggccgtcgacccgaggaaggacaagaaggcgaagtctcatcttctccagtcgctgccggaggatctcttgatgcaggttgcaaagaaacgctcggcaaaggaggtttgggactgcctcaagacgagattcgtcggggtggatcgggtgcgcgatgcacgcctgcagacactcaagggagagttcactagcatggtgatggaggccggggagacgctggaccagtacgccggccggatcaccacgatggggtggttgaacgacgccgccatggtgaagaagctgttcgacactgtcccggagaagttcgttagcctcgtcgcagggatcgagcaattttacgatgttgacaccatgccgttcgaagaagcggtaggtcgcctcaaggcgtatgaagagtggatgtggaagaagaaggcgaccgccggcggagtgaccgctgacgggcaagttctgctcactcagggcgagtgggaggcacgcttcaagaaaggcgggggagaaacctcgtcgccacagaagaacaagccctctggtgagggggcgaaccacggccaggccgagcgtggtcgtggtaggggtcgcggacgcggcgggacgcagagaagcggtggcggctctagcggtggtggccgcgacaagagccacataaagtgtttcaattgtgaggagtttggccactactccacacagtgtccacaccccaagaagaagaaggctgaagctcatcttgtgcaaacggaggatgctggcccagctctgttgcttgccgtgacagaggcagtgcagaacgcgccacgccaggacgcgcactgtgggctggtcgtgcacgaggagcgtgtgtggcctcgcctgatgctggcagagaagggcgcagctgctggtgatctgtggtacctggacaatggtgccagcaatcatatgtctggagatcgtcggaaattccgggaactagacgagaccatgacggggcaggtcaggttcggcgacgcctcgtcagtgcagataatggggatgggatccatccttttctcatgcaagaacggtgaccagtggttgctcgacgacgtctactatatccccagcctctgctgcaacatggtgagtttggggcagctaactgaaactggccaccgtgttatgatggatggagatgacctcaaggtgttcgacaaaaatccttggcgattggtgatgaaggtgcggcgaacctcaaatcggctgtaccgcatcgagctgcagctggcgtcacaggtgtgcctgctggccagtctcgataacccggcgtggctgtggcatgcccggatcggacacgtgaatttccatgcattgaagctattagtggacaaggagatggcgtcaggagtgcccacagtccaccacccaaaccagctgtgtcaagcatgtctggtggcgaaacaagtccggcagccgttcccaggaatggcaaactatcgagcagaggcgccgctcgagctgctccacatggatctgtgtgggccgatcactccatcgacgttcgccggtaatcgatactttatgttgatcgttgatgatttttctaattggatgtgggtgtttgtgatcaagttgaaggaccaagcgctcgcggtgttcgagaagttcaagccgttggcaaagaacacggtaggacgaacaatcaagacactccggacagaccgcggcggcgagtttttgtccggcaagttcgcgcgcgtctgcgatgcagccagcatcgagcgccacctgacggcaccatattcaccgcagcagaacgacgtcgtggagcgtcgcaataggacggtgatggcaatggcgcggtctctcctcaaggggatgtccgtgcccggcaggatgtggggcgaggcagttcgtcacgccatattcctcctaaattggctgccgaccaaggcgatgggaaatcgcactccgttcgaggcatggacggggaagaaacctcacctgggccacctgcgggtgttcgggtgcgttgaagaagggagcaaggcccatcggctgtttgatccgcgtcgtcggcaaatcattgtaagtcgtgacgttgtttttgatgaaaatacaccttggcagtggagtgctgctgcaggagaggtgacttccaccgagttcgaggtagaagaacccgtcggcgcagagcagccggcgctggcagagcaggcaggcttggtaccgtggtaccgggcgccgccagcaggaaggcgagccggcaaggagccagaagtggcggaacatgacgtcgggccggtgcggtatagaagcttggcggagatcatgcttgaagcacctcgggtggacctggtggaggatgatgacgacgcaagagcgctgctcgcagagatggaggagccgttatcctaccgtgaagcaaccggcgagccggcatgggtgaacgcaatgaacaaggaactggaggccattgagaagaacaagacgtggtcgttgtgcatgctgccagccggtcacaaggcaatagggctcaagtgggtgttcaagctaaagaaaaacaccgccggtgaggtgatcaaacacaaggcgcggctggtggcgaatgggtacgtccagcagcaaggtgtggattttgatgaagtgtttgcgccggttgcaaggttggacacggtgcgagctatacttgctgttgcagctgatcgaaggtggcaggtgcatcaccttgacgtcaagtcggcattccttaatggtgatcttgaggaagaagtatatgtctctcagctggaaggttttgttgagaaggggaaggaacatcttgtgtacgaattgagcaaagctctctacgggctgagacaggcgccacgggcatggaatacacggcttgatcggagcatgaaggagcttggtttcagccggtgtgcacaagaacaagcagtctacactagaggcgtggtgagcaaattcatggaacaactgacagtgatgcacttcaaggcggtgaagcaaattctcagatatctcaaggggacaatcaactgtggactcatgttttctggaggcaatgatgcagtggagattactggtttcacagatagtgatctggccggcgacagtgatgatcgtcggagtactagcggcatggcgttttacttcaacagcagtttggtctcgtggagttcacaaaagcagaaaacagtggcactttcgtcctgtgaggctgagttcatggcagccactgcagcagcttgtcaagctttgtggctcaggggattgttgattgagatgattggtgcagaagccaggccggtgaagctgtatgttgataacaagtcagcaattgcactcatgaagaaccctgtgtttcatgggagaaagagtggagacggaggcgacggcgacggtgctggaggcgggggcggcgtcgccgtcggcgtcaccagcacggggaggaggagatggggatgggaagggctcggtggatgggaggatgctggtggtggttggttggataaggttgtgggtgga

SEQ ID NO: 52761 - DNA, 489 bp, Oryza sativa
  Clone ID: PAT_MRT4530_55026C.1
atggatcgagccacattgctgtcctgcctggaacctgtctttgcgttgtatcatcggcttcgccaaattgttctccccactgccccgggtgttgaaggggatgtcctcagagtttgcccagctccagcacgctcaattgctcatgttgtgcacagcgccgcacctgcagaaggtgcaggcggtgcaggcggtgctcctctgcacctgcaccccatacatgaaccacacaaacctgccatggtggccacttcaagctctacaggttcacagagtgagagtgccgctgcacaagtaggaagtagtaattcagatttcagaacccttgcctgccgggggcctgaagaacgaagtcacaagttcacaactaggtacgggaggaagtgtttgcctcctgtgccttctcgtacttgtttcttcgacgatgttatgtttcttcgagcatattatgcaacaggatacagaatgtttttccagtggtttctaatataa

SEQ ID NO: 52762 - DNA, 4050 bp, Oryza sativa
  Clone ID: PAT_MRT4530_55027C.1
atggcgggcgagtgcaacggtggacctccgccattgctgccccttcctccgctcgccgctcatcgcgtgacggcaccaacgcggctggctgcggcgggagggaggtggaccgcgcgcttcttagttgatggcgatgccccggagcttcatgctatgatggaggatcaaggcgtatgggaagcaatcgagccggcggccggggcggccgtcgacccgaggaaggacaagaaggcaaagtctcatcttctccagtcgctgccggaggatctcttgatgcaggttgcaaagaaatgctcggcaaaggaggtttgggattgcctcaagacgagattcgtcggggcggatcgggtgcgcgatgcgcgcctgcagacactcaagggagagttcaccaacatggtgatggaggccggggagacgctggaccagtacgccggccggatcaccacgatgggggtccggtactctgctctcggcgcgacgttgaatgacgccgccatggtgaagaagctgttcgacactgtcccggagaagttcatcagcctcgtcgcagggatcgagcaattttacgacgtcgacaccatgccgttcgaagaagtggtaggtcgcctcaaggcgtatgaagagcggatgcggaagaagaaggcgaccaccggcggagtgaccgcggacaggcaaaagaacaagccctctggtgagggggcgaaccgcggccaggccgggcgtggtcgtggcaggggtcgcggacgcggcgggacgcagagcagcggtggcggctctggtggtggcggcggtggccgcgacaagagccacataaaatgtttcaactgtgaggagtttggccactactccacgcagtgtccacatcccaagaagaagaaggttgaagctcatcttgcgcaaacggaggatgctggcccagctttgttgctcgctgtgacagaggcggtgcagaacgcgccgcgccaggatgcgctctgcgggctggtcgtgcacgaggagcgtgtgtggcctcgcctgatgctggcagagaagggagcagctgctggtgatctgtggtacctggacaatggtgccagcaatcatatgtcaggagatcgtcggaaattccgggaactggacaagaccgtgacggggcaggtcaggttcggcgacgcctcgtcagtgcagataatggggaagggatccatccttttctcatgcaagaacggtgaccagtggttgcttgacgatgtctactacatccccagcctccgctgcaacatggtgagtttggggcagctaactgaaactggccaccgtgtcgtgatggatggagatgacctcgaggtgttcgacaaaaatccttggcgattggtgatgaaggtgcggcgatcctcaaatcggctgtaccgcatcgagctacagctggcgtcaccgctattggtggacaaggagatggcggcaggagtgcccgcagtccaccacccaaaccagctgtgtcaagcatgtctggtggcgaaacaagtccggcagccgttcccaggaatggcaaactatcgagcagaggcgccgctcgagctgctccacatggatctgtgtgggccgatcactccatcgacgttcgccggtaatcgatactttatgtttatcgttgatgatttttctcgttggatgtgggtgtttgtgatcaagtcgaaggaccaagcgctcgcggccttcgagaagttcaagccgttggcggagaacacggcaggacgaacgatcaagacactccggacagaccgcggcggcgagttcttgtccggcgagttcgcgcgcgtctgcgatgcagccggcatcgagcgccacctgacggcaccgtattcaccgcagcagaatggcgtcgtggagcgtcgcaataggatggtgatggcaatggcgcggtctctcctcaaggggatgtccgtgcccggcaggatgtggggcgaggcagttcgtcacgccgtattcctcctaaatcggctgccgaccaaggcgatgggaaatcgcactccgttcgaggcatggacggggaagaaacctcacctgggcccctgcgggtgttcgggtgtacggcgcacgcgaagtcgtgacgttgtttttgatgaaaacacaccttggcagtggagtgttgctgcaggagaggtgacttccactgagttcgaggtagaagaacccgtcggcgcagagcagccggcgccggcagagcaggcaggctcggtaccgtggtaccgggcgccgccggcaggaaggcgagccggcaaggagccagaagtggcagaacagcggggaacacctccggcaagcccggcgaggttctcaccaaccttgcctagcacgcctacactcggctcatcctcaacgcactctgccgaggtgcaggcgtcaccgcgcacggccgacagtgacgacgggccggtgtggtacagaagcttggcggagatcatgattgaagcacctcgggtggacctggtggaggatgatgatgacacagaagcgctgctcgcagagatggaggagccgacatcctatcgtgaagcagccggcgagccggcgtgggtgaacgcaatgaacaaggaactggaggctattgagaagaacaagacgtggtcgctgtgcatgctgccagccggtcacaaggcaatagggctcaagtgggtgttcaagctaaagaaaaacactgccggtgaagtgatcaaacacaaggcgcggctggtggcgaaggggtacttccagcggcaaggtgtggattttgatgaagtgtttgcgccggttgcaaggttggacatggtgcgagctatacttgcagttgcagctgatcgaaggtggcaggtgcatcaccttgacgtcaagtcggcattccttaatggtgatcttgaggaagaagtatatgtctctcagccagaaggttttgttgagaagggaaaggaacatcttgtgtacaaactgagcaaagctctctacgggctgagacaggcgccatgggcgtggaatacacagcttgatcggagcatgaaggagcttggtttcagccggtgtgcacaagaacaagcagtctacactagaggtacagggagtgccgggataattgttggagtatatgttgatgatctgatcgtgacaggagaaagcccaagcgagatcactgcattcaaacaacagatgatgggggagtttgagatgagtgatcttggactgctcacctattacttgggaattgaagtgttgcaaggcactgacgggatcgccatcaagcaggttgcttatgcaaggaagattctgacccagtttaggatgctagattgcaattctacctcaattcctattgaacatcgttcacagttgcacaaagatgctcaaggaagcacagttgatcccacggagtacaggcgagtgataggttgtcttcgttacttgttgcatactcggccggatttgtcctacacagtaggcgtggtgagcagattcatggaacgaccgacagtgatgcatttcaaggcggtgaagcaaattctcagatatctcaaggggacaatcaactgtggactcatgttttctggaggcaatggtgcagtggagattactggtttcacagattgtgatctggccggcgacagtgatgatcgtcggagtactagcggcatggcgttttacttcaacggcagtttggtctcatggagttcacaaaagcagaaaacagtggcactttcgtcctgtgaggctgagttcatggcagccactgcagcagcgtgtcacgctttgtggctgaggggattgttgattgagatgattggtgcagaagccaggccggtgaagctgtatgttgataacaaatcagcaattgcactcatgaagaaccctgtgtttcatgggagaagtaagcacatcgatacccggtatcattttattcgtgagtgtgttgaaagtgggaagattcagattgaattcgtccggactgaggagcagcgggcggatgcgttaacaaaagggttgccagcagcgagattggcgacagcacgacacctgctaggtgttcgtgattttgggccgtag

SEQ ID NO: 52763 - DNA, 4020 bp, Oryza sativa
  Clone ID: PAT_MRT4530_55028C.1
atggcgttggttccggcgacggcggacccggcgagggggagctcaggaagtgctttcctttacccacagctcacgtcaaccaactacactagttgggttgcaaagaaacgctcggcaaaggaggtttgggattgcctcaagacgagattcatcggggcggatcgggtgcgcgatgcgcgcctgcagacactcaaggaagagttcaccaacatggtgatggaggccggggagacgctggaccagtacgccggccggatcaccacgatgggggtccggtactctgctcttggcgcgacgttgaacgatgccgccatggtgaagaggctgttcgacactgtcccggagaagttcatcagcctcgtcgcagggatcgagcaattttacgacgtcgacaccatgccgttcgaagaagcggtaggtcgcctcaaggcgtatgaagagcggatgcggaagaagaaggcgaccaccggaggagtgaccgctgacgggcaagttctcctcactcaggccgagtgggaggcgcgcttcaagaaaggcgggggagaaacctcgtcgccacagaagaacaagccctctggtgagggggcgaaccgcggccaggccgggcgtggtcgtggcaggggtcgcggacgcggtgggacgcagagcagcggtggcggctctggtggtggcagcggtggccgcgacaagagccacataaaatgtttcaactgtgaggagtttggccactactccacgcagtgtccacaccccaagaagaagaaggctgaagctcatcttgcgcaaacggaggatgctggcccaactttgttgctcgctgtgacagaggcggtgcagaacgcgtcgcgccaggatgcgctctgcgggctggtcgtgcacgaggagcgtgtgtggcctcgcctgatgctggcagagaagggagcagctgctggtgatctgtggtacctggacaatggtgccagcaatcatatgtcaggagatcatcggaaattccgggaactggacgagaccgtgacagggcaggtcaggttcggcgacgcctcgtcagtgcagataatggggaagggatccatccttttctcatgcaagaacggtgaccagtggttgctcgacgatgtctactacatccccagcctctactgcaacatggtgagtttggggcagctaactgaaactggccaccgtgtcgtgatggatggagatgacctcgaggtgttcgacaaaaatccttggcgattggtgatgaaggtgcggcgatcctcaaatcggctgtaccgcatcgagctgcagctggcgtcaccggtgtgcctgttggctagtctcgatgacccggcgtggctgtggcatgcccggctcggacacgtgaatttccatgcgttgaagctattggtggacaaggagatggcggcaggagtgcccgcagtccaccacccaaaccagctgtgtcaagcatgtctggtggcgaaacaagtccggcagccgttcccaggaatggcaaactatctagcagaggcgccgctcgagctgctccacatggatctgtgtgggccgatcactccatcgacgttcaccggtaatcgatactttatgttgatcgttgatgatttttctcattggatgtgggtgtttgtgatcaagtcgaaggaccaagcgctcgcggccttcgagaagttcaagccgttggcggagaacacggcaggacgaacgatcaagacactccggacagaccgcggtggcgagttcttgtccggcgagttcgcgcgcgtctgcgatgcagccggcatcgagcgccacctgacggtaccgtattcaccgcagcagaatggcgtcgtggagcgtcgcaataggacggtgatggcaatggcgcggtctctcctcaaggggatgtccgtgcccggcaggatgtggggcgaggcagttcgtcacgccgtattcctcctaaatcggctgccgaccaaggcgatgggaaatcgcactccgttcgaggcatggacggggaagaaacctcacctgggccacctgcgggtgttcgggtgtacggcgcacgcgaaggtgactgcaccgcacttgaagaagctggacgaccggagcaatccggtcgtgtacctgggggttgaagaagggagcaaggcccatcggctgtttgatccgcgtcgtcggcaaatcattgtaagtcgtgacgttgtttttgatgaaaacacaccttggcagtggagtgctgctgcaggagaggtgacttccactgagttcgaggtagaagaacccgttggcgcagagcagccggcgccagcagagcaggcaggctcggtaccgtggtaccgggcgccgccggcaggaaggcgagccggcaaggagccagaagtggcagaacagcggggaacgcctccggcaagcccggcgaggttctcaccaaccttgcctagcacgcctacactcggctcatcctcaacgcactctgccgaggtgcaggcgtcaccgcgcacggccggcagtgacgacgagccggtgcggtacagaagcttggcggagatcatgattgaagcacctcgggtggacctggtggaggatgatgacgacacagaagcgctgctcgtagagatggaggagccgacatcctatcgtgaagcagccggcgagccggcgtgggtgaacgcaatgaacaaggaactggaggctattgagaagaacaagacgtggtcgctgtgcatgctgccagccagtcacaaggcaatagggctcaagtgggtgttcaagctaaagaaaaacactgccggtgaggtgatcaaacacaaggcgcggctggtggcgaaggggtacgtccagcggcaaggtgtggattttgatgaagtgtttgcgccggttgcaaggttggacacggtgcgagctatacttcctgttgcagttgatcgaaggtggcaggtgcatcaccttgacgtcaagtcggcattccttaatggtgatcttgaggaagaagtatatgtctctcagccagaaggttttgttgagaagggaaaggaacatcttgtgtacaaactgagcaaagctctctacgggctgagacaggcgccacgggcgtggaatacacggcttgatcggagcatgaaggagcttggtttcagccggtgtgcacaagaacaagcagtctacactagaggtacagggagtaccgggataattgttggagtatatgttgatgatctgatcgtgacaggagaaagcccaagcgacatcactgcattcaaacaacagatgatgggggagtttgagatgagcgatcttggactgctcacctattacttgggaattgaattgcacaaagatgctcaaggaagcacagttgatcccacggagtataggcgagtgataggttgtcttcgttacttgttgcatactcggccggatttgtcctacgcagtaggcgtggcgagcagattcatggaacgaccgacagtgatgcatttcaaggcggtgaagcaaattctcagatatctcaaggggacaatcaactgtggactcatgttttctggaggcaatggtgcagtggagattactggtttcacagatagtgatctggccggcgacagtgatgatcgtcggagtactagcggcatggcgttttacttcaacggcagtttggtctcgtggagttcacaaaagcagaaaacagtggcactttcgtcctgtgaggctgagttcatggcagccactgcagcagcgtgtcacgctttgtggctcaggggattgttgattgagatgattggtgcagaagccaggccggtgaagctgtatgttgataataaatcagcaattgcactcatgaagaaccctgtgtttcatgggagaagtaagcacatcgatacccggtatcattttattcgtgagtgtgttgaaagtgggaagattcagattgaattcgtccggattgaggagcagcgggcggatgcgttaacaaaagggttgccagcagcgagattggcgacagcacggcacctgctaggtgttcgtgattttgggctgtag

SEQ ID NO: 52764 - DNA, 3045 bp, Oryza sativa
  unsure (1)..(3045): unsure at all n locations
  Clone ID: PAT_MRT4530_55029C.1
atggcggcggcggcggcggcggcgagcaggttcgcggcggcgctgttccacaggaggacgcggagggtcacgtcggcgctggcgtacgccgtcctggagtggacgctcatcgcgctgctgctgatcaacgggctcttctcctacgccatcgcccggttcgccgcctacttcgggctcaggccgccgtgcctcctctgctcccgcgtcgaccgcctcttcgagaaggcgacggaggaggaggatggcgcgcggtggctgcggagcgtcctctgcggcgcccacgcggcggagatctccgggctcgggtactgcctgcaccacggtcggctcgccgacgccggcgacatgtgcgaggcctgcctgtcttcttccaaggaggagagcataaaagatgcaggggaggagagcgccacggtgtgctcttgctgctacgccgttgtgaaaacctcctcgcgcgagctgccggataaaggacaaggccaatcggaggagaagacaaccgaagaagacagaaaccaagggtatgttccattggctcaagaagagcacggcgaagaagaagaccaaggatatgttattttggctcaagaggagcacgacgaggaaaacgaagaagagcatggagaatttcaggaggaagagcggcaagaagaggtgtacgataaagacgagcaagaggagaagatggccgctgtccaggacgagtccttggaagtcatggctgtcggagaagagatcgagctcgacggcgagcgcttgctgtcggtggcagccatcgatgagatgacaatcgccgacgagtcaggtttgcatcaggcgtgctgtgaaaaggagaaagaaatggaccatatcgacggcgagcacgagttgagagatcttgatatcggagttgttcttgaggagaagaggatgttggattcttcggctgcaacggcggatgtcgcgattgaggacgactttgttgtgcccgttccttgtgcagagcctgtcacaagcccacctgatcctcatgagaatatcatcccccacgatgatgaattggttattgaagatgttgctcaaattggagatgccactgctgaagaagaaacagttgaagaagaagaagttgagacagctgaagaagaagaaattgttgtgcccgaagtcattgaagaagtttctgaagatgacaatcaattgtccagtcttgtcatctggtatgccagtctcatcgttttcctttcagtcactgaagcagttcctgaagatgacaacagatcagcagaggtggacactaactgtgaggtatcaatcggaagtgagatatgcgaacgggagcaagatgaccatgtcgtgccgtttcatgaatcagcagagtttgaggagccaactgatccattggcgtacccagatgagcagccactgccattggaaagtctccatgaaacagacccaactgcgcaagaagcaagtgaaaccgaacaggaggaggaggcgacggcgagccagagattagaccagccaccaaacgaacagaacgagcgttgccacacaaatctcagacaaaaagttttgcttgagaggaaacggtcactatccttatctttggacgggagtgtggcaagcgagatggagttgtccgagccttccaccgttgatcagctgaaatcggcgctgcaagcggagcgaaaggcactcagcgcattgtactccgagcttgaggaagagaggagcgccgctgccatcgcgaccaaccagactatggcaatgatcaacaggttgcaggaagagaaggcagcaatgcagatggaggctctgcaataccaacggatgatggaggagcagtcggagtacgaccaggaggcgctgcagttgctgaacgagttggtcaccaagagggagagggagaagcaggaactggagagggagctggatatgtgcaggcagaaggtgctacactacgaggacaaggagaggaggagaatggcaagcttcaaggctaacgggcatagccccaatggtaatggcacttctgtgtcatccagtggtgaggacagtgacgggcactccgatgaatactgcgaactaggtgagtccccggatggcagcaatcttcagagcccgtctcatgctgcttttagccccaggacagatcaagaaaacaagaaacatctggtggctcttgatgactccttgacgtactttgagatggaaaggctatctatcttggaagagctcaagacattggaggagaggctcttcacattggaagatgatgacatcaacgacaccagtgctgctgtgggccgatcttcagatgaatatgaactgtcggctgacggtctccattctccgggaaatggtgatatcaccagtgacaaggcaaagtttgaaggtcgaaattctatttgcaggggaaagagtcttcttcctctattcgatgcagctggagatgagagcagtgatcagacaccatctgcaagggttggggatgtgcaagttgataattcgacaaaaccggtttctgtgcttgtaaaagaacaggagaggctggcaataatagaggaggttgatcatgtatacgagagactgcaagcactagaggcagacaaggagttcctcaggcactgcatcaagtccctgaagaaaggtgacaggggcatggaccttcttcaagagatcttgcagcatcttcgcgaactccggagcgtggaacttcatgttaagcatgctggtgatgcccttgctgcaaattcagcatagcacatgcctctcatatataacatgtgattaccgtagcttgctattgatttagtggatcggctttggtgagtcgatcggaatgatctgaagtacttggttggtgatggtacctttgaaagataatggctgatttcatgggaggttttgctcattttgccggtggcacggaagcaaagcctcttccttttgtttctggtccagcattgccggctttatgatgtggtagttgtagaaatcattagtccttccaaagctgcacaatgttgaatcattggtgccagcttcngatgtatgcacaac

SEQ ID NO: 52765 - DNA, 467 bp, Oryza sativa
  Clone ID: PAT_MRT4530_5502C.1
ttttttttttttttttttttttttttttttttttttggacagggaaaacgaagcatttttatttttatttttctcacagggccttcaaccaatgtacactggtcaagttaaaggactgatctgatcagtctgctagttcaagttgtgtcctattcctccccaacaagcggaggttacattctgattctggggggtgttttgccacccatcccagactgttcatcttcactgtaaaatggtcaaatacaatgaccagctgtgatagcatacacatggccaacgcgcgaatctaagtcacaaatccttgtttccgtttgataaatggcgaaccatatatccccacatccctgcctggcagtgctcagaaagttaacatctctcctaagttctccgcttcagttcagaggatagtgtgacaagcttggatggatagtcatgtgctacaagctcacttcctttggcaggct

SEQ ID NO: 52766 - DNA, 2145 bp, Oryza sativa
  Clone ID: PAT_MRT4530_55030C.1
acacaagctaccccaactccggccatggcgcgccagcacttcctcgtcgtcgcgtaccctggccagggccacatcaacccggcccgagccctcgccgcgcgcctcgcccgcgccaccggcgcgcacgtcaccctgtccgtcgccgtgtcggcgcaccggcgcatgttcccgtccctcgccgcccccgacgaggaggtccacgacgccgacgccggcggcggcgggatctcctacgtcccgtactccgacggctacgacgaagggttccggctgttcgccagcgacggcgaggcggcgtggcggcactcggagacgttcgggcgcgtcggccgcgaggcgttcgccggcgtggtggaccgcctcgccgcgcgcggccgccccgcgacgtgcgtcgtgtacgcgttcctgatgtggtgggcggccgacgtcgcgcgcgagcgcggcatcccgcgggtgctctactggatccagccggcgaccatgctcgccgtgtactaccactacctccacgggctcgaggagctcgtgacggagcacgccggcgagccggagttcacggtggacatgccgagcctcccgccgatggcgatccgcgacctccccagcttcttcaccgacctcgccgacaccaggctcgccgccgcgttccacggcgtccggacgacgatcgagcagctggacatcgatcgccggagcagcagcaagccgccgatggtgctcgtcaacaccgtcgaggaactagagctcgacgtcctcgccgcctccttccctgaccttgacatcctacccatcggcccggccgccacctcgctcgacggcggcggcgcagccgccgccgccagagcgtcgcacgacctgtacaggcacgacgagaagggctacatggagtggctcgacgcgaagccggcggggtcggtggtgtacgtgtcgttcgggagcatgtcggtggtgagcaggcggcagaaggaggagctccggcgaggcctcgccgccaccgcgcggccgtacctgtgggtggtgcgcagcgacgacagggacgacggcgacggcgacggcgacggcggcggcatggtggtggagtggtgcgaccaggtgcgcgtgctgtcgcacggcgccgtcgggtgcttcgtgacgcactgcgggtggaactcgacgctggaggccgtggcgtgcggcgcgccgatggtggcggtgccgcagtggtcggaccaggacacgaacgcgcggctcgtcgccgggtggggcgtcggcgtgcgcgccgccaccggcgccgacagggtggtcgaggcgggcgagctcgcgaggtgcgtggagacggtcatggcggacacggaggcggctgccgccgtgcgccggagctcggtggcgtggaaggcgaaggtgcgggaggccgtcgccgagggcggctcgtcggatcacttgggcgtgtgtgccgtcaccggcgccgacagggtgctcgagacgggcaagctcgcgaggtgcgtggagacggtcatggtggagacagaggcggccggccaccgtcgttcgccggagctcggcagtgtggaagatgaagctccgtgcggcggcgcacccagggcgttgagggccactggcggcaaactcgagcatgggccactggcggtagatctcgagcgcgggccgcggggtcgtgggctacgggcggcggactcaagcccgggccagcggcggcagtggccactctcccaactcctcccagatctggctggaggaaaattggatgagaccaacagcagggtgggggaatggggaagcgtcctggtggcacggtgggtgctgtggaggaggcccgacaacacggtggagatggggaggaggctagcggcagcgaggtcaagatctggtagtaacagggcatgtctgtggcagtggcgaagggatgcagcagtggggctaggagggctcgccgacggcaacggtgcggggagagggtggctgccctgtccagattcaaggggtggcacgtcggcagtagtggggggagggcagcgacatctagatctaatggggctcgtcgtcttcggctcttcagatccggccacctcggcagagcaacaatgccggcaaaggcggtgcagcaatggagacgacggcctcggcttgattcccctcacttcttga

SEQ ID NO: 52767 - DNA, 3996 bp, Oryza sativa
  Clone ID: PAT_MRT4530_55031C.1
atggcgggcgagtgcaacggtggacctccgccattgctgccccttcctccgctcgccgctcatcgcgtgacggcaccaacgcggctggctgcggcgggagggaggtggaccgcgcgcttcttagttgatggcgatgccccggagcttcatgctatgatggaggatcaaggcgtatgggaagcaatcgagccggcggccggggcggccgtcgacccgaggaaggacaagaaggcaaagtctcatcttctccagtcgctgccggaggatctcttgatgcaggttgcaaagaaatgctcggcaaaggaggtttgggattgcctcaagacgagattcgtcggggcggatcgggtgcgcgatgcgcgcctgcagacactcaagggagagttcaccaacatggtgatggaggccggggagacgctggaccagtacgccggccggatcaccacgatgggggtccggtactctgctctcggcgcgacgttgaatgacgccgccatggtgaagaagctgttcgacactgtcccggagaagttcatcagcctcgtcgcagggatcgagcaattttacgacgtcgacaccatgccgttcgaagaagtggtaggtcgcctcaaggcgtatgaagagcggatgcggaagaagaaggcgaccaccggcggagtgaccgcggacaggcaaaagaacaagccctctggtgagggggcgaaccgcggccaggccgggcgtggtcgtggcaggggtcgcggacgcggcgggacgcagagcagcggtggcggctctggtggtggcggcggtggccgcgacaagagccacataaaatgtttcaactgtgaggagtttggccactactccacgcagtgtccacatcccaagaagaagaaggttgaagctcatcttgcgcaaacggaggatgctggcccagctttgttgctcgctgtgacagaggcggtgcagaacgcgccgcgccaggatgcgctctgcgggctggtcgtgcacgaggagcgtgtgtggcctcgcctgatgctggcagagaagggagcagctgctggtgatctgtggtacctggacaatggtgccagcaatcatatgtcaggagatcgtcggaaattccgggaactggacaagaccgtgacggggcaggtcaggttcggcgacgcctcgtcagtgcagataatggggaagggatccatccttttctcatgcaagaacggtgaccagtggttgcttgacgatgtctactacatccccagcctccgctgcaacatggtgagtttggggcagctaactgaaactggccaccgtgtcgtgatggatggagatgacctcgaggtgttcgacaaaaatccttggcgattggtgatgaaggtgcggcgatcctcaaatcggctgtaccgcatcgagctacagctggcgtcaccgctattggtggacaaggagatggcggcaggagtgcccgcagtccaccacccaaaccagctgtgtcaagcatgtctggtggcgaaacaagtccggcagccgttcccaggaatggcaaactatcgagcagaggcgccgctcgagctgctccacatggatctgtgtgggccgatcactccatcgacgttcgccggtaatcgatactttatgtttatcgttgatgatttttctcgttggatgtgggtgtttgtgatcaagtcgaaggaccaagcgctcgcggccttcgagaagttcaagccgttggcggagaacacggcaggacgaacgatcaagacactccggacagaccgcggcggcgagttcttgtccggcgagttcgcgcgcgtctgcgatgcagccggcatcgagcgccacctgacggcaccgtattcaccgcagcagaatggcgtcgtggagcgtcgcaataggatggtgatggcaatggcgcggtctctcctcaaggggatgtccgtgcccggcaggatgtggggcgaggcagttcgtcacgccgtattcctcctaaatcggctgccgaccaaggcgatgggaaatcgcactccgttcgaggcatggacggggaagaaacctcacctgggcccctgcgggtgttcgggttggagtgttgctgcaggagaggtgacttccactgagttcgaggtagaagaacccgtcggcgcagagcagccggcgccggcagagcaggcaggctcggtaccgtggtaccgggcgccgccggcaggaaggcgagccggcaaggagccagaagtggcagaacagcggggaacacctccggcaagcccggcgaggttctcaccaaccttgcctagcacgcctacactcggctcatcctcaacgcactctgccgaggtgcaggcgtcaccgcgcacggccgacagtgacgacgggccggtgtggtacagaagcttggcggagatcatgattgaagcacctcgggtggacctggtggaggatgatgatgacacagaagcgctgctcgcagagatggaggagccgacatcctatcgtgaagcagccggcgagccggcgtgggtgaacgcaatgaacaaggaactggaggctattgagaagaacaagacgtggtcgctgtgcatgctgccagccggtcacaaggcaatagggctcaagtgggtgttcaagctaaagaaaaacactgccggtgaagtgatcaaacacaaggcgcggctggtggcgaaggggtacttccagcggcaaggtgtggattttgatgaagtgtttgcgccggttgcaaggttggacatggtgcgagctatacttgcagttgcagctgatcgaaggtggcaggtgcatcaccttgacgtcaagtcggcattccttaatggtgatcttgaggaagaagtatatgtctctcagccagaaggttttgttgagaagggaaaggaacatcttgtgtacaaactgagcaaagctctctacgggctgagacaggcgccatgggcgtggaatacacagcttgatcggagcatgaaggagcttggtttcagccggtgtgcacaagaacaagcagtctacactagaggtacagggagtgccgggataattgttggagtatatgttgatgatctgatcgtgacaggagaaagcccaagcgagatcactgcattcaaacaacagatgatgggggagtttgagatgagtgatcttggactgctcacctattacttgggaattgaagtgttgcaaggcactgacgggatcgccatcaagcaggttgcttatgcaaggaagattctgacccagtttaggatgctagattgcaattctacctcaattcctattgaacatcgttcacagttgcacaaagatgctcaaggaagcacagttgatcccacggagtacaggcgagtgataggttgtcttcgttacttgttgcatactcggccggatttgtcctacacagtaggcgtggtgagcagattcatggaacgaccgacagtgatgcatttcaaggcggtgaagcaaattctcagatatctcaaggggacaatcaactgtggactcatgttttctggaggcaatggtgcagtggagattactggtttcacagattgtgatctggccggcgacagtgatgatcgtcggagtactagcggcatggcgttttacttcaacggcagtttggtctcatggagttcacaaaagcagaaaacagtggcactttcgtcctgtgaggctgagttcatggcagccactgcagcagcgtgtcacgctttgtggctgaggggattgttgattgagatgattggtgcagaagccaggccggtgaagctgtatgttgataacaaatcagcaattgcactcatgaagaaccctgtgtttcatgggagaagtaagcacatcgatacccggtatcattttattcgtgagtgtgttgaaagtgggaagattcagattgaattcgtccggactgaggagcagcgggcggatgcgttaacaaaagggttgccagcagcgagattggcgacagcacgacacctgctaggtgttcgtgattttgggccgtag

SEQ ID NO: 52768 - DNA, 1911 bp, Oryza sativa
  Clone ID: PAT_MRT4530_55032C.1
atcataaccaaaacattctttctcttccttgctctcagccataagttcttcgctgctgctggagaagaggagcgattcctctactctggcttctctggcaccgacatcctcgtcaacggtatggccatggtcaccccaaatggcctcctccagctcaccaatggcatggcacagtccaaaggtcatgcgatccacccaacaccactgcgcttccacgagcatggttccaatggtacgagggtgcgatccttctccgcctctttcgtgtttgccatccgttctatcgcccccggagtgagcgcgcagggcctcaccttcttcgtctccccgaccaagaacttctcaagagccttctccaaccagtttcttggcctcctcaacaagaagaacaacggcaacacaagcaaccatatctttgccgttgagcttgacaccgttctaaacaacgatatgcaagacatcaatgacaaccatgttggcatcgacatcaatgatcttaggtccgtggattcctacaacgctggctattatgatgacaagaatggtaccttctgcaacctaactcttgcttctttcgatgcaatgcaagtatgggtggactacaatggcgagaggaagttaatcagtgtgaccttggcccctcttcatatggccaaaccagcaagggcattgcttacaaccacttatgacctatcacaggttctcaagaatcaatcatatgttggtttttcatcctcaacgggtattcttgatacacatcactacgtgcttggttgtagttttggtatgaaccaaccagctccggtcatcgatgtcaagaaactaccaaagctgcctcgtttaggcccaaagccacaatccaagttattgataatcatccttcctgtagctactgcaacattagtacttgctattgttagtggcatagttgtacttagacgacggcaaatgaggtatgctgagctgcgcgaagattgggaagttgaatttggtcctcaccggttctcttacaaggacctattccatgctacggaagggttcaaagacaaacacttgcttggcatcggaggatttgggagagtgtacaagggagtgcttacaaaatcaaagtcggaagttgcagtgaaaagagtgtcacatgaatcaaggcaaggaatgagggagttcattgctgagattgttagcatcggccgccttcggcatcgcaacatcgtgcagttacttggttattgccggcgtaaaggtgaacttctcttggtctatgactatatgccaaatggtagccttgataaatatttgcactgtaatagtacccgtcctagtttagattggaatcaacggtttcgaataatcaagggtgttgcatctggtttatggtaccttcatggagagtgggagcaagttgtcatccatagagatgtcaaagccagcaatgtgcttcttgacgaagagatgaatgcccgcttaggtgattttggccttgcaaggttatatgatcatggcaccgacatgcaaaccacacacctggttggcaccatagggtatcttgcccctgagctggcaaacacaggtaaggcttcacccgccaccgatgttttctccttcggcatatttgttcttgaggttgcttgtggacgaaggcccattgagcacggaatgaatagtgagtacaagttcacgttggtagattgggtgattgatcgttggcacgagggatcacttcttgaggtaatggatccaaagctccaaaatggatatgatgatgatgaggcatgcctagctctaaaactaggattgctttgctcacacccatcacctattgcaaggccaaccatgtggcatgtcatgcagtatcttaaccatgacttgccatttccagagttgatggcgatggacatggtgcgaaaccaa

SEQ ID NO: 52769 - DNA, 471 bp, Oryza sativa
  Clone ID: PAT_MRT4530_55033C.1
atgcagctacggatctcaccgagcatgtgcagcatcaacatcccgagtagcaacggcgtcatcgactcgatgaaggtggccgccgtggtggtggtggatggggggcggggtggtaccggcgcgctgtggggctcggctacatccttccctttgtcttcatcctcgccgccatctcggcgctcgaggctgacgcaacaagtgctcctcgagcacctcgcggtcggcaaagatgccgatggtccatggggcacgctcgagcacctcgcggttcagctagctggccatcttgcgctgcgctctttgtggtatggcaccagcagtagggccggcggggacgtcctccatgcaacgatctgcgcccctggcttcgagccgatcgacgtgcttgcattcggccggtatcgaacaggtttaggacctggatggtggcttatgcgcggggcgtcgtcgcctggagctcgaggaggctga

SEQ ID NO: 52770 - DNA, 508 bp, Oryza sativa
  Clone ID: PAT_MRT4530_55034C.1
atgccgctgccgccctctgcgccgccagatctaggaggagggagggaagacgctgcagcctccgccctcctcgccgtcgcagccacacaccccgccgccgtccaacccgagccgccggtcaccggcctcccccctcctccctccggccagatctgggaggaagggagggaggggagctgtcggccggcgagcacatactgcgccccgccgctgtccgccccacgccgccggccaccggcctcccccctcccccctccggccagatctgggagggagggaggcgaaccgtcgccggccagcgagcacacgctacgccccgacacgggtccgccccgcgccgctggccaccggcctcccccctcctccctccggccagatctgggagggagggagggaggagagccgccgctggccgtcccgcgtccgctccttccactgccctcgctggggtgcgccaccactgccttgtagccgcctccggccgacggccggggaaaggagaggttag

SEQ ID NO: 52771 - DNA, 1699 bp, Oryza sativa
  unsure (1)..(1699): unsure at all n locations
  Clone ID: PAT_MRT4530_55035C.1
gtcactgtcaattgacaaaattcagtagcaaatcctactctgtctgcatcaatggctggcccaaccatcgtcctcctcccggcctggggatccggccacttcatgtccgcgctggaagccggcaagcggctgctcgtcgccggcgggggcgccgtctccctcaccgtgctcgtcatgcaggcgccgacggagatagaggcgtcggtggtcgaggcccacgtgcgccgggaggcggcttccgggctcgacgtcaccttccggcggctccccgccgtcgagcaccccaccggctgcgaggcgaccgaggagttcatgtcccggtacgtcgagcgccacgcgcaccacgtcaaggcggccatcgccggcttggcgtcccccgtggccgcggtcgtcgtggacctcttcttcacgcccctgctcgacgcggcgcacgagctctcgctcccggcgtacgtgtacttcgcctccaccgccgcgttcctcgcgctcatgctgcggctgccggagctccgggacgacctgaccgtcgggttcgacggcatggagggaaccgtggacgtgcccgggctgccgccggtgccgccgtcgtacatgccggtgtgcctcgtgagcaagacggtgaagaactacgactggttcgagtaccacggccgccgcttcacggaggcgaagggcatcatcgtgaactcctccgttgagctcgagggcgcggtcctcgccgcgatcgcggacggccgccgccccgctccggcgatccacgcgatcgggccggtgatctggttcgacgccacgctgccgcccgagcagccgcacgagtgcgtgcggtggctcgacgcgcagccggcggcgtcggtggtgttcctctgcttcgggagcatcggcttcctcgacgcggcgcaggtgagggagctcgccgcgggcctggagcgcagcggccaccgcttcctgtgggtcctgcgcggcgcgcccgccggcggcgtgcggtacccgacggacgcggacccgggcgagctgctcccggaggggttcctggaggcgaccgccgggagagggatggtgtggccgaggtgggcgccgcagaaggacatcctgggacacgccgccgtgggcgggttcgtgacgcactgcggctggaactcggtgctggagagcctgtggttcggcgtgccgatggcgacatggccgctctacggcgagcagcacctcaacgcgttcgaggccgtggcctccatgggcgtcgcggtcgagctgaggaggacgacggcgaaggacggcgacgcggcgagatcgctcgtggaggcggcggaggtggagcgcgcggtgaggaggctgatggcgccgcagggcggcgggtcgtcggaggcgagggagaaggccgcggaggtgagcgcggcgtgcaggaaggccgtggaggagggcgggtcgtcgcacgcggcgctgcaacggctcgtgcgtgagatcgttcgtgtcgtggcaggccacactaggccggaatagctggctggttgcggttggttggcccatntcacacggtactcggcccagtntagacgagaaaattatactagaaaccaagacgtcaaccacgtgatgcggcttaagggtgtgtttgattcgtggtagggtatagccatccctacccctatgagcaaatcctggagagattgaagtcaaaaaaaaaaaaaaaaaaaaaaaaaaa

SEQ ID NO: 52772 - DNA, 494 bp, Oryza sativa
  Clone ID: PAT_MRT4530_55036C.1
gcacgaggttttatccaaccaagtccatgtcgagcagagccttgttgtgcaatgtgagcctgctttaccagagtggtttcccctatccttctctgaatggttttgctgttgtcatatcatttgatatatcatgcccgttccttccgcctcaaatatccaggactccacaccagatcaatctgctcgcctactgcaatttcagccactgtccacctatcaactcattcacacctgccaattgccatcagtcccatcccactatgctaccatttatcttctatccagtgtttagaaaaaaaaaaccaataaagcgctagcctatgttaatggacactatgaaataaagttccatgtcatatacaaacgtacactaaactagtttggacaactggggtgtttataggtggaggtgatgatttactatgacaataattttaagtttacgaatggcatagaaaagtattaggcacaaaaaatgttcacaacttctgaga

SEQ ID NO: 52773 - DNA, 211 bp, Oryza sativa
  unsure (1)..(211): unsure at all n locations
  Clone ID: PAT_MRT4530_55037C.1
cccacgacccacgcgtgcngggatcgcaaacttatgagcaggtagcctcaaatagcataaggaccaccatgcattaattaacttgaacgaacgaaacaattatgggggctgcaaccaaataaacaatcggttaatacacccgttttaatatcaggcaatatatgtttgatcaaaacaaatcatgtgctaaggttgaacgtactcaatatgg

SEQ ID NO: 52774 - DNA, 405 bp, Oryza sativa
  Clone ID: PAT_MRT4530_55038C.1
ataacctggagtgattaatatataaaggcatgcatcgtaataattagtaccatgagctaactagctagcccaccacaaaacctctgccatctgaacactcaccacagtgagcacctattacaggactaattgaaagggcctgatatttgcatgtgcatgagtactcttaaaccctgcaccaacttattaaccctgagatgcctatactcttcatgatttagcctagacgatcagagaggctgatcgtattttgtgcgctattaaattaggtagctggatccctctctacgctcggtccttcggctgcggcgagcggtgtacggttgctcaaaggcgaggttgctgttctccaccaatgcccgtgataaggcctgacactacatgttagctataggccttgatgag

SEQ ID NO: 52775 - DNA, 316 bp, Oryza sativa
  Clone ID: PAT_MRT4530_55039C.1
aaagctcggcccgcactggaccggacccggaacttgctgggtcggacccacgcatgcgtctttttcctacacacgccttggcccctctcctgtcgccggcctgccgacgcggcgtctccggagccatggccgccagcggaggcgtcccagcctcggccacgcttcttctacttgcaatacacgccgcggccggaagtcccctcgccttcgccgtgcgcccggtttggagcccggagacacccggtggacaccagccattgatgtgtgccaccgactgatccttgagcaagctgaagacaacatatgcggcggacag

SEQ ID NO: 52776 - DNA, 635 bp, Oryza sativa
  Clone ID: PAT_MRT4530_5503C.1
gcaattcagattgcttttatcttgttcttgcttgtttctttgatttgcttgcaggaataaggttgatctgcaccggcaagatcaacaacccatggagaggtgtatcgatcgctaaggcgcaatacaacaacatctagtacggttgtagtcgggtcgtcaacgtttctcccaaatcgtagttatcatcaactcaccaaaagatcgggccaacaacaatcttgattgtctcaagtggagctcagggttcatcaggtggtatcagagctttcgttgctcgcatctagttcgtttagagtttcgagttctggtcacattttataccacagtcgttgtcgcccccgtgtctctgttgtcatcgggacctacgaaaatgaaatcggcttgctgccacggttctatttttgtagttttcagaagtttccgtcggttggttttggagttgttgagttgcaaataggaatctaggatttatgtcgtgtggttgccctctgttccgtggttctgtatatgctcttgcacggccgtgctgatgcgcgtgaggaagatggaaggtgtgcggaagatggaaggtagagattagattagtttggtttggttcgggaaggaaatagttgattggattggctgaagatcat

SEQ ID NO: 52777 - DNA, 4693 bp, Oryza sativa
  Clone ID: PAT_MRT4530_55040C.1
atggcggcggcggcggcggcggctgcggctgcgccggcgccggcgacggaggaggacgaggaggcgctgctcacccgcgtgcagactatcatcttgcgggtcgtcgagctcgaggacaaccccaacccccgcctcctccacaccctcgccaccatctgcgaggcccacgaagccagatatgcacaagaatgtgcgaatagtccatcgtacaataacacaaacgcaaggaactcccatacaattggcaagctggcaaacttgcttcgggagaatgacgacttttatgagttagtgttctgtaagttcttatcagacaactcatactcggctgcagtacgctctgctgctgctaggctgctcctaagctgctattctgcctggacgcctcagtatcctcatgcatttgaagatgctattgtagaaaatataaagaaatgggtgacagaagatggtggagcgtcaaatgagtgtgaatcgaagcatctaggaaagaataacaaaccaacagatgctgacatgctgcggacatatgccattgggttgcttgctatggcgctgtgtggtggtgggcagttggtagaagatgtcttaaccatgggggtatcagctaagctcatgcactttttgcgtgtgcgagtgcatggggatgttgcgtgtgcccagaaagattctaatattccactagataccaaacatcctcggagcagagatgagaacaggagcaaatcacgcctggttcaagacagttctcgattggatggaatgaggtctggagatggaatttcaattgacccaacttcagaaaactgtgacaatgttatgggaatgcggcatgcacatggagaacggtggatagatgatgctgcctctctgcaacctgagcgtgctgattcatcgttggatctttttgatgcgatggaggctgtcaagagttgggaaaggctttctgcattgagacttggaagagatgaagagatgaacgaaaatacgagagatgatctgttaaagcggaagttgagtcgaacaggatcacgacttagggggaagagcaaagcaggtgaaagcttgcctgaaagtgaaagaacacctttatcaccaacctcaggattgaaaataggaactcggactagcagagagaagaatatggtgaggattgaggatgcaaataaggccattgatgtgaacaacagctctccaggcattgagccatttaatgcaatttccaaagaagagtatgaggatcggttcaaggattgtattattggcttaaaggatatatccgacattgttttaaaggctgtgagagctgctgaagctgaagccagatctgcaaatgcacctgatgaggctgtaaaagcagcaggtgatgcggctgccgagcttgtgaaatctgctgcatcagaggtttggaaaactggaaataatggtgatgcggttgtattagctgctgagaaagcagcagctactgtagtggatgctgctatgtcaactagtgtctcacgctctaaccaagtcggtgaagagcatgttgtggaagagcctgtgcaaatcagcgaggatcatgaattggaagattttgttatcactgaccatgggcagctcctacaacttagagaaaaatatagcattcagtgtctacagattttgggagagtatgttgaagcattgggtcctgttctccatgaaaagggagttgatgtttgccttgcattattgcaacgtagcattaaagaccaggggggacatggccactttacacttctgcctgatgtccttcgattaatttgtgccctggccgcccaccgaaaatttgctgcgctctttgttgaccgtggtggtattcagaagattctctctgttcctaggattgctcagacatataccgctctttctggctgcttatttacttttggctccctccagtcaaccatggaacgtatttgtgcactctcatctgacacacttaataatgtggttgaactggcgcttcaacttcttgaatgtccacaagattcagcgaggaaaaatgcagccatattcttcgctgctgcctttgtgttcaaagctattctggattcatttgatgcaaaggatgggatgcaaaaagttctaggtattttacatggtgctgcttctgttaggtctggtggcaactctggggcattagggtcctctaatgtaaaccaggggaatgatcggtcacctgctgaagttctgactgcatcagaaaagcaggttgcataccattcatgtgttgcactaaggcagtactttagggctcatctgcttcagcttgttgattctattcgaccaagcaaaagtatccgtagtattgctcggaacacttctagcgcaagagctggctacaaaccatttgacattggcaatgaggctatggatgctgtttttcgtcagatccagcgggacagaaagttaggtcctgctcttgtaagagctcgttggcctgtgctggataaatttttggcatctaatggccatataacaatgctagaactctgccaggctccacctactgatcgctatctgcatgacttaacacaatatgcatttggagttcttcacattacaacgcttgtgccatactgccgcaaactgatagtacatgctacattaagtaacaatcgtgttggcatgtctgtcctattagatgcagccaacagttttggctatgttgatcctgaggtgatctgtccagcactgaacgttcttgtcaatcttgtgtgtccccctccttctatcagtaacaagtcatcctcaactggtaaccagcaacctgcagctacccaagcagttggtggggcattttcagagaacagagacaggaatgctgaaaaatgtactacagatagaaatctaactgcaaatcagggtgaatctcgggaacgttgtggtgatggtaacacatctcaacagggcaatactgtgcaaattagcacacctgttgtgccatctggggtggttggtgatcggagaatatctttaggagtaggagctggtggtcctggtcttgctgctcaattggaacaagggtatcgtcaagctcgagaagtggtcagagctaataatggtataaagattcttttacagcttctcagttctcgaatggttacacctcctgtggctattgatcctattcgggcacttgcgtgtcgtgtcctgcttgggttggctagagatgatgcaattgcacatatactcactaaactccaggtaggaaagaaactatcagaactgatccgtgataccagtggacagtcaattggaggagataatagtagatggcaaaatgaactgacccaagtggcaattgaactaattgcggtcctgacaaattctggaaaagaaacaaccttagcagcgactgatgctgctgctccagcactgaggcgcattgaacgagctggaatagctgctgcgactcctgtctcgtaccattccagggaactgatgcaactgatacatgaacatctccttggatctggttttactgctactgctgctatgctgcaaaaggaggctgaccttgcacctttgccatcgacagctgcagtgactcctgtccaccaggttgctgccctggagacatcatctgctcagcaacagtggccttctggtcgtgttcagggatttgtgccagatacaacaaaggtgactacagaccaaactggccagagatctgattctgtcttgccttcatcaaagaagaaatcactgtccttctcatccagtttctcgaagcgaactcaaccttcgcatctattttctggtaatagagcaagcaatagcctgaaaagtcctgttcctattgggaatgttgacaatatgatttgcgctgcttctactgtcaatactggagatgcggagacatctcataaaacaccattatcgttgccacagaagaggaagctagtggacatgaaggatcttagttcagcgtcagcagcaaagcgctctgcaatggttgatcaagcatgccagtctcctgtattccaaactcctgctcctactcgcagaggactgtcagtggcagtggattctcctactgcttcatttcattctggacggccaaatttcaacaacatttacacagagaacctggatgattttcaaggcacacctggagcaacaattaccacaccacatcacgctggaaaccacactggggaattaagagtatttgactgcaacactgcaaatatcctagagacccagacatgccaccaacagcttgttacaatagtagagtcggcatcttctggtggaaatgagctgattctcacgtccagccttacgagagtaatttgtttctggtgtgcttgtcttctcatctctgccgtccatactttgcagacagtaataaaatttaatggcagaggggatgttatctatgccattctcaggcgtaatcttgacgatgtaacatcatccattcatactcgtagggtcagacatcccctgttccctgcattccgcacgattgatgccgtgacttactcagacattgcaacagtccaaattgatcgtggtgtccttgatcttgcaactgaacccaatgattctcttcttggggttgttgctatggatgatcctgatgagatgttctcttctgctcgcctatttgaagttggcaggaagcgtccaactgatgatgattcagatccggaggacgcag

SEQ ID NO: 52778 - DNA, 5763 bp, Oryza sativa
  Clone ID: PAT_MRT4530_55041C.1
atggcggcggcggcggcggctgcggctgcgccggcgccggcgacggaggaggacgaggaggcgctgctcacccgcgtgcagactatcatcttgcgggtcgtcgagctcgaggacaaccccaacccccgcctcctccacaccctcgccaccatctgcgaggcccacgaagccagatatgcacaagaatgtgcgaatagtccatcgtacaataacacaaacgcaaggaactcccatacaattggcaagctggcaaacttgcttcgggagaatgacgacttttatgagttagtgttctgtaagttcttatcagacaactcatactcggctgcagtacgctctgctgctgctaggctgctcctaagctgctattctgcctggacgcctcagtatcctcatgcatttgaagatgctattgtagaaaatataaagaaatgggtgacagaagatggtggagcgtcaaatgagtgtgaatcgaagcatctaggaaagaataacaaaccaacagatgctgacatgctgcagacatatgccattgggttgcttgctatggcgctgtgtggtggtgggcagttggtagaagatgtcttaaccatgggggtatcagctaagctcatgcactttttgcgtgtgcaagtgcatggggatgttgcgtgtgcccagaaagattctaatattccactagataccaaacatcctcggagcagagatgagaacaggagcaaatcacgcctggttcaagacagttctcgattggatggaatgaggtctggagatggaatttcaattgacccaacttcagaaaactgtgacaatgttatgggaatgcggcatgcacatggagaacggtggatagatgatgctgcctctctgcaacctgagcgtgctgattcatcgttggatctttttgacgcgatggaggctggtgcaaccaatgatagaacttatagtgcaagcatttgtgatacaaagtcaagagttggggaaaggctttctgcattgagacctggaagagatgaagagatgaacgaaaatacgagagatgatctgttaaagcggaagttgagtcgaacaggatcacgacttagggggaagagcaaagcaggtgaaagcttgcctgaaagtgaaagaacacctttatcaccaacctcaggattgaaaataggaactcggactagcagagagaagaatatggtgaggattgaggatgcaaataaggccattgatgtgaacaacagctctccaggcattgagccatttaatgcaatttccaaagaagagtatgaggatcggttcaaggattgtattattggcttaaaggatatatccgacattgttttaaaggctgtgagagctgctgaagctgaagccagatctgcaaatgcacctgatgaggctgtaaaagcagcaggtgatgcggctgccgagcttgtgaaatctgctgcatcagaggtttggaaaactggaaataatggtgatgcggttgtattagctgctgagaaagcagcagctactgtagtggatgctgctttgtcaactagtgtctcacgctctaaccaagtcggtgaagagcatgttgtggaagagcctgtgcaaatcagcgaggatcatgaattggaagattttgttatcactgaccatgggcagctcctacaacttagagaaaaatatagcattcagtgtctacagattttgggagagtatgttgaagcattgggtcctgttctccatgaaaagggtgttgatgtttgccttgcattattgcaacgtagcattaaagaccaggggggacatggccactttacacttctgcctgatgtccttcgattaatttgtgccctggccgcccaccgaaaatttgctgcgctctttgttgaccgtggtggtattcagaagattctctctgttcctaggattgctcagacatataccgctctttctgcctgcttatttacttttggctccctccagtcaaccatggaacgtatttgtgcactctcatctgacacacttaataatgtggttgaactggcacttcaacttcttgaatgtccacaagattcagcgaggaaaaatgcagccatattcttcgctgctgcctttgtgttcaaagctattctggattcatttgatgcaaaggatgggatgcaaaaagttctaggtattttacatggtgctgcttctgttaggtctggtggcaactctggggcattagggtcctctaatgtaaaccaggggaatgatcggtcacctgctgaagttctgactgcatcagaaaagcaggttgcataccattcatgtgttgcactaaggcagtactttagggctcatctgcttcagcttgttgattctattcgaccaagcaaaagtatccgtagtattgctcggaacacttctagcgcaagagctggctacaaaccatttgacattggcaatgaggctatggatgctgtttttcgtcagatccagcgggacagaaagttaggtcctgctcttgtaagagctcgttggcctgtgctggataaatttttggcatctaatggccatataacaatgctagaactctgccaggctccacctactgatcgctatctgcatgacttaacacaatatgcatttggagttcttcacattacaacgcttgtgccatactgccgcaaactgatagtacatgctacattaagtaacaatcgtgttggcatgtctgtcctattagatgcagccaacagttttggctatgttgatcctgaggtgatctgtccagcactgaacgttcttgtcaatcttgtgtgtccccctccttctatcagtaacaagtcatcctcaactggtaaccagcaacctgcagctacccaagcagttggtggggcattttcagagaacagagacaggaatgctgaaaaatgtactacagatagaaatctaactgcaaatcagggtgaatctcgggaacgttgtggtgatggtaacacatctcaacagggcaatactgtgcaaattagcacacctgttgtgccatctggggtggttggtgatcggagaatatctttaggagtaggagctggtggtcctggtcttgctgctcaattgggacgggggtatcggcttgctcgtgccctgctcacagctaataatggtataaagattcttttacagcttctcagttctcgaatggttacacctcctgtggctattgatcctattcgggcacttgcgtgtcgtgtcctgcttgggttggctagagatgatgcaattgcacatatactcactaaactccaggtaggaaagaaactatcagaactgatccgtgataccagtggacagtcaattggaggagataatagtagatggcaaaatgaactgacccaagtggcaattgaactaattgcggtcctgacaaattctggaaaagaaacaaccttagcagcgactgatgctgctgctccagcactgaggcgcattgaacgagctggaatagctgctgcgactcctgtctcgtaccattccagggaactgatgcaactgatacatgaacatctccttggatctggttttactgctactgctgctatgctgcaaaaggaggctgaccttgcacctttgccatcgacagctgcagtgactcctgtccaccaggttgctgccctggagacatcatctgctcagcaacagtggccttctggtcgtgttcagggatttgtgccagatacaacaaaggtgactacagaccaaactggccagagatctgattctgtcttgccttcatcaaagaagaaatcactgtccttctcatccagtttctcgaagcgaactcaaccttcgtatctattttctggtaatagagcaagcaatagcctgaaaagtcctgttcctattgggaatgttgacaatatgatttgcgctgcttctactgtcaatactggagatgcggagacatctcataaaacaccattatcgttgccacagaagaggaagctagtggacatgaaggatcttagttcagcgtcagcagcaaagcgccctgcaatggttgatcaagcatgccagtctcctgtattccaaactcctgctcctactcgcagaggactgtcagtggcagtggattctcctactgcttcatttcattctggacggccaaatttcaacaacatttacacagagaacctggatgattctcaaggcacacctggagcaacaattaccacaccacatcatggtgcaagtgatcaacagccagtaaatttggagtgcatgacgctcgattcactggttgtacaatacttgaaacaccaacaccgccaatgtcctgctccaataacaactttgccaccactctctctgttgcatcctcatgtttgccctgagcccagtcgcagccttagcgcgccagcaaacatagctgctcgcatgggaagccgtgagataaggaggcaatttagtgggatccaaatacctcgcagggatcgccaatttatatacagcaggttcaagctatgccgtgtttgccgtgatgaatcctcacttttgacttgcatgacatttcttggtgatgcatcacgagttgcagctggaaaccacactggggaattaagagtatttgactgcaacactgcaaatatcctagagacccagacatgccaccaacagcttgttacaatagtagagtcggcatcttctggtggaaatgagctgattctcacgtccagccttaacgaggttaaagtctgggatgccttctcagtatctggggggcctttacacacatttgagggttgcaaagctgctcggtttagccattctggaacttcatttgctgccctttccactgattcgactcgtcgggaggttctattgtatgatgtccagacatataatcttgatctgcggcttcctgataactctggctattcaggaggccggggttatgtacaacctattatacatttcagtccatcggatacaatgttgttgtggaatggggtcctgtgggatagacgaagtccaaaccctgtccatcagtttgaccagttcactgactacggcggtggtggcttccatccagctggcaatgaggtaataataaattcagaagtgtgggatctaaggaaatttaagcttctgaggagtgttccttccctggaccagacagtaataaaatttaatggcagaggggatgttatctatgccattctcaggcgtaatcttgacgatgtaacatcatccattcatactcgtagggtcagacatcccctgttccctgcattccgcacgattgatgccgtgacttactcagacattgcaacagtccaaattgatcgtggtgtccttgatcttgcaactgagcccaatgattctcttcttggggttgttgctatggatgatcctgatgagatgttctcttctgctcgcctatttgaagttggcaggaagcgtccaactgatgatgattcagatccggaggacgcaggtgacacagatgacgaagatgatgatgacaatgatgactcagaagatggtattattcctttgactgatataggtgacagtgattctgatataagtaacagcagtgatgacggtggtgacgatgaggatattgacagtggggatgaaaatgatgacgatgatgatgatgctgagttcattgatgaaggtgattttgaagggggaggaggactgttggagattatgggtgaagaggatggtgatgagagtgacattatgggctcctttagcagcggtgacgaagaaggatggatcatgtaa

SEQ ID NO: 52779 - DNA, 1319 bp, Oryza sativa
  Clone ID: PAT_MRT4530_55042C.1
atatgcacaagaatgtgcgaatagtccatcgtacaataacacaaacgcaaggaactcccatacaattggcaagctggcaaacttgcttcgggagaatgacgacttttatgagttagtgttctgtaagttcttatcagacaactcatactcggctgcagtacgctctgctgctgctaggctgctcctaagctgctattctgcctggacgcctcagtatcctcatgcatttgaagatgctattgtagaaaatataaagaaatgggtgacagaagatggtggagcgtcaaatgagtgtgaatcgaagcatctaggaaagaataacaaaccaacagatgctgacatgctgcggacatatgccattgggttgcttgctatggcgctgtgtggtggtgggcagttggtagaagatgtcttaaccatgggggtatcagctaagctcatgcactttttgcgtgtgcgagtgcatggggatgttgcgtgtgcccagaaagattctaatattccactagataccaaacatcctcggagcagagatgagaacaggagcaaatcacgcctggttcaagacagttctcgattggatggaatgaggtctggagatggaatttcaattgacccaacttcagaaaactgtgacaatgttatgggaatgcggcatgcacatggagaacgctctccaggcattgagccatttaatgcaatttccaaagaagagtatgaggatcggttcaaggattgtattattggcttaaaggatatatccgacattgttttaaaggctgtgagagctgctgaagctgaagccagatctgcaaatgcacctgatgagggtgtaaaagcagcaggtgatgcggctgccgagcttgtgaaatctgctgcatcagaggtttggaaaactggaaataatggtgatgcggttgtattagctgctgagaaagcagcagctactgtagtggatgctgctatgtcaactagtgtctcacgctctaaccaagtcggtgaagagcatgttgtggaagagcctgtgcaaatcagcgaggatcatgaattggaagattttgttatcactgaccatgggcagctcctacaacttagagaaaaatatagcattcagtgtctacagattttgggagagtatgttgaagcattgggtcctgttctccatgaaaagggagttgatgtttgccttgcattattgcaacgtagcattaaagaccaggggggacatggccactttacacttctgcctgatgtccttcgattaatttgtgccctggccgcccaccgaaaatttgctgcgctctttgttgaccgtggtg

SEQ ID NO: 52780 - DNA, 3608 bp, Oryza sativa
  Clone ID: PAT_MRT4530_55043C.1
gattgctcagacatataccgctctttctgcctgcttatttacttttggctccctccagtcaaccatggaacgtatttgtgcactctcatctgacacacttaataatgtggttgaactggcgcttcaacttcttgaatgtccacaagattcagcgaggaaaaatgcagccatattcttcgctgctgcctttgtgttcaaagctattctggattcatttgatgcaaaggatgggatgcaaaaagttctaggtattttacatggtgctgcttctgttaggtctggtggcaactctggggcattagggtcctctaatgtaaaccaggggaatgatcggtcacctgctgaagttctgactgcatcagaaaagcaggttgcataccattcatgtgttgcactaaggcagtactttagggctcatctgcttcagcttgttgattctattcgaccaagcaaaagtatccgtagtattgctcggaacacttctagcgcaagagctggctacaaaccatttgacattggcaatgaggctatggatgctgtttttcgtcagatccagcgggacagaaagttaggtcctgctcttgtaagagctcgttggcctgtgctggataaatttttggcatctaatggccatataacaatgctagaactctgccaggctccacctactgatcgctatctgcatgacttaacacaatatgcatttggagttcttcacattacaacgcttgtgccatactgccgcaaactgatagtacatgctacattaagtaacaatcgtgttggcatgtctgtcctattagatgcagccaacagttttggctatgttgatcctgaggtgatctgtccagcactgaacgttcttgtcaatcttgtgtgtccccctccttctatcagtaacaagtcatcctcaactggtaaccagcaacctgcagctacccaagcagttggtggggcattttcagagaacagagacaggaatgctgaaaaatgtactacagatagaaatctaactgcaaatcagggtgaatctcgggaacgttgtggtgatggtaacacatctcaacagggcaatactgtgcaaattagcacacctgttgtgccatctggggtggttggtgatcggagaatatctttaggagtaggagctggtggtcctggtcttgctgctcaattggaacaagggtatcgtcaagctcgagaagtggtcagagctaataatggtataaagattcttttacagcttctcagttctcgaatggttacacctcctgtggctattgatcctattcgggcacttgcgtgtcgtgtcctgcttgggttggctagagatgatgcaattgcacatatactcactaaactccaggtaggaaagaaactatcagaactgatccgtgataccagtggacagtcaattggaggagataatagtagatggcaaaatgaactgacccaagtggcaattgaactaattgcggtcctgacaaattctggaaaagaaacaaccttagcagcgactgatgctgctgctccagcactgaggcgcattgaacgagctggaatagctgctgcgactcctgtctcgtaccattccagggaactgatgcaactgatacatgaacatctccttggatctggttttactgctactgctgctatgctgcaaaaggaggctgaccttgcacctttgccatcgacagctgcagtgactcctgtccaccaggttgctgccctggagacatcatctgctcagcaacagtggccttctggtcgtgttcagggatttgtgccagatacaacaaaggtgactacagaccaaactggccagagatctgattctgtcttgccttcatcaaagaagaaatcactgtccttctcatccagtttctcgaagcgaactcaaccttcgcatctattttctggtaatagagcaagcaatagcctgaaaagtcctgttcctattgggaatgttgacaatatgatttgcgctgcttctactgtcaatactggagatgcggagacatctcataaaacaccattatcgttgccacagaagaggaagctagtggacatgaaggatcttagttcagcgtcagcagcaaagcgctctgcaatggttgatcaagcatgccagtctcctgtattccaaactcctgctcctactcgcagaggactgtcagtggcagtggattctcctactgcttcatttcattctggacggccaaatttcaacaacatttacacagagaacctggatgattttcaaggcacacctggagcaacaattaccacaccacatcacggtgcaagtgatcaacagccagtaaatttggagtgcatgacgctcgattcactggttgtacaatacttgaaacaccaacaccgccaatgtcctgctccaataacaactttgccaccactctctctgttgcatcctcatgtttgccctgagcccagtcgcagccttagcgcgccagcaaacatagctgctcgcatgggaagccgtgagataaggaggcaatttagtgggatccaaatacctcgcagggatcgccaatttatatacagcaggttcaagctatgccgtgtttgccgtgatgaatcctcacttttgacttgcatgacatttcttggtgatgcatcacgagttgcagctggaaaccacactggggaattaagagtatttgactgcaacactgcaaatatcctagagacccagacatgccaccaacagcttgttacaatagtagagtcggcatcttctggtggaaatgagctgattctcacgtccagccttaacgaggttaaagtctgggatgccttctcagtatctggggggcctttacacacatttgagggttgcaaagctgctcggtttagccattctggaacttcatttgccgccctttccactgatacgactcgtcgggaggttctattgtatgatgtccagacatataatcttgatctgcggcttcctgataactctggctattcaggaggccggggttatgtacaacctattatacatttcagtccatcggatacaatgttgttgtggaatggggtcctgtgggatagacgaagtccaaaccctgtccatcagtttgaccagttcactgactacggcggtggtggcttccatccagctggcaatgagagtaatttgtttctggtgtgcttgtcttctcatctctgccgtccatactttgcaggtataataaattcagaagtgtgggatctaaggaaatttaagcttctgaggagtgttccttccctggaccagacagtaataaaatttaatggcagaggggatgttatctatgccattctcaggcgtaatcttgacgatgtaacatcatccattcatactcgtagggtcagacatcccctgttccctgcattccgcacgattgatgccgtgacttactcagacattgcaacagtccaaattgatcgtggtgtccttgatcttgcaactgaacccaatgattctcttcttggggttgttgctatggatgatcctgatgagatgttctcttctgctcgcctatttgaagttggcaggaagcgtccaactgatgatgattcagatccggcggacgcag

SEQ ID NO: 52781 - DNA, 663 bp, Oryza sativa
  Clone ID: PAT_MRT4530_55044C.1
cccagcacgagggaaagattagcggcggtgcaagagaagaggagagagcgagacgtcgcctgcgatgacaccggcctcacccgccgccgacaccgtcatcgccgccgcagccgcagccgtagccaccgtccggagcgaggagggagagcgccacacggcgccgagcgccgccaccgtccccgcctacgccgtctgggagaaggagcggtaaggagagaggagtagccgtcgtcgtcgtcgtcgacatggaggtggaggcagccaggtgcgagtgctgcggcttcacggaggagtgcacgccgcggtacatcgcggcggtgcgggaggagtacatggggcggtgggtgtgcggcctctgcgcggaggccgtgggcgacgagatccgccgcgccggcgccgggaaggccaccatcaccacggcggaggcgctcgaccggcacgttgcgttcgcgcgctccgccgcgccgcgcgcggggggcgccgcggcggaggacgacctcgtcgccgccgtctcgaggctgctccgccgctgcctcgactcgccaccggcgtccccggccgcgccaccgccgccgccgcaggggaggaaggtcgtcgtggtgtccggatgccccggcggcggagacgacgactgattcattgcttgctttcccgggcggcggg

SEQ ID NO: 52782 - DNA, 451 bp, Oryza sativa
  Clone ID: PAT_MRT4530_55045C.1
atgtacagaatcatcagagaagaaataacaactaagaccatataagcttctaagggtcagggactattgtttttcctgcttggtcattttgcatagcataccacagaatggagctacttgcttattgcttctcggaattcaggctaactgcatggagaatgtgttttgccttttgaaggaacacgatccgagcacaataacatacttaatttttgcagacggtgtctaacaatcgggattgcattgcatatactgtcattctgggccaaccataggatttgcaagtatttaggtgcctgtttacagaagattagacgatggcttgtgttctagtagtcgtttattcagtgaactagagatgatgtactgctgaatattgatgatgttcgttgattcaaatagtgtcgctgttacttgtgttgctttaaaaaaaaaaaaagtcttgggagat

SEQ ID NO: 52783 - DNA, 1034 bp, Oryza sativa
  Clone ID: PAT_MRT4530_55046C.1
ttttttttttttttttttttacacccatcaaacataatatgcagcagcacgtccatagatttccggaaacaggggggcaacagacagaactaaacacaatgcatatgtattgttacaaaactctcagcattttaagtttgttcattcgaacgatacaattaagagcccaggcacacaaatcagccaatacaacatattacgaggccaaaactgcaacggtacgatgcaccatctaatacctttctgctaacctagcagaaacagcccttagcttagaatagactttgcctgcaggagaacctaagataagactacagagtgaatcccgagcaaccttgatgttaacaaaggatccaagtatatggatcttcgtatcagcgataactatgcgagtcctcgtagaattctcgatggcatatttggtcttgcctccttttcctgacaagcggccaatagcacgtgacagatgctctcctcggagtgtcttcacgtccttgatctcaaaggaatccacatacaggtcatcgagacggagcagcgcaacagcatcggcgatgtcaaaaccaagcataaaagcatgtacgaagtctgcacacttctgaaggttgctcacgtcaggtgtgtcttgtcttgttttcagctccacccttcttgccttaaggttcatgcggatgtcgatcttcatgtgctcgtagacgggggtgtagatatccatccacgccttcttgagcggcgcgaagcggtgctgcggcaccggcaccttcctgaactgtggcctcccgccgctcatctcgctcggcatcagcgcctcgaaccgcggcttctccacgccgccagccgcgtccaccgccatcgcgccggaggacgaggaggattctccctgcccggcagcgctcgccggcctgccagcctccatcctgctgcccgttggctgtggcggtggcggcaatggaagccggcggcggagggtgtcggctctcgtcttctcctaggctagggtttgggaatcggggaagagcgcccggccgggccgg

SEQ ID NO: 52784 - DNA, 1182 bp, Oryza sativa
  Clone ID: PAT_MRT4530_55047C.1
cgggcccgaacgacgcaacggtgggcgtcgacgggcgccgcggccgggggcgacagaggcggcggaggcggagccagccgacgcggcggggggcgtcgacgggcgccgctgcgggggtcgacgaggcggggccgggcgacgcagcagtgggcgtcgacgggcgccgcgacagggggcgacagaggcggcggaggcagagccgggcgatgcggcggtgggcgtcgacgggcgccgctgcggggggcgacgagtcggcggaggtgtggctgggcgacgcagcggtgggcgtcgacgggcgccgtggtgggcattgcggtggtgggcgcagaggcaaaggcggggccgggcgctgcggtggtgagtgcggaggcgggcactgcggcggttggcacggaggcgtgcgtcgcggcggtggatgcggaggcgggcgccgcggcggttggcacggaggcgggcgtcgcagcgatgggtgtggaggtggagcgggcgccgccgacgctcccgccggaagcactctgcccggtggtggtggtcgccgtcgtcggagtcgccttcgacccgccggttcccgccggagtctcgcttggcaccgccggtgccgccggtgtcgccggcgtcgccggagatggcagcggcgggaagctcaagggcgcgggtgttgttgatggtaacgccgagcgaggaggcgccgccgccgagcacggcgcagaggcacgccggtttggacgtcaccacgctcgacagcgccgtgcagcacgacggcttcggcgccgacgagttcccggacatgtagcccaggcacgacgccaggctgattatctccgtcatgcagctgccgctgccgccgccgccgccgccgccctgccggcggcctttccccctcccgcgcagatcccgccgtctctccgccaccgatgcgcgcggatccgtcggcggcgatgacgggagggacggatccggtagcctctcctcctcgtgcggatcccgccgcctctccgccctgctcaagcgacgacgacggcggcggattccgacgcgatggcgatggcgacttcggcacgacgacatcggcagcgtcagcgacgtggggtttttcagagggcgtcaagggactcccgatcggccaagtccgggataacgtcgtcggtcccacatcttcatatttctttctggctggagtat

SEQ ID NO: 52785 - DNA, 348 bp, Oryza sativa
  Clone ID: PAT_MRT4530_55048C.1
atggccggcggccatatttgggttcgccaggccatatttgggttcgccggtggcgaacggtggccgatctcgccccggggccctgccgtcccgccgcggacagggaggggtcaggggcagcccggcggcggcggcgtcgtgccacggcaacgggacagcgcccacgcggggccacccggcgagagccacaggaggagcgcggcgaggacgaccatgaagatgagcgccgtcttgggccacttcgtcgacgttctccacgacctccatggagaggagaagatgtcagactccgacatgatcgctgttctttgggagatgatctttagaaggacggacacggtggcttga

SEQ ID NO: 52786 - DNA, 294 bp, Oryza sativa
  Clone ID: PAT_MRT4530_55049C.1
atggcggcgacgatgggaaaaggagaagagaagaaaaccctaaccttagctttggaagagaaggtggcggccggaggggagagagccgtgccatcgccgtcgcctctgggtcgcgccgcgcgccgcctccgccgtcacgtcattgcgccgccgcctcctctcgagagaggagttgatttattcccggacctagagaagagggaaacaccgtggtgggccaggctaaaatccacgttagggcttaaccgaacgcacaatttcgcatgggccgggatttctttctcgccggggtga

SEQ ID NO: 52787 - DNA, 336 bp, Oryza sativa
  Clone ID: PAT_MRT4530_5504C.1
tttaagtgttcgcagatagccgctccatgatattctgatttgttggtgactaggaactggaactgcccctcccagtatacggagtaccaatctgtttcttgagcacatgtttaaacatagggacatcgatgtagatgatcgaacaaagtgcttcgggaccgttaccaccttacttcacgtgagtgatgctgaattatgcagggaaccttacatgggagacttgtaagccccattcagcgagcaaacagtacaaggaaaacctccaccccaaggccgccctctatacccacaacgactgccgtgccgcccaccttctacaggccgactggactattt

SEQ ID NO: 52788 - DNA, 744 bp, Oryza sativa
  Clone ID: PAT_MRT4530_55050C.1
atgaagcgcttggatgaccacgacaaacggcctcaaggcactgtcaaggccttggactcacacgttacatgtgaggtctgcggcaacatgggacattctgggaatgactgcccagaaacccgtgaggaggcgatgtacataagcaacaacaacaacgggtaccgtccacaaggaggccaggggtggaaccagccacgcccgtattatcaaggagaaaccaatggggtagccaaggaagcgccatccagtgactcggctgacaaagagattcagccagaaaaggtcgtgccgcaggagccgcggaagtcggttcggacaggagaaggagaagaaggacatggcaatggaggcgtggagaagaagagcacggcgccggctctgtccgctgattggccggtgatggcgaactgcgggcgacggcagcggctgcgcgtgcgagcgtgcgccaagcgcgtccatggcacacggcggtggcgcccacgggacagggaggaggatcggctgtgtggctgggccagcctgggtcttggtctgttaggtggtgcatcaaacattttcctcttcctattcgtcttcgtcttcctcttcatcttcttcttcgtaagggtctccaaaagagtcttcatcttcgtcttcgtgagagttctcatcttcatcttcctccacttcgtcctgatagatatcgtcttcgccaatgcgcagcccggtggcagacttccagaggtggagccatcgccgggctag

SEQ ID NO: 52789 - DNA, 1233 bp, Oryza sativa
  Clone ID: PAT_MRT4530_55051C.1
atgaaaaaaggtgatggcttttaccgctatgctatcttttgctcaggaggatttcttataaaggaggctgtccggacgtgcctgctagcccggcgatggctccacctctggaagtctgccaccgggctgcgcattggcgaagacgatatctatctgcgctgcgtgaaggacaataaggagtttctcgaccgtctgctgctactccgtgatggcgcacctctcgacacgtgcgtgctaaggttccgttggctcgattggtacagagacgagggcctcgatgacacagtacgggtgaaccactggttcaggcatgctttgctccacaaggttcggttcctcttgctcgatgtcgatatatggtatcgcttcccgtttctgatagatgagatgccacttgtctcccgacacttgacgaggctacagcttaagaacataggcctaaacgacagctttcttaacttctcgagctgtccagcattggagcatctagtgtttgagtcatgcaaatttgactgtgccaagatctcatctagctctgcaaaacgtttgagcataaccaattcctatttcagtgagacgtctcggatacgtatcgctatcccgagtcttgtttctctgaagctggatgatttccatggcaggactccagtgcttgagtggatgccatcgttagttgacgcatttgttagagtcctctactgttataaagaatcgtgtagtcattatgactttggggattgttgttgtgagggctttgaaccttgttatgatatcaaggaccacaaatgcatgcgtttggaaggtttatcagaagctaagacgttggtgctgataaatgaacgtagattgtttattttcaaaagggatttggaatggtgcccaacatttaccaagttaaagactttgttactcaatgaatactggtgtgtgcctgatgattttagtgcactatcttgcattcttgaacatgcactggttctagagaatctcattcttcagatctattccaagttgtatatttgtgagagtcgatattgccatcttatagctcgcatgccattttccatgtacgcaatttttagttgtaaggaaatcgagattttggaaggatatgacaatgaccaggacgaagtggaggaagatgaagatgagaactctcacgaagacgaagatgaagactcttttggagacccttacgaagaagaagatgaagaggaagacgaagacgaatag

SEQ ID NO: 52790 - DNA, 265 bp, Oryza sativa
  Clone ID: PAT_MRT4530_55052C.1
cggacgcgtgggtagctggctgacaacacgcacggtacatcagttttgtttttgttgggttttggtttttcactttcttttgggtcgtcgtgcgtgtatagagcgatgctcgcaagattgcaagaatatatgtatacagacacattttttgttattatgtctccgttgtaataagaagcaagagagtaattttgtcaaaaaaaaaaaaagagataaaaaaaaaaaaaaacaaaatataacaaggtcgaggccgctagacaaagaa

SEQ ID NO: 52791 - DNA, 1218 bp, Oryza sativa
  Clone ID: PAT_MRT4530_55053C.1
atggcggcttctatctccggagctcgcacttgctaccctagcgcggcggtggcgcgacgtggcggcggcggcggccggtgctgctccgtcgtcaggagctcgctggcgacctcgtcgccggcgacgtgcaagccgtcagggatgatgcggattggcaggcagtggacggagctccagggtgctcgtgattgggacggcctgcttaacccgctcgacggcgcgctccggggcgagctcgtccgctacggcgagttcgtccgcgccgcgtacgccagcttcgacttcgacggcggcgcgccgtcgtcgtatgggtcgtgccggtttccgaccagctccctgctgcgccgctccgggctccctgagactggctaccgggtcaccgggatcctccacgccgcgtcgacgtcggcgcccggctggctgtcgtgcaggtccagctacattgggtacgtcgcggtgtgcgacgacgaggacgagatcgagcggctgggtcgccgcgacgtcgtcattgcgttccgcggcacggcgacgtgcggcgagtgggtggacaacttcaagtccactctcacccacctgccgccgcgatccggcgacggcgaggcggcgccgccgatggtggagagtggattctggaggctcttcaccacccccggcgaagcgcacggcagcctgcagcaacaagtgcgcggcgaggtgcagcggatcgtcagcgagtacggcggcgagggcatgccgccgttgagcatcacggtcaccggacacagcctcggcgccgcgctcgcggtgctcaccgcctacgacatcacgacaaactcccccatgcaacgccacggcggcggcgacgacgacgacggcgaggcgccgatggtgaccgccgtgtcgttcggcgggccgcgcgtgggcaacgcggcgttccggcgaaggctggaggagagcggcggcaaggtgctccgcgtggtgaactcgaacgacgtcgtgaccaaggtgccggggttccccgtcgacggcgacgactgcggcggcggcgctcgggagggcgacgcgccggcgaggaggaaaccgaggttgccgaggtggctggtgtccaagatggggtgggagtacagcgacgtcggccgcgagctgcgcctttgcagccagggcgacacggcgcgcaacgtggttgcatcgcatgaccttgatttgtatctcaagctcgtggcagcctgcacatattag

SEQ ID NO: 52792 - DNA, 1482 bp, Oryza sativa
  Clone ID: PAT_MRT4530_55054C.1
tcaaactgcatagaggcggatgccaacgattaatcttacgcaaaatatatggcacgctgagatatattggtgcacaagttccaactaggaatcctccgtactaccgttggaaatctcacatgatgcacatgacacagaagatgtaatttttacaggacaattggcaggttgagaatgacccatgctggcaacgtcaggattgccacatgatggattttcatacccttgaagctcttgtttgtcaccatcacacaccggtagaacattgtcacgagtacttgttgctttgtcgaatagcgtcaaataaatagaggcctaattaatcgttggttcctcaagttgacatttccaaagtttaattacagcttgtggtttagaagcctgcaattcagggtatatcgtcagctcaagcttgagtggccgagtttgatttcgtgcttcacggggtaaaatcaccgcccaaattttcctagtcaggaattgtggagcaaatgcttccaaaaatccaggaccatagttctccctcatccatccacaaaaaagagaaatacgtccctctatggctcgtacgacattcacatgacccttttctctagccaaatcaagtgccgtgtggcaatcatcatttgttataaacggattagctccatgagatagaagcgaatggatggtcggctcaggacctttcttgtcctcctggctgggtgtggatatcactgaaggtaatggacggtaggcgttcacatttgcacccaattcaatcagcacctgaaccacattgatcagatcaggccgcatgctcgcgaccatcaggggcgtcttcccttccttgtcgatccactcaagacctgcgccctgcgcccggagcgcccgaatcccatcggcgttgccgtagttgaccaccgaaggattggcctgattaaactttggttcctcaagttgacatttccaaagtttaattacagcttgtggtttagaagcctgcaattcagggtatatcgtcagctcaagcttgagtggccgagtttgatttcgtgcttcacggggtaaaatcaccgcccaaattttcctagtcaggaattgtggagcaaatgcttccaaaaatccaggaccatagttctccctcatccatccacaaaaaagagaaatacgtccctctatggctcgtacgacattcacatgacccttttctctagccaaatcaagtgccgtgtggcaatcatcatttgttataaacggattagctccatgagatagaagcaaatggacagtctgctcaagacctttcttggcagcatggtgcaatgcagtcccacaatatgacccaggacggtaggcgttcacatttgcacccaattcaatcagcacctgaaccacattgatcagatcaggccgcatgctcgcgaccatcaggggcgtcttcccttccttgtcgatccactgctgatacaccagctcctccttggattgctgcagccccat

SEQ ID NO: 52793 - DNA, 2583 bp, Oryza sativa
  Clone ID: PAT_MRT4530_55055C.1
atggcgagtatgcgaatatgcggcactagtgataaagagggagagggagagggcagcgtagaaaaggagggaagctcacatctgccacggacctcggcgcgacgcctggtccaactggtggtgaagatgcgcggccgcctatgctgaccgccgcaccccgtcggccggcccgactggtcgtcggactatgtccgagagccctcggaccgagggacctcgcctggataagatcccactcgcgtgacatagtcagacagcctcccgacgaagtgaacttgaatggggatcttcgcgggcgctaggcgcagcatgacggcgaacgcaggatcgcattaatgtactagttagctatagctatttatttggaggtggttctttcatcagatgatgcatctaacgagctcagcatcagtattggtccatccactttgaacaatgcattaccagatgggattctgagtggtcttgaggtcatgaagttcagcagtggctcaggttctgctttcactgttggatcatctggttccaacaacaatttaggtgtgattattgagtcagtccttggagctgttggtattttgataattgtccttggccatagtacttctttgccgaaagaaaaagactctgaagaagcagcactcaaagacttggatgcctttctctatcaatgggctcacctctctcagtacaggaagtagaacttcttatggtactactctcacatcaggggctgaatggaagctatggataccgatttgccatggaatcgcattcatcaatgcgattgaagtggtttcagtcccagatgatctcataggtgatagtgccccgatggtcaaccctatgcagcagtacagcggtttatctacacaaccattggaaacagtgtaccgtgttaacatgggtggaccaaaggtcactgcagacaatgataccctctccaggacctgggtcactgacaaaaagtatttagtgaacccatctgtgactagagaggttaatggggggaaggtcaattatatgaaaggtggaggatcaacaccgctgattgctcctgatattgtttatagcacagctacagaattggcagcttcgaatacaacgaacgcacttttcaacatgacatggcagtttgatgtggattcaggtttcagctacttgataagatttcacttctgtgatatagtcagcaaggcacttaaccaactctatttcaatgcatatgttggcagcttctatgcgcagcatgatattgatctctcaattcaatcaatgaatcagttggctacagctatctatttggatgtggttctttcatcaaatgatgcatctaacaagctcagcatcagtattggtccatccactttgaacaatgcattaccagatgggattctgaatggtcttgaggtcatgaagatgagcagtggctcaggttctgctttcactgttggatcatctggttcaaacaagaatttaggtgtgattattgggtcagtccttggagctgttgggctgaatggaagctatggataccgatttgcctttagcgtgctccaagaagcaacaaacaattttgatgagaactgggttattggcgttggaggttttgggaaggtctacaaaggtgtgctgagggatgacaccaaggttgcagtgaagcgagggaacccgaagtctcagcaaggtctcaatgagttccgtacagagatcgaactcctttcacggctgcggcaccgccatctggtgtccctgattgggtattgtgatgaaaggaatgagatgatcttggtctatgaatatatggaaaaagggactctgaaaagccacctgtatggctcggataacccctcactcaactggaagcagcggttggagatttgcattggagcagcaaggggacttcactaccttcataccggttctgcgaaggctattatccaccgtgatgtcaagtctgcaaacatcttgcttgatgagaatctcctagcaaaggttgctgactttgggctatcaaagactgggcctgagttggaccaaactcatgtcagtactgcagtgaagggtagctttgggtatcttgaccctgaatatttccgaaggcagcaactgactgagaagtcagatgtctactccttcggtgttgttttgctcgaggtgctttgcgcaaggccagtgattgaccctacgctcccaagggagatggtgaatttggcagagtgggggatgaaatggcagaagagaggagagctgcatcagatcgtcgatcagcgagtttctggttcaatcaggccggattctctgaggaagtttggcgaaacagtggagaaatgcctggcggactacggtgtggagcggccatccatgggagatgtcctgtggaacttggagtacgtcctgcagctccaggatgcagattcatcgacagtatcagatgtaaacagcatgaacaggattgtcgaactcccgtcgcaagtccagaacatcggcgccctcgagagcatcagcgtgacaatggcggaagctggagcttcacatgagcctgatcatgacctctccgacgtttccatgagcaggaagtga

SEQ ID NO: 52794 - DNA, 257 bp, Oryza sativa
  unsure (1)..(257): unsure at all n locations
  Clone ID: PAT_MRT4530_55056C.1
gggctcagccgtttcgaaggggatcgaggcgacaccggcgccgccgccaccgcgcgggtgcttctgctacggcggcggcggcagtaggcgggcgcgatggcgggggttgngagctggtacgggccgctgatcgacctctcggcggcggccgggcacttgngcgggttcgtgcaactactgacgtccgttcggcgcgtgcttnccaaccagtaacaaaatgctgtagatggacgggccgtttaaaaaaactatgcttg

SEQ ID NO: 52795 - DNA, 1620 bp, Oryza sativa
  Clone ID: PAT_MRT4530_55057C.1
gtcgcgtccggtcgtgttttgcttgtgagaatgtatacatgtctttttctctttttttagccaatttcatttaaacaaataaacagttttgaatgtggtgtgcattttatctctaagcacttcggtccccccggtacaattggttaattctcagttcttgaaagccatagctataaactagtatcaagaactctcatccattttcgaagattcctcgacgcccttgaaagtaacacgcagcttcctcagagaggatactttcttcccgttgttttctgccattccagttacatgcacagtcgtgcgtgcagctcctttgagtagctcaaacattgggacacccaggtttggtcgcgtcatctgctctaggacttcaggtgcctgcatgtagaggttatcgccttcgtgtgttacgctagccctcgacattagcagcttggggtgctcttcaagcatcttgatgaactctgagagggtagtcgatgtcccaagttcaataagggtaccaggtccacatacaaggcagtctttctctcttgcaaattcgcttacattaatgtgtgttccatcaaggccgttatacgtgagataattcgacacagttttgctgcacccagagataagcttaagagcttccaacgcacatgcagcagaaacaattgcatttgttgaagcaatggctgggatgatattcttgacaacaccctgggtaaacgaatatgtaactccagaaataccaaaaagttctgctctctttaaagcctctgagtaaatccactgcatatgttctgcatcatcagcatcaaaaggtttcccaggatgaacctcattccatttgatcaaatgagcatattcaatgcaatgagctgcagttctcggagtctcagcaagtgtacataagggaaatttgacctggggagggaaaagccatatgttgcattcaaaacaaggtgttgtcccaggtatgatgactctagcatgacctttgaaaccttcagtcccaccatcgaccataggtttaagcgtctcagggattggcttgtcatctgagtcatactctaagaaaccacacgccacggaattgatatagcttcgagcttcaattgaatctagaccaagaacaattatcgagaattgactgtagaactctatctctttatcttcaatcctacagaaatgtggaacaatgttcactccactaactcgctccataaccctctttgcagcaacttcagccttggacttcccaacatcttgaaccctgaagaggaactggcggttgaggttggagacgtcgatggtgtccatgtcgatgacgtggatgttcttgaatccggagagcgccaggtccttgaggagctcgcaccccagcccgcccgcgcccaccaccagcacctccacgaggctccccagcgagtcccgcagcccggggctggggttgaagtcggcgtggacgaggttgccggggcgggagaggagcatgtccagatccctccaccgctcgggctccgtcggcgggtcctcgtcgggggaggacatctcgccggccctgcttggacggtgggaggggaagaatcgctggtagaagagaccctagtagaaagagagattgctgcgcgt

SEQ ID NO: 52796 - DNA, 179 bp, Oryza sativa
  Clone ID: PAT_MRT4530_55058C.1
gcaaacaaaactacaaaacttcttaaatggtagggacggagggcagtatctgttctgacagccaacaagatgcatgcttttatgcagacgaacttgcattacttattggcactgagggtcccatgatcctatctggacagagccgaaattcaatgtctttagcacgcacgtacctgctc

SEQ ID NO: 52797 - DNA, 249 bp, Oryza sativa
  Clone ID: PAT_MRT4530_55059C.1
atggccaaacccgtccaagccacagctggagtggagtgccggaaaccggtaagcaagctagggaggaaggcggcggaagggctgctcatctctgtgcagcagcgttatactccgcaccggaagaagtggcgaatggagagccggcgactgcagtcggcgtacggtggaggtcagcatctggcgacggcgagatggcactctgtgtggataggtgaatatacgtacttcttcgccaccttcattgcttag

SEQ ID NO: 52798 - DNA, 298 bp, Oryza sativa
  Clone ID: PAT_MRT4530_5505C.1
tttatttttccccacccccgcaccgtttcctatgtcggtttttaaagctagcgggggagatgccctccacaagctcaccttactcccctgccatggatcaactgcacggtgagagcttccagaccacggtggtcattgacgttttattctactaaggtctgtctcggacgtctcctccctcctcctccgtttcagaaatcccaaaggctgtttggatcctgacaacttcaagaagtatataacatgttgaaaaataagcaaataatgtcatatcgtgggctgattaaaattttgcttt

SEQ ID NO: 52799 - DNA, 2212 bp, Oryza sativa
  Clone ID: PAT_MRT4530_55060C.1
atggaaaccctaatggtggaccgcgtccacggcagcctccgcctcttcatgcaccgcaacgccgtcttcctctgcgagcgcctctgcgcccagttccccgccgagacaaatgtccagttgctagcgacttgctaccttcacaacaaccagccatatgctgcataccacatcttgaaaggaaagaagctgccagagtcccggtacttgtttgctatgtcatgcttccgaatgaacctcttacgggaagctgaagaagccttgtgtcctgtcaatgaaccaaatattgaggttccaagtggtgcaacagggcactaccttcttggagtaatttacaggtacactggcagagtggaagctgcagctgagcaatttgtacaagctctgactcttgatcctcttctatgggcagcatacgaggaattgtgcatactaggtgttgctgaagatgcaaatgaatgtttcagtgaagcaacagctctacgtcttcagcaggaactcacatccacatcaaatgtggaaaagtcaaactttgttaatgaaaatcggtttctatcttccaatgtgtcagcaagttttggtgatagtcctaagcaaattaaacagctgcatgctaacaccactgcagaagtatctggttatcctcatgtaaagtcaactgcattgcatatgcagaacggtgcaccatctaatttatcacagtttgacactccatcgccaacttcaacgcaggcttctggcattgctccaccaccactctttcggaatatgcatgcttatcagaatacagcaggtggcaatgctccttccaaaccaaaggttaatgctccgaacctgacactccgaagaaaatacatcgatgaagcaggcctaaagaaggtttctggaaggctgtttaatcagagtagtgattcagttcctcgaagaagtgcaagactttctagagatacaacaataaactcaaactcaaatatctctcaatttggagggaatggaacagatcactcgtcaggaaacaggtaccacgttgttgatgaaatgtggacagataatgtaacttcaacttcgtcttctacaagtatagttgatggaagatatcccgagcaagagaaatctgaacgagttctgtcacaggactccaaattagctattggtatcagggagctaatggcactcttgcggacactaggggaagggtataggctttcttgcttgtttaagtgtcaggaagcattggaagtatatagaaagctcccagaggcacaatttaatactggatgggttctttgccaggttgggaagacatattttgaactcgtcaattatttagaagccgatcatttttttgagttagcgcatcgactatcaccatgcacgttggagggaatggacatttactccactgttctttatcatttgaatgaggaaatgcggctaagttaccttgctcaagatcttgtttctattgatcgactatctccccaagcatggtgtgctgtgggaaattgctttgccttgaggaaagatcatgagactgccttgaagaattttcaacgtgctgtacagcttgactcaagagttgcatacgctcacacgctatgcggtcacgagtattctgcattggaggattatgagaacagtataaaactataccgctctgcacttcaggtagatgaaagacactacaatgcctggtatggccttggagtggtgtaccttcgccaggaaaagtttgagtttgctgagcatcatttcagaagggcattccagataaatccttgctcttctgttcttatgtgctatcttgggatggccttgcatgctttaaagaggaatgaggaagccttggaaatgatggagaacgctatatttgctgataagaagaatccactccccaagtatcaaaaggctttaatccttctaggcctacaaaaataccctgatgctctggatgagttggaacggctaaaggaaattgcacctcatgaaagtagtatgtatgcactgatgggaaagatttacaagcaacttaacattcttgacaaggctgtattttgctttggcattgccctggatttgaaacctcctgctgctgacgttgctataatcaagtctgcaatggagaaagtacaccttccagatgaacttatggatgatgatgatgatgatgatgagatttaactcactcctaataacatagggtaggaaccaacat

SEQ ID NO: 52800 - DNA, 778 bp, Oryza sativa
  Clone ID: PAT_MRT4530_55061C.1
aaaaaaaagaaggaaaaaaagaaaacgggaaaaaaacgatgggataaaatgatagagaaaatggggggaaaaatcaaaagggttaaagaccgagaataagaaggaaaaaatgagcgtaaaaatgacgggagatgggtggaaaaaagaaagggcaaacggaacaaggggatggggaatggaggaaaaaaaacaagccgataggggaaaaggggataaagcggggataaattagtaaggaataagcatttaggggaataatgaaaggataatgaacgaataaaaaaggaaagttgagtggattattagaagaaatgaaagaactggaaagaaaaagggggaaaaaggggaaaaaaggggaagcaactggggtataaaggggggaaggggaaaatgaaagaaaggagggagggaaaggaaaaaaatggggaaaagggggaaaaaaggggaacaagggacggggagggaaaaaacaaagcggggaatcggagaaggaaccgaaagggaaaaagaaagcgaaaagggaaagcgggaggaaaaaggaaaaaaaaaaaaatggggaggaatgagaaggggaaaaataggaaaaggggagaaaggaagtaaggaaaaaaagggggaaagacggggagggcaaaagaaccaaaggaaaaatgaaaagggaaaagggaagaggaagatggaaaaaagaattagagggataaaaaaaattagaaaagttaaaaagccgccccctccctccactgcacatccgccgcccgtggcccggcctgtcgtcatg

SEQ ID NO: 52801 - DNA, 469 bp, Oryza sativa
  Clone ID: PAT_MRT4530_55062C.1
ggataaattccccactctcttttattattaactaacgttaaatcacacagattttttagccaacaataataatgaatctcgaagctgcaatcaacaaaccaaacaagccaacatgcagtatcttcacaggtcacactagactattgaaccgaaacagtcaactagcacaacacaccatcaccatatatactagtagtaactcaagacatcacaagttttttgttctctctctttctgaaattctgcaccagcctctaggtactccacagtccaccacacacacgcagagagatcatgtcactttcatttctactgtcagtttcttgcttcttctttagtcccaaagcaaccgcagaaaaagtcaaagaaccaacgtttcaatggattcatttgtgctctgctcaaaccactagcttgctggccaccatgaattttctgattgttcaactgagcaaaaatggccttaacg

SEQ ID NO: 52802 - DNA, 525 bp, Oryza sativa
  Clone ID: PAT_MRT4530_55063C.1
atgctggcgccgtcgtatgaggggcggcgccagggtggctggcgcctccttctgcccagtcagcaccaccacgacagtcctagtgccacggtggcacgggcgcgccgccatgttgctggcccactcccacctcttatcctcccggcctgccccagccgcctcctggcccaagccgagccgcgcctcccacgcccctcacgcacgctgaccacgcctgaccggtgggacccacccacccgctcgtctccttcctcccgcccggctcaccgttggctgccatcgccctcctccaagctggctgccatcgtcgtcctatcgtcgttcctggccgtcgtcctcattgtcgtggcattcatccctccgtcaagccgatcatgtccatcgtctgtgtttcgtctagtgtgccgctaccccgttgtcatcttcgtcctcggctccgtgtcgtcaagtgttgcgccggtctcgtctcgtcttcatcctacggtcgccgccaaagtcgtctcctcatcatcccgtcattcgtag

SEQ ID NO: 52803 - DNA, 701 bp, Oryza sativa
  Clone ID: PAT_MRT4530_55064C.1
atggaggatcatcgaggacgtccaagtcaaggtggagggccaaaccaagttgacgtcgggaacaatgaggggtcaaggagacacttggagaaggacttagagccatggaggatcatttgggacgtccaagtcaaggtggagggccaaaccaagttgacgtcggaggtcatcgtcgctcaggagttgttgcggagcgtcggcgtcttccatcgagacatcggctgatgaacgagtactagactcgtcataacaacttgatggagagcccgaccccttgaacagacaagacagtcgcctcctcatactgcacaatggagcaagactaactcggcgggggttagaaatgacaagagtttcacccgcacgttagtttcaccaaagcaacttgtatatatgcaactaaagatttgaacttgcggaaaactatcaaagcataaatgaacttgagagcaaactttggagagggaatgaaaatgtgttgaaatggggtggaattccctctctcgtggcttttatagggtactcacaacggtcagaaatgacatgtgggacccactagctgttaccctgccaaagatggcaggtaaccgttgcctggctggatcggccgaaccagggtgtttggccgaacccctagtgggcccaactggcccagccccactttcggccgttggaatccaacggtcagtgtggtcgtggcc

SEQ ID NO: 52804 - DNA, 614 bp, Oryza sativa
  unsure (1)..(614): unsure at all n locations
  Clone ID: PAT_MRT4530_55065C.1
gcnggtngccgtttggtggcccgtggttggccngccnggcnggtgggttgggcccgaaaaangggcgttccggcgggcgggtgaagctgcnggcgaacnttgacgtcatccatcgcncccgtggcctgtccgtacgttnatggggaacgggagagctcgcncgtccntcctccttgctgcagcggggttgaggaccctccacngcaaaggcctcntccttcggcngaaccgccgcnccncctgcagctgcccccnntaacattgnccncctccttcttggaacctcaanatgggccacgccncctccatccccancanattccgcgttctccgtcgcntttccccatcagcacctctntcnactgctccaanatcnacnttttacttcttgatcatccccnctgaaatccacatgtntcggaatatcttnaaaattcacttttctcttcnaactttgtttatntccnnncttncnttcgttnctttccatataantttcccntgctttccaatgtttactccttantttcnagtttnncaaccttncnttttnncccaatgcctncttnntctaancatnacnnntttnttcttgaatccnncccttaccnccc

SEQ ID NO: 52805 - DNA, 1123 bp, Oryza sativa
  Clone ID: PAT_MRT4530_55066C.1
gcctccgttcacggtcaaacccggcgaccgtacgtcgtcgatcgacgtctatatatataaagcttcaatccgatcctcccccacacaaatcaatcacacaagcatcagcagcagcagcagcagaagaagatcgaagattcggttgataagttgattgatctgctctcgcacttgttgcgtacgtttgtgtcaccggagctcgagaagaagagtgtgtccggcaatggaggcggcggcgagctcgcacgaggcgctggtgaagatgtgggtgttcgtgctggtgcaggcgctggtgtacctcatcctcgcgcagtcgtcggacgtcttctccagggcccagagcctgcagggcggcggcgccccgcggcggccggcgcgctccgtcagcgccgtccgccgacatgctcgccgcgctctccgacatgcccgccggcggggagccgtcgcccgtggtggccgtcgtcgatggccggaagaaggattgagagaggagagcgccgccgtcgcgccgccgctgccgccgccgctggtggtgccgatgacgacgccgaagccgagcccgacgatccggaggctggacgtggcgtcgccggtgccggcggacatcgacatcgccaacgccgtctcgccgctccccatcgccgacatcgccgcggagctcggcctgcgccccgagcacttcgatctctacggcaagtacaaggccaaggtgttgctgtctgttcttgatgagttgaaagggcagcaggatgggtactacgtggtggtcggcggcatcacgccgacgccgctcggggagggcaagtcgaccaccaccgttgggctgtgccaggcgctgggtgcgtttcttgataaaaaggttgtcacttgcctccgtcaaccatcacaagggcctacttttggaatcaaggggggtgctgctggaggtggctacagccaagtcatacccatggatgagttcaatcttcatcttacaggagatatccatgcaattacagctgcaaacaatcttcttgctgctgctatcgatacaaggattttccatgaggcttcacaatcagacaaagcgctgttcaatagactatgtccgccaaacaaagaaggaaagaggcgctttgctgat

SEQ ID NO: 52806 - DNA, 724 bp, Oryza sativa
  Clone ID: PAT_MRT4530_55067C.1
aagcctcacgaatcaacaacatacggcaatctttttttttatctcccaacgttctcgatggtactgagcaaattgagccaatgtaaaatgttacagtaccattaacaaaaataacaaccaaaattcactatgtagtattgacatgcatacaaatcaaacgaaatgaatcggatcaaagaatggtgaacatccagcaagcaacaggagcaatatatcatccattttagctccgcgtacttgtcgcaacaaatcaattcaaacactggcacctctcctctctcaatccttcttccggccatcgacgacggccaccacgggcgacggctccccgccggcgggcatgtcggagagcgcggcgagcatgcggcggacggcgctgacggagcgcgccggccgccgcggggcgccgccgccctgcaggctctgggccctggagaagacgtccgacgactgcgcgaggatgaggtacaccagcgcctgcaccagcacgaacacccacatcttcaccagcgcctcgtgcgagctcgccgccgcctccattgccggacacactcttcttctcgagctccggtgacacaaacgtacgcaacaagtgcgagagcagatcaatcaacttatcaaccgaatcttcgatcttcttctgctgctgctgctgctgatgcttgtgtgattgatttgtgtgggggaggatcggattgaagcttttatatatagacgtcgatcg

SEQ ID NO: 52807 - DNA, 2537 bp, Oryza sativa
  Clone ID: PAT_MRT4530_55068C.1
cccaaatatcttgcagtgaaaaaggttaggaatttgagggttcttggtaatcttgaagtgaaaaaggtgggatatttgaggggctttgtggctgtattatttgggggaggtgtttgcgtcatggatgtgtctgtcccaccaaccaattatccgaaatctttatcctcgattatcaaatgccatcgtcgtcgtgcggcaataaacaattgccattcagtcgtctcgcatccgccgctctcgcactcgaaccaccaccaccgctcgctgcgtgtgagatccagcgccgccgtcgcgccgccgctgccgccgccgctggtggtgccgatgacgacgccgaagccgagcccgacgatccggaggctggacgtggcgtcgccggtgccggcggacatcgacatcgccaacgccgtctcgccgctccccatcgccgacatcgccgcggagctcggcctgcgccccgagcacttcgatctctacggcaagtacaaggccaaggtgttgctgtctgttcttgatgagttgaaagggcagcaggatgggtactacgtggtggtcggcggcatcacgccgacgccgctcggggagggcaagtcgaccaccaccgttgggctgtgccaggcgctgggtgcgtttcttgataaaaagataaagtttgtgattggtgttgaggttgtcacttgcctccgtcaaccatcacaagggcctacttttggaatcaaggggggtgctgctggaggtggctacagccaagtcatacccatggatgagttcaatcttcatcttacaggagatatccatgcaattacagctgcaaacaatcttcttgctgctgctatcgatacaaggattttccatgaggcttcacaatcagacaaagcgctgttcaatagactatgtccgccaaacaaagaaggaaagaggcgctttgctgatgtaatgctcagacgcctgataaagcttggaatctcaaagacagatcctaatgagcttactccagatgaagttagacgctttgcaagacttgacatagaccctgaatccattacttggagacgggtcatggatgtaaatgaccggttcctgagaaaaatcactattggacaaggccctgatgaaaaaggtatggtgagagaaacaggctttgacatagctgtagctagtgagataatggccgtattagctcttacaacttcccttgctgacatgagggaaaggcttggaagaatggtgatagggaacagcaaggcaggtgagcctattactgctgatgatcttggtgttgggggtgccttgactgtcctaatgaaagatgccatccatccaacgctcatgcaaactcttgaaggcactcctgtgttagtgcacgctggaccttttgctaatattgctcatggaaactcttcgatagttgctgataaaattgcactgaagttggttgggaagggtggatatgtagttacagaggcaggttttggttctgatattggaactgagaaattcatggatataaagtgtagatatagtggattaatgcctcagtgtgctattattgtggccacaattagagctcttaaaatgcatggtgggggccctgatgttgtggctgggaagcctttggatcatgcatatgtgagtgaaaatgtggctcttgttgaagctggatgcgtcaatcttgctaaacatatcgcaaacacaaagagttatggagttaatgttgtagttgcaatcaacaagtttgcatcagatactgaagcagaaatggacgtggtgcgaaatgcgtctttggctgctggtgcttttgatgctgttgtctgcactcaccatgcgcatggtggtaaaggagcggttgatcttggactcgcggttcaacgggcatgtgagagccaggcagaccctctgaaatttttgtatcctttagaatctggcataaaggagaagattgagtcaatagctaagttctatggtgctagcggcgttgaatactctgaacaggcggagaagcagattgaaatgtataccaagcaaggcttctcaaacctcccaatatgcatggcgaaaactcagtactcgttttcgcatgttccatccatgaagggcgcgccgtctggcttcgtgcttcctatcagggatgtgagggccagcattggagccggtttcatctacccactggttggcaccatgagcacaatgcctggtcttcctacaaggccctgcttctacgaaatcgacgtcgacacagccactggcaaagtcatgggtctgtcataagcgtttctggaatggattgcaatttggggcacaattgtgtagttgcaaattttgggacattcccttagctgaataatagcctcagtggcttcctgcaagtgcagcaatacatttttctttttgagtttcttggtgactgtaaatcagtaaatgtggtcgaaccatactgttcagactctgttccaatgccccatgtttcagcttaacatgctttctctgattcttcctgtctaaaaaaaaaaactcaagactagttctctccctcgtgc

SEQ ID NO: 52808 - DNA, 487 bp, Oryza sativa
  Clone ID: PAT_MRT4530_55069C.1
gccagctggatgcttagacctttggtgaaataaaccagacaacagcattcaataaataacgcagctgtacaacaatggtcagtggctcggtgcatacaatacgaacttccgacacacctctgcatctacccctccacccctccgtcaaaaaaaaaaaaaaccaatcttagctacgaacatagacatatgcgtgttcaagttcgtagctagggtttgtctttttttgaggcggagtagtacatcacagcattgacaaagttaatgagattacagaggagcccttgcaggctaagaggacatagaggaaaggagtgaagaggccttttcatgtcaacacatgcctgaaatggatcaagaatccccttgaaagttctcatcttcacagctgaaaattaaaaccataagcaatctgtctgaggaggttttatcctacccattaatgccacagtgcatgtgtgttgtattggattgggatacttctggttta

SEQ ID NO: 52809 - DNA, 775 bp, Oryza sativa
  Clone ID: PAT_MRT4530_5506C.1
cgccaaactctcctttaccccaatctcgtgagcggcgacgaactttgccaccgatttcgatccttttttttggcagcgtgtagtgacgcgagagagaaatggcgagcaagaggagcgtgggcaccctgacggagtcggatctgaaggggaagaaggtgttcctccgcgccgatctgaacgtgccgctggatgacagccagaagatcaccgacgacacccgcatccgcgcgtcggttcccaccatcaagttcttgatggggaagggcgccaaggtcatcctggccagccatctgggtcgcccaaaaggtgtaaccccgaagtacagcttgaagcctcttgttccgcgcttgtctgagcttcttggtgttgatgttgtgatggccaatgactgcatcggtgaggaagtccagaaattggctgccactttaccagatggtggtgttctgcttctagaaaatgttcggttctacaaggaggaagagaaaaatgaccctgaattcgccaataagctggcatctgttgctgacctttatgtaaatgatgcctttggcacagcacacagagctcatgcttcaacagagggagttacgaagtatttgagaccttctgttgctggtttcctcatgcagaaggaacttgactatcttgttgggagctgttgccaaccccaaaaaaccatttgctgccattgttggtggatccaaggtgtcaacaaagattgggggtgattgagagtcttttggcaaagggtgacatcctcatctggggggggggg

SEQ ID NO: 52810 - DNA, 1973 bp, Oryza sativa
  Clone ID: PAT_MRT4530_55070C.1
ccacgcgtccgtagcctcgcctcgcctccctccgccgccccggttacgcaaccaaataccgacggcgccgcccgccgacgagccttctcccttcgcgccgccccctcgcagcatcctcgtgccctcctccggcatcttcctgcgccgcgttagcatcgtctgtcggcgccgtcggaggttctgctcggagctcgcttccgatggacggcgcggcgacgggcacggagcgcctctgccctctaggatgaggggccggagacgtcgccggcggaggcttgtgcaagtcatctatgctagcacacttgatgactgatgtcatggaagataattcttcatggacagctctttctattgatcacattagaatttctgcattcaatttcggaattgtctccgaggataacgatgaaggcaaagaatttttgctttcattggacactgttgttcctgatgatatcctggagagaattttcacgtttttacctatagtaagcatgataaggtcaacagcagtttgcaaaagatggcatgacattatctactcaagcaggtttctttggacccacatgttgcctcagaggccatggtactttatgttcacttctaatgaaagtgctgctgggtatgcatatgacccgattctccgcaaatggtatgatttagagcttccatgcatagataagagcagttgctttgtctcttcttcttgcggattagtttgtttcatggacaatgacagcaggaatgccatttctgtatctaatcctatcacaaaagattgtaagagaattttggagccccctggtgcaaagtttccagactacagcacaattgccataaaggtagatcgttcctctcataattacaccattacattggcaaaatgcaagcaagttccagaggattacgtccgatgggatttctctttatacaagtatgactcacagagtagttcatgggtgactgcggttgaggaggtgttcattggttggagagggggtgatgacagcgtgatatgtgatggagtattgtactgtttaattcactccacaggcattcttggtaatattgaaccgcgtcatagcattatcatgtatgaccttattgctgggccttctaaggcgtcactaatgcaatcgtcgatcccagcaccttgctctctcacctgtggacgtctgcttaacttgagggagaagctggttctggttggtgggattgcaaaacagaacagacctgacatcatcaaaggaattggaatatgggaacttcacaaaaaacaatggcaagaggtaggtcgaatgcctcataaattatttcaaggatttggtgagtttgatgatgtatttgctagcagtggcacagacgaccttgtctacatccaaagctatggtgcaactgctttgcttgctttcgatacgaagcagaagcagtggaagtggtccgcaaaatgccctgtgagcaaaagatttcctctccagcttttcactggcttttgctttgaacctcggcttgatattaccacttaattgtaatgccttccaatggaatcaggttggcagtcctggtctttgtgaatatatgcatgcttcattagattgttgcgtcacatgcaatgtgctctcctttgcttatcatcccacattcgtcctgatggatgcaatttcctttgcctcttttcattggattaattaatctttagaatgttgatctctctctctctctctataataatgcctgtttacaaatgtacctctattttctttaaaaacaatgcatagatctatgctatttatcacatttatctgaattctcaagttcagccatgtactgcctcgacaaaacctgcatacaatgtctttgcttgatgcaggccttagaacctgtccatataaactgaatgagctattgtccttacagcatgtctagacagataaattttgcagcgccataagttacatgtcttttcatcgcgc

SEQ ID NO: 52811 - DNA, 498 bp, Oryza sativa
  Clone ID: PAT_MRT4530_55071C.1
atggtgaacacgatgccgctgccgcccgcgccgccggagatcctgctcgtgcccatcgacgagcaagatcgaaaggcgggagcaatgagaagggtggttgtgcccaagctcgaccgccgctgtcagcggtggcggaacgacatggggatttggatgcacgcgggcaacgatagttatctcatcaccctacgtgcctccgcgcgtctcatcccatgcgcccttgttggatctacgagcattgacatcatcattggcggagttcaggctcactacattagcgagggtggtggcatgcggagaagcaggtttgcacgacggtgtactctagtcaagctcaagctcctggtgcggtgcactcctggtggtgaaggagcatgggacgagtgcaacccggtggtgaaggggtgcagcattaccaaatatgcctcccgatccggcgggcagtgtggcttgggcggcattggtgatcaaaatggtgagctcaatgggctccagtag

SEQ ID NO: 52812 - DNA, 457 bp, Oryza sativa
  unsure (1)..(457): unsure at all n locations
  Clone ID: PAT_MRT4530_55072C.1
tgaaattgtggacatcagtgcagcagcaacagaggaaaacaattagattcagatatagtagattgcatccaattccatttgcagacgcgatcgtgatgaagccncctgtagttcggttagtgcctagcgtagcttcagtgattaaccatgctgtcaacattnttttggaccagtcnccataagttcatcatgtgctgccggccatttcccatgagtgcctacttcctactggacttgctggaatcaatgtagcgcgcatgaaggatgttgttaccttaccgtagttccttcggctatcactcctagctatatttagtttctttacctgtcttgtcttcctctgcgctgatcttataaaggctgtaattacataggatttggttgagtgactcataggttctgtcgtaatgatatgattttttcccgtaaaaaaaaaaaaaaaaaaaaaaaaaaaaaa

SEQ ID NO: 52813 - DNA, 391 bp, Oryza sativa
  Clone ID: PAT_MRT4530_55073C.1
tcaagcacttccagcggacgaggcagcaggcggtcggcggccgacgctgagggcgacggcgatgcgactgctgttgcgcaggaggcgcgagcggctgcgcgggaagcgcgcacgacgcatgaggaagtggaggcacggctgcaggcagccacgagggcggcacgtctcgcggcggcagaagctgaagcagcacgcaccgcggaggcggccaggcaggctgcagctgtgttgatagaaaacacgaggcctgggagatctacttaactccggtgcaggtccaaagctcgccttcgaatgtatgagcgtgccagttgatttgatcaattgccttctcaggactctatccatttcgccgccgccgtcagtggcgtcgccctgcgcctcagccggc

SEQ ID NO: 52814 - DNA, 273 bp, Oryza sativa
  Clone ID: PAT_MRT4530_55074C.1
atggtagcagggagtggacgagacttcagggaaaatgaagaggaggatgcgaacaaaatagatagagctgccaacgagctcaaccgcttggagccactgccggtgcagttccagccacctcccgctgcgctgctgccactgttgggtgcacaaagaagtcctctacaattaatttttgaacccccaaccccagccaaaccttcgtttgccggctgcaccatcaccgacctcgccaaccaccacaaccaattccggaggaccttgttagaggaa

SEQ ID NO: 52815 - DNA, 300 bp, Oryza sativa
  Clone ID: PAT_MRT4530_55075C.1
atgacggttacagcggttggaaatgtcgcaaaaaacaccgcagccatcattgggaagcaatcctggatgtccacgtggaaggagacacggtggagctgggggttcggccgaacccccaatcggcccaaatctttgcagagagagagagagagagagcgggaggagaaagaggaggcgggacccaacgatgcaagtctccaccgcctgtcgtccctcttccggctttgtcgacacggctccgatgaggcgggccgctcgctgctgaccaaaccctcctccacgttgctcctatcaccgcct

SEQ ID NO: 52816 - DNA, 354 bp, Oryza sativa
  Clone ID: PAT_MRT4530_55076C.1
aaacaaccaagtctggcaacagctcgcgctggtggcgcaacaatctcactatcaggacattaacattgttcaggccatagcgcagcagctacaactccagcagtttggtgatctctactttgatcggaatctggctcaagctcaagctcttgtggcttttaacgtgccatctaaatatggtatctaaccctaggtcttatggggcaccaagtaccataacaaccctgggcggggtctggtaagaagtttaaccagattaggggttcggaggttaaaattagcctaaaatttattctatgtgacatggagaaccttgggtgaatataaatagaaaaaaggtggtcttttatattt

SEQ ID NO: 52817 - DNA, 291 bp, Oryza sativa
  Clone ID: PAT_MRT4530_55077C.1
atggtggcggcaagaggtgtcccgaggttcgactcgtctgcatgtggcgtcgttctggcccagaaggtgatggagatggtcggaatgcgagtagcaagaatcgagaagaagcggcaggagccaggccgggtgagttggagggacgggaacgatgtgagattgcaaatcgactcacgacctcgacggtggcatgaaggaatcgagaaggagcggcgggagccagtgaacggcttgagcttatatacgaacacgtcgaaggagatgacggaggaggagattaggagaggctga

SEQ ID NO: 52818 - DNA, 560 bp, Oryza sativa
  Clone ID: PAT_MRT4530_55078C.1
agcgactccaattatacaccggcatttggatttctagacgctgccacaatttactctaaaattgggcgttgcatcagtcttcgttatgcacacgctcgcatcaaggaaactactcgagctttgatatcttctcaatagtttgatggattattgtcactgacatcatcactagcatctctgcttcatcggccctgacatctccgctattgctaatggctgattatgtcttcgccgacttattatttcaccttcacgggttacctactacgcaaacgctgatgagcgtcttcgtcattatcatcggctgctacaccgctattgattggatcgccggcatcgtcatcttcatcaacatcctgtcaagcctcttcaacatagcctacactgctgccgttgatgggcaacttcgtcaccatagccggctatctttgttgccgctaatcatcattaccgtcggatgcgtttgccgtcgccgactattttcttcatcttcatgattggtggattttgccatcaccgttgatgcgcgtctacgtcttcatcgacttggggctgcagga

SEQ ID NO: 52819 - DNA, 493 bp, Oryza sativa
  unsure (1)..(493): unsure at all n locations
  Clone ID: PAT_MRT4530_55079C.1
ggaagcaggcaaccactcgtttttattcatccaaacatgggagtatgggttattcggaacaggggccggccactccaaagggggggctaaacggaacctaaaaaggggctaagggggggccaccaccggggggcttttcctggatcttttcaaaaaaaccctttttttggggcgggggttgggtcgggggggaataccccgccccgccggggtggggggttgacccaggggggggggggggtcccgggccggaaccatatccgccggtcgccgaaggggccgtcggttgttgttggccccccttgttgccgccggggagcttcccctggaacttttccttgattccctttttcctcccccctccaatcccgtngncctaaaacaacaagcttgagcttgaactgccggagcggnggaggatcccaccggtcttgggctcctttctcgccggttgaaactggccgcctgcgggcggaaccccccgggccggggg

SEQ ID NO: 52820 - DNA, 399 bp, Oryza sativa
  Clone ID: PAT_MRT4530_5507C.1
acaaaaagaaaaaaacattccttctagtgattgtctgattgactcaatggctagcaaggtcgtcttcttcgcggcggcgctcatgcggccatggggccatctcggcgcgcagctgacgagtcggaatgagttcaggacaggcagtgccacggaggcagacagcccgtgacctgccggcggtgctcaccggcactcaccggccggaaggtcaccatgttccccgccggccctcggcgggtgcggctgcacactgagacgtgaccggaggcgtgcccgctccgcgtgggagagctcagaagctgccgtgccctggacaggtggcgtgtcgctcggatctacgggcagggtcgcgcgacgggtctacgcagggtctcgagagctctacgcagcacacagacc

SEQ ID NO: 52821 - DNA, 301 bp, Oryza sativa
  Clone ID: PAT_MRT4530_55080C.1
gtacaaaggtggaccagaactctcaagaagagtaatttgtagtagtccaacttccagaagttacattgtggatgtctatcccctccgtctgaaattatttgatggaagagacagcttggagagaattatcagaattagtagaaaggccaaagttagtgagctctatagcttggtttgctcacttttgtccgtcgaacagtctaagatcgacatctgggatttttaccaaaagacaaagggaaaaaaactgataaatcttaatgagacggttgaggaagctcaactgatgatggaccaggag

SEQ ID NO: 52822 - DNA, 233 bp, Oryza sativa
  Clone ID: PAT_MRT4530_55081C.1
tctcaaacacaaaccaacacaacccaacccgagggggttcattaacacccttgggggacaacccaaaacacgcctcaaaatacccaacaaatcacccaaaaccaccatacgccagctctacatggagaacgacaactgcaacctacactgcaccaccaagctcaactaccccacaccagcagtccaccactctacgatacatatcaccccacgacaagcacacctgatcccac

SEQ ID NO: 52823 - DNA, 534 bp, Oryza sativa
  unsure (1)..(534): unsure at all n locations
  Clone ID: PAT_MRT4530_55082C.1
tccacgcgtncgcccacgcgtccgcgccgattgtgcaggagctcgccgccggcgtccatgagccgccgagccagtacatggtcggcgagaaagaccgccctgccatcgccggctccgacatgcctgagcccatccccgtcgtcgacctcagccggctgtctgcctccaatggtgaagacagcgccggcgagcttgccaagctacgctccgccttagaggactggggcctcttcctggtaaataaaagtaccactgcattcgtttcatattataagttattttgactttagttaaagtcaaactgttccaaatttgattaaatttatagacaattttggtaatattataacatcaaattattttcattaaatctataattgaatatatttttataatatagttatcttgtgttgaatatattactatttttttctacaaatttagtttaatttggagtacgtttttctttaaccaaagtcaaaatgacttataatctgaaacggattgagtattactttntttttttgggtacct

SEQ ID NO: 52824 - DNA, 660 bp, Oryza sativa
  Clone ID: PAT_MRT4530_55083C.1
atggcaaacaccaagaacatcataggagcacctcgccagcacatggcttacttcaactacatggggatgctggcggcggagggcacctacgacaagatagaggcgctgctgaatcaggacatccatccagcggcaggcggtcgaggatgcggtgccgcctcgtgctcccgccgccgcttcgcctcgtgcgcccgccgccgcgtcgccggctgtgtcgcctcgtgctcccgctgccgcgtcgccggccgccccggcgacctcctccccacccgccccggcttgcccgagaggagagaaggaaacacacttgcattatcggaacaagcagaagacgcaaatatttggaatcacatttggattcctcggcgaggtctactgcaagtaagaaggaaggcgttacatgatgaagctacagaaatcatagaggcgaaagtcaggttgcaaagcgaaaagattaagaccactgtcccaaaatggttaccaccagaagaaggaaaacaaaaaggagaggctcaaactataggacaatgccccatggatgtatacacattgggattatttgcaacgtgccattgtgaaacatattcactcgatgaaagaaagactcatcgagttgttgaatgtgtgtgcaacgttggcactagagtcactgtccgttag

SEQ ID NO: 52825 - DNA, 293 bp, Oryza sativa
  unsure (1)..(293): unsure at all n locations
  Clone ID: PAT_MRT4530_55084C.1
gggcaggcgacgccagagcccgccgagagggccacccaaanccaanccacgggccgccgngccacagcgccgggacggggaaaacccgggcggnacccaancgaancgccnggcagcacaccccccgngcgccggcgggcgccnnagcgacgaggcccgcnccgaccgcccnccccaacagnggcgcagcccgaagggcgaaggggacgcgcccggaagcggcgcaaaaagcgcggcgggggggggggncacccgcagcgggcccggnncccgggccagcgcccaaccgcccg

SEQ ID NO: 52826 - DNA, 659 bp, Oryza sativa
  Clone ID: PAT_MRT4530_55085C.1
gttaccagccaaagggacagaacacagacggacatcgactcgcgtccatagcgaaccaaagacccgagtgcccccgtgtctcccaatgccaagtgtccagtgggggaagtcccacgagttgaatagcacgaaagttagtgccgtgttgcgagtggccgcatagtgaagcggcggctgcaatgttcacatcgtcttcgagcgaattagatcaaggtcggactcaaccaaagcacaacaatatctaactcagtcattgcactgtgtgcaatgggacaacacaccatgtcaccgatgatcaacgtcctcggcagttcgtgcgaagatagaacataaccaagattatatgcggttatgtagatagcacatatcgtctgtacctctggccagcttcgatagccataaaagtagtatcgattgtatgtatcctctttttatgaacatatgttcaagcattagaacgttacgaactgcagtgttcggtagtcacacctatcgatttattgcagatgtcgtcatctatactgttcatagtttcatgagtttacgcactggacggaccagatcgtgtgagagctccaagtgatattacacggttcgattcattataattatgatcagtagagatgtggcttaacgacacctcgaaaaaaaaaaaaaaa

SEQ ID NO: 52827 - DNA, 380 bp, Oryza sativa
  Clone ID: PAT_MRT4530_55086C.1
actgcagccatggccatgagggcaatcacgctgtcccactcgcagagcgcctcgtttgggcaccaccaccaccaaaccatgccgtcctccttcaggccaagcactgcctccaccagatcagtaaggtctacgcaaaggaagatgaggagaagggcagcaagcagtcattgttcgggagcatcaccgaggcgctggacttctcgcaggccgttgacggggaatacgtagaggaaggttgggtggataagacctgcaaagtttgcaagaaggacactagaggggaacccaggcaggtcgacaagctaggaagatatgcacatgtcgcatgcttggagaacccaaaaccgaccaacatcttcgccaaattgttcgccagatga

SEQ ID NO: 52828 - DNA, 1616 bp, Oryza sativa
  Clone ID: PAT_MRT4530_55087C.1
ctctttcaagaactatgctgcgttctttgcttccggcaatacctataccagtatgttgttacaaaacaaatgtttggatctcctttctttacacgtgtgttacatactcatacgtaaggattaacagttactcgtacaggttaataacccttccaaaaagaagatggcaatgtggtggtaagtggtaactaggcagcacacgcatgcatggctagctaccagctctccacaggctgcagataatgctgcagcgactgaaccttcttcctgcccctgagcttccggaacgcgaccagctcgatctgccggatcctctccctgctcacccccatcagccgaccgatgtcgtgcagcgtccgcagccggccgtcgtccatcccgaacctgtacctgatcacctgcctctcccgcgggctcagcccgtccagcgccctgtccacgtcttccttcatcagccaccggtgcagcatctcctccgccgtctccgtgctcgtgtccggcgtgatctcctggtatgtcatgtcagtgcacccgaccttgctggtgagggaaacggtgtattttgggaggctcatcgccgcctcgacgcgcctgagcggcatgccggtgtcggatgcgatctcttcgttggtgggtagcctcttcagctgccggcggagccgccgtcggcattccttcacccgggaacttgcttcggccatgtgtgccatcgtgttcttgcaggaaattccatagttcagacgttttcgcaaagtgttctcgtcagttccagctgcttctgcccactgtgagaaggttggttcaccgccgttgtagtgagcaagctccttttggatagcttccaacttcaggagatcctgaatgccttgtgagaactcaacttcttgttttgctgtcagaagcctccggccggtcatcttgtagaagcagccgagaggactccggcaacccttcaacctcttcttcctcgccgacgacgacgccgcgacgggattccggccgctgaacgatttggccgccttcatcgccgccctcaccctccgagctctcctctcggactggcgcaccgatttcacagccacgccctggacgcactgctcatcgtcatctacctcggattcatcgctgaagatactggagaaccccgcatcctccgacagacaggcatcggcgtacctcgcccccaatcccgcctcggcgcggaggatctctctggccaagtagttgtcctccgtgtcgtgcgtcgtgacgaagtcaggccggtgccgttgctcggtttgcgacatccggacgacctctccggcgacctccgccgctgcccttgctagagcgacggcctccgccgctgcggccgccaccacggcttcttggttgagaatcgcctcaccgaaacctcccggaagaggcggcggcgcgacggctccgtcgtagacgacgagacgcctcgccccgggggccaaggaatccgagctctcggcctctaccagcgcggtggtggacaccgcgcagtggagcctaacggtacggaacccgccgattccggcgccgccgtgctcccggaacgccgccgcgcgggtggaaaggggccacttgagctgcggcgcgaggcacgccat

SEQ ID NO: 52829 - DNA, 939 bp, Oryza sativa
  unsure (1)..(939): unsure at all n locations
  Clone ID: PAT_MRT4530_55088C.1
aaacgngaattttaacaaaatattaacgnttacaatttgccattcgccattcagggtgcgcaactgttgggaagggcgatcggtgcgggcttnttcgctattacgccagctggcgaaagggggatgtgctgcaaggcgattaagttgggtaacgccagggttttcccagtctcgtcgttgtttttcgtcggcctgtgttttgtttttcgtctctcttttgggcgttttgggttccgttgtgtgacatgctccctgtataccattttatatggcaaaactgaacacataatattgttcaaattcttggggctacaacaccatctatgtatctaagcatgagtaaaaatatgtctttgattgtacaattgaagttcatctggcgaacaatttggcgaagatgttggtcggttttgggttctccaagcatgcgacatgtgcatatcttcctagcttgtcgacctgcctgggttcccctctagtgtccttcttgcaaactttgcaggtcttatccacccaaccttcctctacgtattccccgtcaacatccacatatgacttgaagaaatccttgtaggtgccaccgatcttcctccgaagtgctccatactgctcctttgtcatccttcctccatcctttgtggcctctctggcttcatacagaagctccgcgtccttctccgaccggacctgcgagaagtccagcgcctcggtgatgctcccgaacaatgactgcttgctgcccttctcctcatcttcctttgcgtagaccttcactgatctggtggaggcagtgcttggcctgaaggaggacggcatggtttggtggtggtggtgcccaaacgaggcgctctgcgagtgggacagcgtgattgccctcatggccatggctgcagtctgcagatcggtgattgattctcgtccggtagaaactgaactggt

SEQ ID NO: 52830 - DNA, 516 bp, Oryza sativa
  Clone ID: PAT_MRT4530_55089C.1
atggctgacctttcactcagacgaggcctctcctctggctgccactctgctgcttcgagctgctggtgcggcttcgttttctctcgtctcctctccaatcctggcgctcctccggagctggaaagggcagctccacctccacgccctcttttatatgccccggtgtcgcacagtgctacgctgctgccgaaccggtcagactcacaagggcggaggctgaggcagggcagggcccccgtaatccgggagacggggggcgaatgggacgtgcggcgccaaaaagacgcgagcacaggtcgcgcgggtggtatacgtgttgcctcccccgcgcgccgcgtgacgttgctgagacagcgggatattttggtcgcccgggtcctgattgaccgagcggcgaggcgtggctacttgaaggagacgggaaagatggatgcgtcgcacccgtcgcgggggtcaggttctgctcctctgcaaccactacaactagaagaacctgggaacgtaggtgaccgatga

SEQ ID NO: 52831 - DNA, 334 bp, Oryza sativa
  Clone ID: PAT_MRT4530_5508C.1
agttgaaacacaaccaggctgccatgacatttagccaacaattatatcttatgtatactcgtatagtatctcactagatatatatagtacacaagtgtccctatatgtgacgtatgcggactacccgatcattttttcacgtgggggggcataacacagaatgtataattggtttcagtacaattggaacatcaaaatcacaggtgacagcatgacatactcgacagatggatgtgttgtttattcattataacttgtatcgatgaactaacacctatggtggattgtcatgcgtactatgttgattggaggattggtcaacctgtgtgtaggc

SEQ ID NO: 52832 - DNA, 1934 bp, Oryza sativa
  Clone ID: PAT_MRT4530_55090C.1
ctgcagcgcttcctccgtcgcgacggccaccaagagccagtctcgcctttatcaaatggcagtcgaagccatgcataaacagacacaaattaacaattaactgggaatagcaagtcttaccacgcatacaattaccagagcaagataaccctacgaattactgctcaaatctagcggacctctacttctggtaacggcccgtttatgaaatatgaacacgagcatagcataattaattacccttccagtgggtaattaaatcaacttaattaaattagggcagcatgacactgacgtgcctatcaaatatccaattaatcgggatgctgatgggcttcttctgggccttgaccgccctctcatgggccttctccttcatcctccggatcttctgcggcagctcgcacacgtagtcccgcgcgcgccgcccttcgccggagagccccgccgcgagctcctccacgcgccactcccgcaccaggtgctcgacgatggagcagtagtccgacaccgtgtacgtcccggcctgctcggcgagggacacgacgcaggcgtagaggtcgtcgcggcggccgtcggagatgggcgaggtcggcatggcgacccctcgccgtagcatgcgcgccaccgcgcgcacgccggcgtccgggtcggcctcgaggagcctggagacgatgcgggtgtaggcggcctcgtgccgcttctcgtcggcggcgacggtgccgcagacgcgggcgagggcggcgtcgccgtgccctcgcgcgccgaccagccgcgccgtgttgccgtgggcgaccgccgtggcgcgctcctggaacgccgtgtagacgaaggcgtggtacgggctgcacggcgggtcgacggccatgccggagcggatgaggcggtgcacggcgcgctccacctcggccatgtcgaagcggccggagaggtacatgtaccggttgagcacgtcgccgtggcggttctcctcggcggaccacccgcggatccaccgcgcccacgccgtggcgtcggcgccggtgaggtcgccgacggcgcggacgcggttcagcgagctctggtacgtggggagcgcctcctccgtcaccatgttcgccacgaggcacaccaggagcaggtccggcacgccggcggcgcgctcccgcagctcggcgcacgccgcgtggaacccctcgccgccgagcaccgccgggtccgggagcaggtccgacggctgccacgccgcctccaccggcttcagaagcggcagcacgtgctcctccacccacggctccatctgcgtcagcacctccagcttctccggcgacaggtagctcctcatctcctcgtcttcctcccgccgcacggcggcgacgtcgtcggccgccgccgacatgatcgcgctgccactgacagcactacccctgcacatcctgcggctgctagtgattcatctggcaagtagagccagtcatgttattgatgtgttggaattgtgggtgcaaagtttgccattaaccaaattcatcaaagttatcgccattgcaccaacgctggggcaaataaggaagtgcacgttcgtccttcgatccagtggtcctgttgtattatattttgtaaagggttatactttcttcatcatttttaatgtgacgttggttagttaaaaatgaactaatgaacgttatttatatataacattggaagtatgtctagtaaaaaaaaaaaaacaaaaacataccagcggctgctactgatcatggtgactcgtctaccaaatagtgttcttgatggtgaagaagagttggtgtttggtttgcaacgaagcctattagctaaaggcatcgccattgttgctgttgcagccatgctggaggagaagaagaagatgatgatcgtctatggatcgagttgaactattgtgtcttgagttgtggccgcctcccgccagc

SEQ ID NO: 52833 - DNA, 313 bp, Oryza sativa
  Clone ID: PAT_MRT4530_55091C.1
ggccgcatattttttttttttttttttcaaacataacaggaaatttttttttttttttttttttttttttttttttttttttttttttaattcatccagcagcatcagctaaaaagcattatcacaacaaggctcagggggaacaaaagatttttccttcttccagaatagcatagaggggccggggggggggaaacttttgtctaaagggggggtgggttaaaacgggcaaaatgggcttgcttttgcgggggggcaacttccttcttaccccccggattcgggctcccccctcttctgggggcgcttccgg

SEQ ID NO: 52834 - DNA, 191 bp, Oryza sativa
  Clone ID: PAT_MRT4530_55092C.1
tccacggcgaagctggggatttaactggcattcgtagatttcttggatttgggattggtttgcagcctgattcagactatatggacattggagggggtgcttttggaggcagatacggtcttcatccacccgacggtagatccgagcatgtgcatttgtggcggtgcgaggcagcaggcagcggccagtag

SEQ ID NO: 52835 - DNA, 306 bp, Oryza sativa
  Clone ID: PAT_MRT4530_55093C.1
tcgttattatggaaggacctgtgagcgcgtcgatgggtgtcatggtccctttgctgtccaagctcatcgagagcatggaacagccgaggttcaaggacctgaagaatgacttgaagtccctcagggccgagctcgcatccatggaagctgtaatgctcaagttcgccacgcaggacgacactgacctgctggtgaaggagtggatgaggcaggtgcgggaagtgggctacgacaccgatgactggatcgacagccaccctctggtggcctgcggagacgaagggttcacgcatcttcagcctgaac

SEQ ID NO: 52836 - DNA, 402 bp, Oryza sativa
  Clone ID: PAT_MRT4530_55094C.1
cagagtcttactcggagagggttgggtttattctatgtcgtgcatggttcattgtctccgagttctacttgaaaactaaggcaactcacggtataaaaggcacaccccttaaggggatcatatcatcaaatcatagcgccaacacacccaccatagtttacgaagccggaggacgcgaagcctactcgccggggaatctcgtcgaaccatctcgactaggatctcgccgattagtactattaccttataaggggcttgaaccagtataataatatctgtgtactctctctatttgtcttgatgttgtatcgtgtagatcctcgtaccaatatacccaataccctatttatccggtcctcggacacagaaacttatggctgcaattataatgggacggtggga

SEQ ID NO: 52837 - DNA, 390 bp, Oryza sativa
  Clone ID: PAT_MRT4530_55095C.1
cccacgcgtccgaaaaaagaaaaaaaaaactcgttttcttttcttctcttctcttctcttgttgcggcgaagggggagaggaaggtctaggtctactagatgtgctgcatcaatgggcaaaactataacatgtgcatgaagtggaacatgcgaagcatcatggtcatgagggagtgctagcttgatgtcaacaggtacgtcatggatacagatggtaagatactgcatgcactctctagcatatacagatcgacggccgaattcatatatacatgttaggcactcgatctatagcgcaacttgcagttggatctcaatatctgatgagatctatgtagatgtatatatatgttacagctgctagctatagctgggttcgcacacatccat

SEQ ID NO: 52838 - DNA, 947 bp, Oryza sativa
  Clone ID: PAT_MRT4530_55096C.1
atggcggctgggtctcccgctccggtttccttcccctccggccgccctctctcactcccaaccctatattaccctccccgagctccccaccaccgtttccgctactcgccgccccttctccccgccggaatcgagctcgcgtcgtcgctctctctctccgccgtcgccgccgagctccggtccgccgccgtcgtcgccccggaccacctcccacctcggcgctgcctccttcggtttcgccgcgacctcgccgacatcgtccacccctctatttcggtcgccgaccgccggaatgccgccgaccccgtcaacccgagccgcgccaccgcctccctccgctccggccgcctcctccgtcgccgccgtcgcctcggggtgagccgtggagtgccgcctcctttcccccttccctcccctctctcggccaccgctccgccgcgccagtggttgccggcggcgaccatcggggcgcggacgccgcctcctgccggccgcgacgacgtggccgcgtccgggcgcgccatgtggcccggccatcagccgcccgtggaccgaggggctgccgcgtggggcccaccactctcgtggacccggtccgcacgcacgcctcccctcgactggcgccacctcggccactataaggactggtcttcgggcctcggttgcaaagcactaccgtacttccacatgtctagtggggcaaatgaaggctacatgagctgcggcccggtagtcgagatgtcatggcacagggctggtgtcctgctgctaggggctcaaccttggttacctgtctcaggattccggccgtagccagggttgggtcgatgtacacctctgatcggagtataatctattcgaatagccacgccctcggttatgggcaagcctagcaatgtacccaagttagtggtttatttcttaaaaaaggattatcatggcacagc

SEQ ID NO: 52839 - DNA, 261 bp, Oryza sativa
  Clone ID: PAT_MRT4530_55097C.1
gaggcaggcatcaccatatcaaaatatatagatatgaattcactgaggatcttatatgcaggtcaatgcttaacgtgcatacagaattattttccttcttcatgatatgctacctactaaggagaggcgacccactctgcaggcccgaaacagattgcgtgtatataacaaatatctgcaacactacactacctatatccatctatcattcacgctgaatcgactgatgcattgccagtatctgtaaggcttatgaatttc

SEQ ID NO: 52840 - DNA, 364 bp, Oryza sativa
  Clone ID: PAT_MRT4530_55098C.1
ttctacaacacccgaggatccattggctaccggttgggtacattccgtgagccggtggctgttatcaaagctgggttcgatccctacccggtgatcgttgcgaggagggccaactgtaatctggcatatttaggtgtccagagatccaacgcagctgatgaggatttgcacacttatgctgaacatatgagggcatttaagaacatcatccaaactggcgacggtggcgcaaggtgatgcatggtacatcataggattcagcagggcatgcccacctacaatgtatatggataatcacgttatatgtcgaatcacggctatgcgatgagcttctataaaacacaccgtgggcttggagcccagt

SEQ ID NO: 52841 - DNA, 344 bp, Oryza sativa
  Clone ID: PAT_MRT4530_55099C.1
gcacgagggcgctctgctcgcagtgcctctcctaccaccgcgaccaccacgccatccaggtgagcgagcaagcaagcctcggcatttcttcctcctcggcattggattagctggagcagctgattgcaccctttctttggaagaaacggcagctgagctgctgctcctctgttcggttcccattggaacactcaaaaagctaagcgaagcttagctcgaacgagaaaaaggtctcttgagacttgcagttgcagttgtgtccagttcaaccaacggcctctctttccccacacgcattaggaacagtccaaggatcggaataaccaactttcttgaattggcag

SEQ ID NO: 52842 - DNA, 150 bp, Oryza sativa
  Clone ID: PAT_MRT4530_5509C.1
atgaagagggggaggcgtgccacccaggggctcactggcatgcgcacggagttggatgagggggagggtgcgggagctcaccggggacaagtgtcaaggaaggcccaagagagcacgctgtcgccatggctgcccgcccacattcagtag

SEQ ID NO: 52843 - DNA, 570 bp, Oryza sativa
  Clone ID: PAT_MRT4530_550C.1
atgcagcagcaacagcagcagggccactgcagcagcaccagcaacaaccctagcagcagcagtcacatggcatcagtaacagcagcaataagcaaaaaccagaccgcggcaacagtagccagccgcagatcacggcagcagcagcaacaaaccatcagatcggcaacgatagaagaaggagcagccgcaggaactcaccggaaagaaggaaaacggaacaaaacaccggttgtgttggatgacgatggctgcggcctccagatatggccgtggtggcagcgcaaggacagcggcggcaagagcgcaggagcagctagggctagggctggctgtggcaaccttcgccgccgcaccaccacctccgcctccatcccttcttctcctcaccaccgcccgactaggccgccggaaaccgcacggccacaagcacggtgccagttaggcctttctcacgaggtcatggggtcggagtccacgacccgcctggatccggggcagcgatggccatggcggcgctgggctggagccgaaagggacaacaaggttcggtggtgtcgaccagggcgatga

SEQ ID NO: 52844 - DNA, 141 bp, Oryza sativa
  Clone ID: PAT_MRT4530_55100C.1
atgtctcccgacgagatcggaatcatcgtcgtcaacaatttgactatcaagatcgaccaagtttcaagacgtcatcaccgtggaggatatcagtacaatgtggtctaccgtgaggccttgctccggatcgactacctttga

SEQ ID NO: 52845 - DNA, 408 bp, Oryza sativa
  Clone ID: PAT_MRT4530_55101C.1
atgtcgagctcaaggagcgatggctcatcgtcttcttcccgccggtgcagtgcttctcccgtgtcgtatcgggttggtcctctcaattaccaacccgcggtgatgtgccgttgttgttgccctgcaaaggcaacgtggtggatttcgtggagcattgataacccagggcgacggtattataagtgccaaaatgctcggggtttggtgttgcaggaggggggttgcgatttctgggtttggtgcgacggtccgacaacgagcttcatcaaggagttgttgaatgatttgcgagatgctgtgacagggctgaggagggagaacgaacatctgaggagggagaacaaagatctacagagggatgctgaagagaatagggcgaagagggtagaacagaggaaagttatatag

SEQ ID NO: 52846 - DNA, 606 bp, Oryza sativa
  Clone ID: PAT_MRT4530_55102C.1
atggcaggttctcaatcaagttgccatggtgaaaatcatgacgaaccagatgcacctgccacatgggctgaggtgttgcaaatggggaataatattcttcaagtgatggaacggttgctgaatgcacgccttccggctgccagtggtggggtggttcagccaccgcttgttgatcccgaggatgagttgtggatgcacattcggttgatgatgatgccgatgacagactccatggtccgtccaatggtggaggtactagagcacgagaaggaggtgctcacgggcgaggatttggctcccgtgcgcactttggcggttgttttgagccccatgatcatcaccatgaggaggaatatgcggcggcatgttcatcctcgccgaggtgcggtccttggcaatggaggccaccatcgtggtcgccatgatcatgatgacctggataatgttgctcgggtaaagttgagtgttccaaagtttactggaaaggatgttctagatgcttatctttattgggaagaacagtgtgatcagatttttagagtgcataatctttcacatcagaggagagtaaaccttggttcagtggagttctttggttggaattag

SEQ ID NO: 52847 - DNA, 501 bp, Oryza sativa
  Clone ID: PAT_MRT4530_55103C.1
tcgcgatctagaacggaagaagaagcgccccgccgccgccgccgtggccgccgtcgacgaggagcccacggcgggttctacttcttccgccgccgccgcggaggctgatggtggggatgccacggtgattaatcgttcggtggagggagacgacggcggagaggaagcggtcgcggtggaggaggagaggcgggagtcgtcgtcgccggagatggacgaggcggcggcggagaaggtgaaggagatgaataggcttctcgtcagggagtccgtcgaggagcgggcgcgcgttgccgcgctcgccgcgggcatcggcgagctggaggcggacgccggcgcggtcgccgacgaggaacgcgcggtgctccgggtggcccttgcggtgaagctcgccgccgcctccgatgaggccgcggcgacgcgcgcgcgcctcgacgccgcgcgagagtcgctcgaggccgcggaggctgcggcggcgcgcgaggcggcgggccggggcga

SEQ ID NO: 52848 - DNA, 360 bp, Oryza sativa
  Clone ID: PAT_MRT4530_55104C.1
atgcacgcggcggccgtggaggcgagcaactgggcaggcgagggccgcggatggccggagatgaggcagccgccgacagacgtgcgagaggcggaggacgcctatggtggccgcgtgcatcgcgacagcgcggcggaggagcagcggcatgggtggagtcccgatgggggcggcacagacggcggggcctcctcttcagcaaactccaacggcatactcggtatgtccatcctctccattccccacggcgagcgtggccgccgactcgtactagtgattccattcgtgtggacggtgcatgatatgcgtgcagctgacgagcgggccaagccgctcgatcatctaccgctcgccgcgtga

SEQ ID NO: 52849 - DNA, 414 bp, Oryza sativa
  Clone ID: PAT_MRT4530_55105C.1
atgtgcgactacagatccagcgccggcgacgggagcgggcggcagatccgtagccggctgaggtggtttagggatggtaattttacccgcggggacccgcccctacgggggaggggacgggtgaagatttcgccccgcgggtggtcggggtcggggccccggagttgggcggcgggtccccggtcgggtggcggggccccggaggggccggggacggggatcgatttcaacccgccctccactccggggctggggcctggtggacccgcagaggagcgggggcggggccgttccagcccaacccggccccaacccgccccgttgccatccctaaggtggttcgagcgcaagttcgtcgagacgtacctgcagttcatgttcacctactggctacctcttcttccccggcaataa

SEQ ID NO: 52850 - DNA, 708 bp, Oryza sativa
  Clone ID: PAT_MRT4530_55106C.1
atggcgatctcggctgagcttcgaccgaaggcgaggagcgaaggctggagcggtgatagcgggcggaggggaggactgaacaagggcctccgctacgagcgcgggaagcgcaagcgctgcgaggtggaggaggccgcagactccatggaccttgacaccgacgccgacgcgtcccagccatcaagctcagcatgttgccttccctgttcgacccctccaaggcggcctccttcaagcagcccacctacgacggtgccatcgtcgggtgcgtcccatggtggcactggaagaaggtccgccactcaccacgcctccccactagcaatgtcccgaaagccgaccccattagagcaacgcgtccacgacaagtccctgaagttacaagcccataggcccattatagcacttaggcatcttgatcttgatgtgagcaacggttgtatcaatggtagccatggcacatcacttatgagggcctctggtgatgggttcacccaaggcgaaggccttggtcttcggctggcgcttcgcccaaagtatttcaagggtatcgaatccaagggaacgtgtgtgattatggcatcgtctggttcatccaaggacacaaagctaatatgtcgctctactacatacccggacagggaggacttaagtgctctcgagggctatcaccacctctacacccacctcaaacgtattgtgggatag

SEQ ID NO: 52851 - DNA, 5061 bp, Oryza sativa
  Clone ID: PAT_MRT4530_55107C.1
atggtcgtcgtgctgcccacgcaacggaggacgcttcctcgtccggagcgccacttcggtccgggcacgggggccagcccccccgtgtccccggttggcggtgccggctgtcgagcctttgtggcgagccttcggaacgtccgttggcccccaaggttccggcccaccatcaccgaaaaatacgatggaagcgtcaaccccgccgagtttctccagatctacacgaccgggatcgaggccgctgggggtgacgacaggatcatggcgaatttcttccccatggccctgaaaggtcaggcgcggggttggctaatgaacttgccacccgcgtcggtccactcttgggaggatttgtgccagcagttcaccatgaacttccagggcacatatccgcgcccaggggggggcgtgcggcacaaccgcatgctcgagaagatcgcctccaaggagccccagaccaccgcggagctttttcagctcgcggaccgtgtggctcgcaaggaggaggcctggacctggaactcctccggtaccggtgtggcagctccggccgcccccgggtccgccgctcggtcagggcggtgggacaggaggaggaagaagaggtcggcccattccgacgacgagggtcacgtcctcgctgtcgagggcgcttcgcgggccacccgaaaggggaggcctgcgagcgacaaaaagaaggaggctggcgctcccagcagggagcgcccgaccggcaagtggtgttccgtgcacaacacctccctccacgacctcgcggactgccgtgtggtcaaaagtttggctaagcggacgaggaagtgggaggaggagaggaggcaggagcgccgtgtgggcaaggccccggcgactcccgccggcaaccggcgaggtgaggccaagcagaaggccaccgccgaggacgtcgacgatggcgacgatgacctggggttccaggagcctgaggccaccgtcgccaccgtcgatgggggagcgtgcgctcacgcttctcgccggagcctcaaggccatgaagcgagagcttctggccgcggcccctacccatgaggcgacgcggtgggcgcggtggtcggaggttaccctcaccttcgaccagaccgaccacccgccgtgcattgcccggggaggacagatcgcgatggtggtttcccccaccgtttgcaatgtgaagttggggcgtgtcctcatagacgggggtgcagccctcaacatcctttcccccgcagcctttgacgccatcaaggccccggggatggtgctccggccgtcccagccgattatcggtgtgacgccggggcacacttggccgctaggtcatatcgacctcccagtcaccttcggtggttccgccaacttccgcacggagcgggtgaacttcgatgtggcggacctcagtctgccctacaacgcggtcctggggaggcccgcgttggtgaagttcatggcggcggtccactacgcctatctccagatgacgatgccgggccccggtggccccatcaccatccatggcgacctcaaagtcgcgcttgcttgtatggagcagcgcgcggaccacctcgccgcggcgtccaagcccgcgggtggtgacgagaggctcagcacctccgtccctgccgccccgaggcagcggatgatcacgtgcgacgaggtcccggaagacgcgctcgtctccttcctgcgggcaaacgccgacgtcttcgcctggagaccggcagacatgcccggggtccccagggaggtgattgagcaccgtctcgccgtgcggccgggcgcaaggccggtccagcagaaagtgcggcggcaggccccggaacgtcaagccttcatccgcgaggaggtggcgcgacttctggaggccggattcatccgtgaggacatccatccggagtggctggcaaacccggtcatcgttcccaaggcgaacggcaagcttcagatgtgcatcgactacaccgaccttaataaggcatgtcctaaggacccttaccccctgccacgcatagatcagattgtcgactccaccgcggggtgcgaccttttgtgttttctagatgcatactctggttatcatcagattcgcatggctagggaggatgaggaaaaaactgcattcattacccccataggaacttattgttatacgacaatgcctttcgggttaaagaatgcaggtcctacttttcaacgtactactcgaatttctttgggtagccaaataggacgtaatgttgaggcctatgttgacgacttggttgtgaagacgcgcaaccaagagaccttactctcggatctagcggaaactttcgaaagtctccgctccgcccgcataaagctgaaccccgacaagtgcgtgttcggcgtgcctgcgggcaagcttcttgggttcttggtctctgcccgaggcatcgaggccaaccccgagaagatacgagctatagagcggatgcgcccccccagcaagcttagggatgcgcaatgcgtcaccggctgcatggccgccctaagtcggttcatatcgaggctgggagagaaggcgctacccctatttaagctcctcaaacgctccgggccgtttacctggacggaggaggctgagcgggccttcactcagttgaaggcgtacctcagttctcccccagtcctggtcgccccagagccagatgagccgttgctactctacctggcggcaaccccgcaggtggtcagcgcggcgttggtcgtggagcgcgacgaggacaaccctcactccgcgcatccccaccctgtgtcgactcgacccgggagagagcagggaggagaggcccccgagccgaacggcggcccaaggcccccgacggtcagagctggccctctgcccgcttgtccgacggtgccaggcgcccccgacccccaggatggccccggggccactgcgggaaggccgcgcctgtcgccctctgaccccgaggttgtcggcgcagaagtcgagggcgccccgcgtggcctctcggatgaagagcgccctggagatgcggcccctggcgaagaggatcggccccgccgaaaggtgcagcggcccgtctacttcgttagtgaggccctccgggacgccaagacccgataccctcaggcccagaagatgctttacgctattctgatggcttcgaggaagttgcgccattatttcctggcgcatcgggtctcggtggttacgtcttaccccctcggccaaatcttgcataaccgagagggtactggacaggtggtgaaatgggcaatcaaactctctgagttcgatttgcactttgaaccacgccacgcgatcaagagccaggccctcgccgactttgtggcagagtggaccccagctcccgagcccgtctccgtcctcgaggccagctcgggcccctcgcagctgcctcacaccgcctactgggtgatgcagttcgacggctccctatctcttcagggcgccggtgcgggggtcacgttgacctcgctgaacggagacgtcctcagatacctggttcgcctcgactttcgggcgaccaataatatggcggagtacgagggactccttgcgggactcagggtggcagctggactggggatccgccgcctcctggtctgtaaggagtaccggtgctctgacccgcagatggacgcttacgtgcgccaggtgcggcgtatggagcgccatttcgacgggatagagcttcggcacgtgcccagacgggataacacggtcgccgacgaactctcaaggctcgcttcctcgcgagcccagatcccaccgggcgcctttgaagaaaggcttgcccagccgtcggcgcgacccgaccccctaggggagacggacgcgcctgaacggcctccgaggcccgtcggagtccaggcctcgggacccgaggggagcgctcccagctcccctagattgattgcttggatcactgagatccaggcgtacctcgcagataagactctacccgaggaccgcgaagggagtgaacgcgtccagcgcatctccaagcgctacgtgctggtggaagggaccctctatcggcgcgcggctaacggagtcctcctgaagtgcattcctcgggaacaaggcgtcgagcttctcgccgatatccatgaaggcgagtgcggagcccactccgcctcacgcaccttggttggcaaggcctttcgccagtgtttctattggccgacggctctcaacgatgcggtcgacctggttcggcggcgggccccgggcgggttcgagtatctgtatgtcgctgtcgacaagttcactaagtggcccgaggcttatccggtcatcaagatcgataagcactccgcgcttaaattcatcaggggcatcactgctcggtttggggtgcctaaccgtatcattacggataacggcacccagttcactagtgagctcttcggtgactactgcgaagacatgggcatcaagctctgcttcgcctcccccgcccaccccagaagcaatggccaagtggagcgcgccaacgcggaaatcctcaagggcctcaaaaccaagaccttcaacatcctcaagaagcacggcgactcatggatcgaggagctgccagcggtgctctgggcgaaccgaaccacgccaagccgagcaaccggggaaacgcctttcttcctcgtctacggcgcggaggcggttctcccatctgagctcaccctgaggtcccctcgggccaccatgtattgcgaggctgatcaagatcagcttcgcagagacgacctcgactacttggaagagcgaaggcggcgcgcggccctccgagccgcgcgctaccagcagagcctgcggcgctaccatcagcgccacgtccgggcccgatcactctgcgtcgacgacctcgtcctacgccgcgtccaaacgcgtgctggactgagcaagctctcaccaatgtgggagggtccgtatcgagtgatcggcgtcccccggccgggctccgttcggctggccacgggcgacggcacagagctgcctaacccgtggaacatcgaacaccttcgtcgcttctacccctag

SEQ ID NO: 52852 - DNA, 5197 bp, Oryza sativa
  Clone ID: PAT_MRT4530_55108C.1
tcatcctctgtcgtgtgcaccaagcctctcctgctcagcccaatggccgaacgggcagtggcgcacaacctctctctgagcgttagcggtgacgacagggagcagaacccgcgccgtcgagctcgtactccaccgtccccctctcgctgaaatcttgggcgggagaaggcgctcgaaggggtcgaaagatccacgacttcgccgcccgcaagcgatggaaaaggacggcgagacggggagcgtcgcctcctcgtctacggcgatggcagcacgccccagggcgcgctccaggctgcgggtgcgctcctgcgtcacccgcccgttgtccccgatccagagactccagccggacgttggcgccggctccgtgtcgtcgaggcggagggcgcggcgagcggcggccgtttcccgccgttcgtccgccattccctcgtcaacgcctccgacccaagaagatgtgcgtggggggccggatgcccgcctcaatatcgagcgccggcgcaatggtcgtcgtgctgcccacgcaacggaggacgcttcctcgtccggagcgccacttcggtccgggcacgggggccagccccccgtgtccccggttggcggtgccggctgtcgagcctttgtggcgagccttcggaacgtccgttggcccccaaggttccggcccaccatcaccgaaaaatacgacggaagcgtcaaccccgccgagtttctccagatctacacgaccgggatcgaggccgccgggggtgacgacagggtcatggcgaatttcttccccatggccctgagaggggggggcgtgcggcacaaccgcatgctcgagaagatcgcctccaaggagccccagaccaccgcggagctttttcagctcgcggaccgtgtggttcgcaaggaggaggcctggacctggaactcctccggttccggtgtggcagctttggccgcccccgggtctgccgctcggtcagggcggtgggacaggaggaggaagaagaggtcggcccattctgacgacgagggtcacgtcctcgccgtcgagggcggttcgcgggccacccgaaaggggaggcctgcgagcgacaaaaagaaggaggccggcgctcccagcagggagcgcccgaccggcaagtggtgttccgtgcacaacacctccctccacgacctcgcggactgccgcgcagtcaaaagtttggctgagcggacgaggaagtgggaggaggagaggaggcaggagcgccgtgagggcaaggccccggcggctcccgccggcaaccggcgaagtgaggccaagcagaaggcccccgccgatgacatcgatgatggcgacgatgacctggggttccaggagcctgaggccaccatcgccaccgttgccctcaccatcgaccagaccgaccacccgccgtgcattgcccggggaggacagatcgcgatggtggtttcccccaccgtttgcaatgtgaagttggggcgtgtcctcatagacgggggtgcagccctcaacatcctttcccccgcggcctttgacgccatcaaggccccggggatggtgctccggccgtcccagccgattatcggtgtgacgccggggcacacttggccgctaggtcatatcgacctcccggtcaccttcggtggttccgccaacttccgcacggagcgggtgaacttcgatgtggcggacctcagtctgccctacaacgcggtcctggggaggcccgcgttggtgaagttcatggcggcggtccactacgcctatctccagatgaagatgtcgggccccggtggccccatcaccgtccatggcgacctcaaagtcgcgcttgcttgtatggagcagcgcgcggaccacctcgccgcggcgtccaagtccgcgggtggcgacgagaggctcagcacctccgtcccagccgccccgaggcagcggatgatcacgtgcgacgaggtcccggaagacgcgctcgtctccttcctgcgggcaaacgccgacgtcttcgcctggagaccggcggacatgcccggggtccccagggaggtgattgagcaccgtctcgccgtgcggccgggcgcaaggccggtccggcagaaagtgcggcggcaggccccggaacgtcaagccttcatccgcgaggaggtggcgcgacttctggaggccggattcatccgtgaggtcatccatccggagtggctggcaaacccggtcgtcgttcccaaggcgaacggcaagcttcagatgtgcatcgactacaccgaccttaacaaggcatgtcctaaggacccttaccccctgccacgcatagatcagattgtcgactccaccgcgggccaaataggacgtaatgttgaggcctatgttgacgacttggttgtgaagacgcgcaaccaagagaccttactctcggatctagcggaaactttcgaaagtctccgctccgcccgcataaagctgaaccccgacaagtgcgtgttcggcgtgcctgcgggcaagcttctcgggttcttggtctctgcccgaggcatcgaggccaaccccgagaagatacgagctatagagcggatgcgcccccccagcaagcttagggatgtgcaatgcgtcactggctgcatggccgccctaagtcggttcatatcgaggctgggagagaaggcgctacccctatttaagctcctcaaacgctccgggccgtttacctggacggaggaggctgagcgggccttcattcaattgaaggcgtacctcagttctcccccagtcctggtcgccccggagccagatgagccgttgctactctacctggcggcaaccccgcaggtggtcagctcggcgttggtcgtggagcgcgatgaggacaaccctcactccgcgcatccccaccctgtgtcgactcgacccgggagagagcagggaggagaggcccccgaaccgaacggtggcccaaggcccccgacggccggagctggccctccgcctgcttgtccgacggtgccaggcgcccccgacccccaggatggccccggggccactgcgggaaggccgcgcctgtcgccctctgaccccgaggttgtcggcgcagaagccgagggcgccccgcgtggcctctcggatgaagagcgccctggagatgcggcccctggcggagaggatcggccccgccgaaaggtgcagcggcccatctactttgttagcgaggccctccgggacgccaagacccgaaaccctcaggcccagaagatgctttacgctattctgatggcttcgaggaagttgcgccattatttccaggcgcatcgggtcacggtggttacgtcttaccccctcggccaatcttgcataaccgagaggagccaggccctcgccgactttgtggcagagtggaccccagctcccgagcccgtctccgtccccgaggccagctcgggcccctcgcagctgcctcacaccgcctattgggtgatgcagttcgacggctccctgtctcttcagggcgccggtgcgggggtcacgttgacctcgccgagcggagacgtcctcagatacctggttcgcctcgactttcgggcgaccaataatatggcggagtacgagggactccttgcgggactcagggtggcagctggactggggatccgccgcctcctggtctgtaaggagtaccggtgctctgacccgcagatggacgcttacgtgcgccaggtgcggcgtatggagcgccatttcgacgggatagagcttcggcacgtgcctagacgggataacgcggtcgccgacgaactctcaaggctcgcttcctcgcgagcccagatcccaccgggcgcctttgaagaaaggcttgcccagccgtcggcgcgacccgaccccctaggggagacggacgcgcctgaacggcctccgaggcccgtcggagtccaggcctcgggacccgaggggagcgctcccagctcccctagattgattgcttggatcactgagatccaggcgtacctcgcagataagactctacccgaggaccgcgaagggagtgaacgcgtccagcgcatctccaagcgctacgtgctggtggaagggaccctctatcggcgcgcggctaacggagtcctcctgaagtgcattcctcgggaacaaggcgtcgagcttctcgccgatgtccatgaaggcgagtgcggagcccactccgcctcacgcaccttggttggcaaggcctttcgccagggtttctattggccaacggctctcaacgatgcggtcgacctggtctggcggtgcagggcgtgccagttccacgccaggcaaacccatcaaccggcccaggccttgcagaccatacctctttcgtggccgtttgctgtctgggggctcgatatcctgggtccgtttaggcgggccccgggcgggttcgagtatctgtatgtcgctgtcgacaagttcactaagtggcccgaggcttatccggtcatcaagatcgataagcactccgcgcttaaattcatcaggggcatcactgctcggtttggggtgcctaaccgtatcattacggataacggcacccagttcactagtgagctcttcggtgactactgcgaagacatgggcatcaagctctgcttcgcctcccccgcccaccccagaagcaatggccaagtggagcgcgccaacgcggaaatcctcaagggcctcaaaacgaagaccttcaacatcctcaagaagcacggcgactcgtggatcgaggagctgccagcggtgctctgggcgaaccgaaccatgctaagccgagcaaccggggaaacgcctttcttcctcgtctacggcgcggaggcggtcctcccatctgagctcaccctgaggtcccctcgggccaccatgtattgcgaggctgatcaagatcagcttcgcagagacgacctcgactacttggaagagcgaaggcggcgcgtggccctccgagcagtgcgctaccagcagagcctgcggcgctaccatcagcgccacgtccgggcccgatcactctgcgtcgacgacctcgtcctacgccgcgtccaaacgcgtgctggactgagcaagctctcaccaatgtgggagggtccgtatcgagtgatcggcgtcccccggccgggctccgttcggctggccacgggcgacggcacagagctgcctaacccgtggaacatcgaacaccttcgtcgcttctacccctag

SEQ ID NO: 52853 - DNA, 3945 bp, Oryza sativa
  Clone ID: PAT_MRT4530_55109C.1
atgaacttccagggcacatatccgcgccaagctccggccgcccccgggtccgccgctcggtcagggcggcgggacaggaggaggaagaagaggtcggcctatttcgacgacgaggggcacgtcctcgccgtcgagggcgcttcgcgggccacccgaaaggggaggcctgcgagcgacagaaagaaggaggccggtgctcccagcagggagcgcccgaccggcaagtggtgctccgtgcacaacacctccctccacgacctcgcggactgccgcgcggaggaggagaggaggcagaagcgccgtgagggcaaggtcccggcggcccccgccggcaaccagcgaggtgaggccaagcagaaggcccccgccgaggacgtcgacgatggcgacgataacctggggttccaggagcctcaggctactgtcgccaccgtcgatgggggagcgtgcgctcatgcttctcgccggagcctcaaggccgtgaagcgagagcttctggccgcggcccctacccatgaggcgacgcggcgggcgcgatggtcggaggtggccctcaccttcgaccagaccgaccacccgccgtgcgttgcccggggaggacagatcgcgatggtggtttcccccaccatttgcaatgtgaaattgaggcgtgtcctcatagacgggagtgcagccctcaacatcctttcccccgcagcctttgacgcaatcaaggccccggggatggtgctccggccgtcccagccgatcatcggtgtgacgccggggcacacttggccgctaggtcatatcgaccttccggtcacttttggtggttccgccaatttccgcacggagcgggtgaactttgatgtggcggacctcagtctgccctacaacgcggtcctagggagacccgcgttggtgaagttcatggcggcagtccactacgcctatctccagatgaagatgccgggccctggtggccccatcaccgtccatggcgacctccaagtcgcgcttgcttgtatggagcagcgcgcggaccagctcgccgcggcgtccaagcccgagggtggcgacgagaggctcagcgcctccgtcccggccgccccgaggcagcggatgatcacgtgcgacgaggtcccggaagacgcgctcgtctccttcctgcgggcaaacgccgacgtcttcgcctggagaccggcggacatgcccggggtccccagggaggtgattgagcaccgtctcgccgtacggccgggcgcaaggccggtccggcagaaagtgcggcggcaggccccggaacgtcaagccttcatccgcgaggaggtggcgcgacttctggaggccggattcatccgtgaggtcatccatccggagtggttggcgaacccggtcgtcgtccccaaggcgaacggcaagcttcggatgtgcatcgactacaccgacctcaacaaggcatgtcctaaggacccttaccccttgccacgtatagatcagattgtcgactccaccgcggggtgcgaccttttgtgttttctagatgcatactctggttatcatcagattcgcatggctagggaggatgaggaaaaaactgcattcatcacccccataggaacttattgttatacgacaatgcctttcgggttaaagaatgcaagacctacttttcaacgtaccactcgaatttctttgggtagccagttaggacgcaacgttgaggcttatgttgatgacatggttgtgaagacgcgcaaccaagagaccttactctcggatctagcggaaactttcgaaagtctccgctccgcccgcataaagctgaaccccgacaagtgcgtgttcggcgtgcctacgggcaagcttctcgggttcttggtcactgcccgaggcatcgaggccaaccccgagaagatacgagctatagagcggatgcgccctcccagcaaacttagggatgtgcaatgcgtcaccggctgcatggccgccctaagtcggttcatatcgaggctgggagagaaggcgctacccctatttaagctcctcaaatgttccgggccgtttacttggacggaggaggctgaacgggccctcactcagttgaaggcgtacctcagttctcccccggtcctggtcgccccgaaaccagatgaaccgttgctactttacctagcggcaaccccgcaggtggtcagcgcggcgttggtcgtggagcgcgacgaggacaaccctcgctccgcgcacccccaccctgtatcgactcgacccgggagagagcagggaggagaggcccccgagccgaacggtggcccgatgcccccgacggccggagctggccctctgcccgcttgtccgacggtgccaggcgcccccgaccctcaggatggccccggggccactgcgggaaggccgcgcctgtcgccctccgaccccgaggtcgtcgacacagaagccgagtgcgcctcgcgcggcctttcggacgaaaagcaccctggagatgcggctggcgaagaggatcggccccgccgaaaggtgcagcggcccgtctacttcgttagtgaggccctccgggacgccaagacccgataccctcaggcccagaagatgctttacgctattctgatggcttcgaggaagttgcgccattatttccaggcgcatcgggtcacagtggttacgtcttaccccctcggccaaatcttgcataaccgagagggtactggacgggtggtgaaatgggcaatcgaactctctgagttcgatttgcactttgaaccacgccacgcgatcaagagccaggccctcgccgactttgtggcagagtggaccccagctcccgagcccgtctccgtccccgaggccagctcgggcccctcgcagctgcctcacaccgcctactgggtgatgcagttcgacgggtccctgtctcttcagggtgccggtgcgggggtcacattgacctcgccgagcggagacgtcctcagatacctggtccgcctcgactttcgggcgaccaacaatatggcagagtacgagggactccttgcgggactcagggtagcaactggactggggatccgccgcctcctggtgttaggcgactcccaactggtcgttaaccagggtttctattggccgacggctctcaacgatgcggttgacctggtccggcggtgcagggcgtgccagttccacgccaggcaaccccatcagccggcccaggccctgcagaccatacctctttcatggccgtttgctgtctgggggctcgatatcctgggtccgttcaggcgggccccggacgggttcgagtatctgtatgtcgctatcgacaagttcactaagtggcctgaggcttatccggtcatcaagatcgataagcactccgcgcttaaattcatcaggggcatcactgctcggttttgggtgcctaaccgtatcattacggataacggcacccagttcactagtgaactcttcggtgactactgcgaagacatgggcatcaagctctgcttcgcctcccccgcccaccccagaagcaatggccaagtggagcgcgccaacgcggaaatcctcaagggcctcaaaacaaagaccttcaacatcctcaagaagcacggcgacttgtggatcgaggagctgccagcgcttcgcagagacgacctcgactacttggaagagcgaaggcggcgcgcggccctccgagccgcgcgctaccagcagagcctgcggcgctaccatcagcgccacgtccgggcccgatcactctgcgtcgacgacctcgtcctacgccgcgtccaaacgcgtgctggactgagcaagctctcaccaatgtgggagggtccgtatcgagtgatcggcgtcccccggctgggatccgttcggctggccacgggcgacggcacagagctgcctaactcgtggaacatcgaacaccttcgtcgcttctacccctag

SEQ ID NO: 52854 - DNA, 714 bp, Oryza sativa
  Clone ID: PAT_MRT4530_5510C.1
atggcgaggcaggcctcaattgctatcgccaccccctcttcctttcttccttgttctcgacctcagcaggcgacgataccaacagaggcgaggtcctcgcctgtttccgccgcccgccacctgtttcgccactgcgccttgtctccgttggatagagagggaaggaaggaggtagggaggagcccaacaaccttcggaggaggtgcgatcgaccagcggcagcgcgacgcagcatgcctcgtcgaagacatggaagggcaccaaatcggcggcagcaacctcgccaaagaggatttgaacggccaacgccacctcgtcattgtggaggaagaagacttcccaccacatggaaaatctgttgtgcttggcccaaacacagacatgttcctgatctgcaccgctcttctcacgtttggcatgggaatgtgcatcatgttctacggctcccggagcattcagaaaccaggaatgcaagtcgataacttgcacctgggatccttcaacctaaagaagctgaaagaaggggccaggatccagtcgatcacgcaggcgaagacgaggatcgggcacgccatactcctgccacgccgccgccgcctcctcctctcccgcctggccacatcgccccggcagcctcctccccagccgccggccggcttgcccagagaagagaatagaagcaaagagacagagaggaggaagggagaggagggg

SEQ ID NO: 52855 - DNA, 4278 bp, Oryza sativa
  Clone ID: PAT_MRT4530_55110C.1
atgcccccgtttggtggtgtcggctgtcgagcctttgtggcgagccttcggaacgtccgttggcccctaaggttccggcccaccatcaccgaaaaatatgacggaagcgtcaaccccgccgagtttctccaggtctacacgaccgggatcgaggccgccgggggtgacgacagggtcatggcgaatttcttccccatggccctgaagggacaggcgcggggttggctaatgaacttgccgcccgcgtcggtccactcttgggaggatttgtgccagcagttcaccatgaatttccaaggcacatatccgcgcccaggtgaagaagcggacttgcatgcggtacagcgaagggacgatgagtctcttcgctcgtatattcagcggttctgtcaagtccgcaacaccataccatgcatccccgcacacgcggtaatctacgcgttcaggggaggcgtgcggcacaaccgcatgctcgaaaagatcgcctccaaggagccccagaccaccgcggagctttttcagctcgcggaccatgtggctcgcaaggaggaggcctggacctggaactccaccggttccggtgtggcagcttcggccgcccccggatccgccgctcggtcagggcgacgggacaggaggaggaagaagaggtcggcccattccgacgacgagggtcacgtcctcgccgtcgagggcgcttcgcgggccacccgaaaggggaggcctgcgagcgacaaaaagaaggaggccggcgctcccagcagggagcacccgaccggcaagtggtgcaccgtgcacaacacctccctccacgacctcgcggactgccgcgcggtcaaaagtttggctgagcggacgaggaagtgggaggaggagaggaggcaggagcgcccctttgacgccatcaaggccccggggatggtgctccggccgtcccagccgatcatcggtgtgacgccggggcacacctggccgctcggtggttccgccaacttccgcacagagcgggtggacttcgatgtggcggacctcagtctgccctacaacgcggtcctggggaggcccgcgttggtgaagttcatggcggcggtccactacgcctacctccagatgaagatgccgggccccggtggccccatctctgtccatggcgacctcaaaggcgcgcttgcttgtatggagcagcgcgcggaccacctcgccgccgcatccaagcccgagggtggcaacgagaggctcagcacctccgtcccagccgccccgaggcagcggatgatcacgtgcgacgaggtcccggaagacgcgctcgtctccttcctgcgggcaaacgccgatgtcttcgcctggagaccggcggacatgcccggggtccccagggaggtgattgagcaccgtctcgccgtgcggccgggcgcaaggccggtccggcagaaagtgcggcggcaggccccggaacgtcaagccttcatccgcgaggaggtgacgcgacttctggaggccggattcatccgtgaggtcatccatccggagtggctggcgaacccggtcgtcattcccaaggcgaacggcaagcttcggatgtgcatcgactacaccgaccttaacaaggcatgtcctaaggacccttaccccctgccacgcatagatcagattgtcgactccaccgcggggtgcgaccttttgtgttttctagatgcatactctggttatcatcagattcgcatggctagggaggatgaggaaaaaactgctttcattacccccataggaacttattgttatacgacaatgcctttcgggttaaagaatgcgggtcctacttttcaacgtactactcgaatttctttgggtagccagataggacgcaatgttgaggcctatgttgatgacttgattgtgaagacgcgcaaccaagagaccttactctcggatctagcggaaactttcgaaagtctccgctccgcccgcataaagctgaaccccgataagtgcgtgttcggcgtgcctgcgggcaagcttctcgggttcttggtctctgcccgaggcatcgaggccaaccccgagaagatacgagctatagagcggatgcacccccccagcaagcttagggatgtgcagtgcgtcaaccggctgcatggccgccctaagtcggtggtcagcgcggcgttggtcgtggagcgcgacgaggacaaccctcactccgcgcatccccaccctgcgtcgactcgacctgggagagagcaggcaggagaggcccccgagccgaacggcggcccgaggcccccgatggccggagctggccctccgcctgcttgtccgacggtgctaggcgcccccgacccccaggatggccccggggccactgcgggaaggccgcgcctgtcgccctctgaccccgaggtgcagcggcccgtctacttcgttagtgaggccctccgggacgccaagacccgataccctcaggcccagaagatgctttacgctattctaatggcttcgaggaagttgcgccattatttccaggcgcatcgggtcacggtggtcacgtcttaccccctcggccaaatcttgcataaccgagagggtactggacgggtggtgaaatgggcaatcgaactctctgaattcgatttgtgctttgaaccacgccacgcgatcaagagccaggccctcgccgactttgtggcggagtggaccccagcccctgagcccatctccgtccccgaggccagctcgggcccctcgcagctgcctcacaccgcctactgggtgatgcagttcgacggctccctgtctcttcagggcgccggtgcgggggtcacgttgacctcgccgagcggagacgtcctcagatacctggtccgtctcaactttcgggcgaccaacaatatggcggagtacgagggactccttgcgggactcagagtggcagctggactgaggatccgccgcctcctgatgttaggcgactcccagttggtcgttaaccaggtgcggcgtatggagcgccatttcgacgggatagagcttcggcacgtgcccagacgggataacgcggtcgccgacgaactctcaaggctcgcttactcgcgagcccagaccccatcggacgcctttgaagaaaggcttgcccagccgtcggcgcgacccgaccccctaggggagacggacgcgcctgaacggcccccgaggcccgtcggagtccaggcctcgggacccaaggggagcgctcccagctcccctagattgattgcttggatcactgaaatccaggcgtacctcgcagataagactctacccgaggaccgcgaagggagtgaacgcgtccagcgcatctccaagcgctacgtgctggtggaagggaccctctatcggcgcgcggctaacggagtcctcctgaagtgcattcctcgggaacaaggtgtcgagcttctggccgatatccatgaaggcgagtgcggagcccacttcgcctcacgcaccttagttggcaaggcctttcgccagggtttctattggccgacggctctcaacgatgcggttgacctggtccggcggtgcagggcgtgccagttccacgccaagcaaacccatcagccggcccaggccctgcagaccatacctctttcgtggccgtttgctatctgggggctcgatattctaggtccgttcaggcgggccccgggtgggttcgagtatctgtatgtcgctgtcgacaagttcactaagtggcccgaggcttatccagtcatcaagatcgataagcactccgcgcttaaattcatcaggggcatcactgctcggtttggggtgcctaaccgtatcattacggataacggcacccagttcactagtgagctcttcggtgactactgcgaagacatgggcatcaagctatgcttcgcctcccccgcccaccccagaagcaatggccaagtggagcgcgccaacgcggaaatcctcaagggccttaaaaccaagaccttcaacatcctcaagaggcacggcgactcgtggatcgaggagctgccagcggtgctctgggcgaaccgaaccacgccaagccgagcaaccggggaaatgcctttcttccttgtctacggcgcggaggcggtcctcccatctgagctcaccctaaggtcccctcgggtcaccatgtattgcgaggctgatcaagatcagcttcaccgagacgacctcgactacttggaagagcgaaggcggcgcgtggccctccgagccgcgcgctaccagcagagcctgcggcgctaccattag

SEQ ID NO: 52856 - DNA, 327 bp, Oryza sativa
  Clone ID: PAT_MRT4530_55111C.1
atggcgagtggctcgacaacgaccggcgaggagatgaggcgggcagagagagggtgcatggatggggtggcagacgaggagggggggtgcggcggtgtaggggcaaggcggcggatggagagcgtgcacggagatgaggcggctgatggcatgggagatgggagggatgggggcggcacactactagaattcaatgggttccctagagtattttggattttccctagggtatttggctatatggaccttgcagtagatcatacttcggggccctgccgggtcaccgcgggtagttttgaatccccgtccctgctcaccagcgggtga

SEQ ID NO: 52857 - DNA, 3915 bp, Oryza sativa
  Clone ID: PAT_MRT4530_55112C.1
atggccgaacaggcagtggcgcacaacctctctccgagcgctagcggtgacgacggggagcagaacccgcgccgtcgagctcgtactccaccgtccccctctcgccgaagtcttgggcgggaggaggcgttcgaggaggtcgaaagatccgcgacttcaccgcccacgggcgatggagaaggacggcgagacggggagcgtcgcctcctcgtctacggcgatggcagcacgccccagggcgcgctccaggctgcgggcgcgctcctgcgtcccccgcccgtcgtccccgatccagagactccagcccgacgttggctggatgacgtggccaacttggtcatgacggcgcagcagcgcctaggcgccggcgggcggtcctccgccaccaaggcctctggcgctgctaccgccggctccgtgtcgtcgaggcggagggcgcggcgagcggcggccgttacccgccgttcgtccgccattccttcgtcaacgcctccgacccaagaagatgtgcgtggggggccagatgcccacctcaatatcgagcgccggcgcaatggtcgtcgtgctgcccacgcaacggagggcgcttcctcatctggagcgccacttcggtccgggcacgggggccaggcccccgtgtccccggttggcggtgccggctgtcgagcctttgtggcgagccttcgaaacgtccgttggcccctaaggttccggcctaccatcaccgaaaaatacgacggaagcgttaaccccgccgagtttctccagatctacacgactgggatcgaagccgccgggggtgacgacagggtcatggcgaatttcttccccatggccctgaaagggcggcgggacaggaggaggaagaagaggtcggcccattccgacgacgagggtcacgtcctcgccgtcgagggcgcttcgcgggccacccgaaaggggaggcctgcgagcgacaaaaagaaggaggccggcgctcccagcagggagcgcccgactggcaagtggtgcactgtgcacaacacctccctccacgacctcgcggactgccgcgcagtcaaaagtttggctgagcggatgaggaagtgggaggaggagaggaggcaggagcgccgtgagggcaaggccccggcggctcccgccggcaaccggcgaggtgaggccaagcagaaggccaccgccggggacgtcgacgatggcgacgatgacctggggttccaggagcctgaggccaccgtcgccaccgtcgatgggggagcgtgcgctcacgcttctcgccggagcctcaaggccaagaagcgagagcttctggccgcggcccctacccatgaggcgacgcggcgggcgtggtggtcggaggttgccctcaccttcgaccagaccgaccacccgccgtgcgttgcccggggagtacagatcgcgatggtggttttccccactgtttgcaacgtgaagttggggcgtgtcctcatacacgggggtgcagccctcaacatcctttcccccgcagcctttgacgccatcaaggccctggggatggtgctccggccgtcccagccgatcatcgatgtgacgccggggcacacttggccgctaggtcatatcgacctcccggtcaccttcggtggttccgccaacttccgcacggagcgggtgaacttcgatgtggcggacctcagtctgccctacaacgcggtcctggggaggcccgcgttggtgaagttcatggcggcggtccactacgcctatctccagatgaagatgccgggtcccggtggccccatctccgtccatggcgaccacaaagtcgcgctcgcttgtatggagcagcgcgcggaccacctcgccgcggcgtccaagcccgagggtggcgacgagaggctcagcacctccgtccctgccgccccgaggcagcggatgatcacgtgtgacgaggtcccggtggtcagcgcggcgttggtagtggagtgcgacgaggacaaccctcactccgcgcatccccaccctgtgtcgactcgacccgggagagagcagggaggagaggcccccgagccgaacagcggcccgaggcccccgacggccggagcaggccctccgcccgcttgtccgacggtgccaggcgcccccgacccccaggatggcctcggggccactgcgggaaggccgcgcctgtcgccctctgaccccgaggtcgtcggcccaaaagtcgagtgcgcccctggtggcctctcggacgaagagcgccccggagatgtggcccctggcgaagaggatcggccccgccgaaaggtgcagcggcccgtctacttcattagtgaggccctccgggacgccaagacccgataccctcaggcccagaagatgctttatgctattctgatggcctcaaggaaattgcgccattatttccaggcgcatcgggtcacggtggttacatcttaccccctcggccaaatcttgcataaccgagagggtactggacgggtggtgaaatgggcaatcgaactctctgagttcgatttgcactttgaaccacaccacgcgatcaagagccaggccctcgctgactttgtggcagagtggaccccagctcctgagcccgtctccgtccccgaggccagctcggacccctcgcagctgcctcacaccgcctactgggtgatgcagtccgacggctccctgtctcttcagggcgccggtgcgggggtcacgttgacctcgccgagcggagacgtcctcagatacatggttcgcctcgactttcgggcaaccaataatatggcggagtacgagggactccttgcgggacttagggtggcagctggactggggatccgccgcctcctggtgttaggcgactcccagctggtcgttaaccaggtctgtaaggagtaccggtgctctgacccgcagatggacgcttacgtgcgccaggtgcggcgtatgaagcgccatttcgacgggatagagcttcggcacgtgcccagacgggataacgcggtcgccgatgaactctcaaggctcgcttcctcgcgagcccagaccccaccgggcgcctttgaagaaaggcttgcccagccgtcggcgcgacccgaccccctaggggagacggatgcgcctgaacggcccccgtggcccgtcggagtccaggcctcgggacccgaggggagcgctcccagctcccttagattgattgcttggatcgctgagatccaggcgtacctcgcagataagactctacccgaggaccgcgaagggagtgaacgcgtccagcgcatctccaagcgctacgtgctggtggaagggaccctttatcggcgcgcggctaacggagtcctcctgaagcgggccccgggcgggttcgagtatctgtatgtcgctgtcgacaagttcactaagtggcccgaggcttatccggtcgtcaagatcgataagcactccgcgctaaaattcatcaggggcatcactgctcggtttggggtgcctaaccatatcattacggataacggcacccagttcactagtgagctcttcggtgactactgcgaagacatgggcatcaagctctgcttcgcctcccccgcccaccccagaagcaatggccaacttcgcagagacgacctcgactacttggaagagcgaaggcggcgcgcggccctccgagccgcgcgctaccagcagagcctgcggcgctaccatcagcgccacgtccgagcccgatcactctgcgtcgacgacctcgtcctacgccgcgtccaaacgcgtgctggactgagcaagctctcaccaatgcgggagggtccgtatcgagtgatcggcgtcccccggccgggctccgttcggctggccacgggcgacggcacagagctgcctaacccatggaacatcgaacaccttcgtcgcttctacccctag

SEQ ID NO: 52858 - DNA, 5604 bp, Oryza sativa
  Clone ID: PAT_MRT4530_55113C.1
atggccgaacgggcagtggcgcacaacctctctccgagcgctagcggtgacgacagcgagcagaacccgcgtcgtcgagctcgtactccaccgcccccctctcgccgaagtcttaggcgggaggaggcgctcgagggggtcgaaagatccacgacttcgccgcccacgagcgatggagaaggacggcgagacggggagcgtcgtctcctcgtctacggtgatggcagcacgccccagggcgcgctccaggctgcgggtgcgctcctgcgtcacccgcccgtcgtccctgatccagagactccaactcgacgttggttagatgacgtggccaacttgatcatgacggcgcagcagcgcctaggcgcaggcgggcgatcctccgccaccaaggccactggcgctgctactgccggctccgtgtcgtcgaggcggagggcgcggcgagcggcagccgttacccgccgttcgtctgccattccctcgtcaacgcctcccacccaagaagatgtgcgtgaggagccggatgcccgcctcaatatcgagcgccggcgcaatgatcgccgtgctgcccacgcatcggagggcgcttcctcgtccggagcgccacttcggtccgggcacgggggccagccccccgtgtccccggttggcggtgccggctgtcgagcctttgtggcgagccttcggaacgtccgttggcccccaagggtcatggcgaatttcttccccatggccctgaaaggacaggcgcggggttggctaatgaacttgccacccgcgtcggtccactcttgggaggatttgtgccaacagttcaccatgaacttccagggcacatatccgcgcccaggtgaagaagcggacttacacgcggtacagcgaggggacgatgagtctcttcgctcgtacattcagcggttttgtcaagtccgcaacaccataccgtgcatccctgcacacgcggtgatctacgcgttcagggggggcgtgcggcacaaccgcatgctcgagaagatcgcctccaaggagccccagaccacttcggagctttttcagctcgcggaccgtgtggctcgcaaggaggaggcttggacctggaactcctccggttccggtgtgacagctccggccgcccccgggcccgctgctcggtcagggcggcgggacaggaggaggaagaagagatcagcccattccgacgacgagggtcacgtcctcgccgtcgagggcgcttcgcgggtcacccaaaaggggaggcctgcgagcgacaaaaagaaggaggccggcgctcctagtagggagcgcccgaccggcaagtggtgcaccgtgcacaacacctccctccacgacctcgcggactgccgcgcggtcaaaagtttggctgagcggacgaggaagtgggaggaggagaggaggcaggagcgtcgtgagggcaaggccccggcggctccctccggcaaccggcgaagtgaggccaagcagaaggcccccgccgaggatattgacgatggcgacgatgacctaggattccaggagcctggggccaccatcgccaccgtcgatgggggagcatgcgctcacgcttctcgtcggagcctcaaggccatgaagcgagagcttctggccgcggcccctacccatgaggcgacgcggcgggcgcggtggtcggaggttgccctcaccttcgaccagaccgaccacccgccgtgcgttgcccggggaggacagatcgcgatggtggtttcccccaccgtttgcaatgtgaagttggggcgtgtcctcattgacgggggtgcagccctcaacatcctttcccccgcagcctttgatgccatcaaggccccggggatggtgctccggccgtcccagccgatcatcggtgtgacgccgaggcacacttggccgctaggtcatatcgacctcccggtcaccttcggtggttccgccaacttccgcacggagcgggtgaacttcgatgtggcggacctcagtctgccctataacgcggtcctggggaggcccgcgttggtgaagttcatggtggcggtccactacgcctatctccagatgaagatgccgggccccggtggccccatcaccgtccatggcgacctcaaagtcgcgcttgcttgcatggagcaacgcgcggaacacctcgccgcggcatccaagcccgcgggtggcgacgagaggctcagcacctccgtcccagccgccccgaggcagcggatgatcacgtgcgatgaggtcccgatcaagcaggaagacgcgctcgtctccttcctgcgggcaaacgccgacgtcttcgcctggagaccggcggacatgcccggggtccccagggaggtgattgagcaccgtctcgccatacggccgggcgcaaggccggtccggcagaaagtacggcggcaggccccggaacgtcaagccttcatccgcgaggaggtggcgcgacttctggaggccggattcatccgagaggttatccatccggagtggctggcgaacccggtcgtcgttcccaaggcgaacggcaagcttcggatgtgcatcgactacaccgaccttaacaaggcatgtcctaaggacccttaccccctaccacgcatagatcagattgtcgactccaccgcggggtgcgaccttttgtgttttctagatgcatactctggttatcatcagattcgcatggctagggaggatgaggaaaaaactgcattcattacccccataggaacttattgttatacgacaatgcctttcgggttaaagaatgcaggtcctacttttcaacgtactactcgaatttctttgggtagccaaataggacgtaatgttgaggcctatgttgatgacttggttgtgaaaacacgcaaccaggagaccttactctcggatctagcggaaactttcgaaagtctccgcaccgcccgcataaagctgaaccccgacaagtgcgtgttcggcgtgcctgcgggcaagcttctcgggttcttggtctctgcccgaggcattgaggccaaccccgagaagatacgagctatagagcggatgcgcccccccagcaagcttagggatgtgcaatgcgtcactggctgtatggccgccctaagtcggttcatatcgaggctgggagagaaggcgctacccctatttaagctccttaaacgctccgggccgtttatctggacggaggaggctgaacgggccctcactcagttgaaggcgtacctcagttctcccccagtcctggtcgccccggagccagatgagccgttgctactttacctggcggcaaccccgcaggtggtcagcgcggcgttggtcggggagcgcgacgaggacgaccctcgctccgcgcatccccaccttgtgtcgactcgacccgggagagagcagggaggagaggcccccgagccgaacggtggcccaaggcccccgacggccggagctggccctccgcccgcttgtccgacggtgccaggcgcccccgaccgccaggatggccccggggccactgcgggaaggacgcgcctgtcgccctccgacctcgaggtcgtcggcacagaagccgagtgcgcaccgcgcggcctctcggacgaagagcgccctggagatgcggcccctagtgaagaagatcggccccgccgaaaggtgcagcggcccgtctacttcgttagcgaggccctccgggacgccaagacccgataccctcaggcccagaagatgctttacgctattctgatggcttcgaggaagttgcgccattatttccaggcgcatcgggtcacggtggttacgtcctaccccctcggccaaatcttgcataaccgagagggtactggacgggtggtgaaatgggcaatcgaactctctgagttcgatttgcactttgaatcacgccacgcgatcaagagccaggccctcgccgactttgtggcagagtggacaccggctcccgagcccgtctccatccccgaggccagctcgggcccttcgcagctgcctcacaccgcctattgggtgatgcagttcgacggctccctgtctcttcagggcgccggtgcgggggtcacgttgacctcgccgagcggagatgtcctcaaatacctggtccgcctcgactttcgggcaaccaacaatatggcagagtacgagggactccttgcgggactcagagtggcggctggactggggatccaccgcctcctggtgttaggcgactctcagttggtcgttaaccaggtctccaaggagtaccagtgctctgacccgcagatcaaagcttacgtgtgccaggtgcggcgtatggagcgccattttgacgggatagagcttcggcacgtgcccagacgggataaagcggtcgccgacgaactctcaaggctcgcttcctcgcgagcccagaccccaccgggcgcctttgaagaaaggcttgcccagccgtcggcgcgacccgaccccctaggggagacggacgcgcctgaacggcccccgaggcccgtcggagtccaggcctcgggacccgaggggagcgctcccagctcccttagattgattgcttggatcgctgagatccaggcgtacctcgcagataagactctacccgaggaccgcgaagggagtgaacgcgtccagcgcatctccaagcgctacgtgctggtggaagggaccctctatcggcacgcggctaacggagtcctcctgaagtgcattcatcgggaacaaggcgtcgagcttcttgccgatatccatgaaggcgagtgcggagcccactctgcctcacgcaccttggttggcaaggcctttcgccagggtttctattggccgacggctctcaacgatgcggtcaacctggtccggcggtgcagggcgtgccagttccacgccaagcaaacccatcagccggcccaggccctgcagaccatacctctttcatggccgtttgctgtctgggggctcgatatcctgggtccgtttagacgggccccgggcgggttcgagtatctgtatgtcgctatcgacaagttcactaagtggcccgaggcttatccggtcatcaagatcgataagcactccgcacttaaattcatcaggggcatcactgctcggtttggggtgcctaaccgtatcattacggataacggcacccagttcactagtgaactcttcggtgactactgcgaagacatgggcatcaagctctgcttcgcctcccccgcccaccccagaagtaatggccaagtggagcgcgccaacgcggaaatcctcaagggcctcaaaaccaagaccttcaacatcctcaagaagcacggcgactcgtggatcgaggagttgccagcggtgctctgggcgaaccgaaccacgccaagccgagcaaccggggaaacgcctttcttcctcgtctacggcgtggaggcggttctcccatccgagctcaccctgaggtcccctcgggccaccatgtactgcgaggctgatcaagatcagcttcgcagagatgacctcgactacttagaagagcgaaggcggcgcgcggccctccgagccgcgcgctaccagcagagcctgcggcactaccatcagcgccacgtccgggcctga

SEQ ID NO: 52859 - DNA, 261 bp, Oryza sativa
  Clone ID: PAT_MRT4530_55114C.1
atgggagcttgccgagggtgtggcggaagcagcaagacaaacgtcgacgacgccgttgttgtcgggacggagactaccagcggcgtgacaaaggagaagagcaggaaggcgtcggacgacctcaccgccgcactctccggctacgatactttaggggagaagctgatgcgccggcgcgtccggcccccccgggacgaggcccacgcggcagggcaagagaaatgtcaaaatagagagagaagaagaagtttgtgtcgctga

SEQ ID NO: 52860 - DNA, 5484 bp, Oryza sativa
  Clone ID: PAT_MRT4530_55115C.1
atggccgagcgggcagtggcgcacagcctctctccgaacgctagcggtgacgacggggagcagaacccgcgccgtcgggctcgcaccccaccgtccccctctcgccgaaatcttgggtgggggaaggcgctcggggaggccggaggatccgcgacttcgccgcccgcgggcgacgggggaggacggcgagacggggcgcgtcgccgcctcgtctacggcgatggcggcacgctccagggcgcgctccaggctgcgggcgcgctcctgcgtcacccgcctgtcgtccccgatccagagactccagcccgacgttggctggatgatgtggccgacttggtcatgacggcgcagcagcgcctaggcgccggcgggcggtcctccgccaccgagacctctggcgctgccgccgccggctccatgtcgtcgaggcggagggcgcggcgagcggcggccgttacccgccgttcgtccgccattccctcgtcaacgcctccgacccaaggagatgtgcgtggggggccggatgcccgcctcgacatcgagcgccggcgcgacactcgtcgcgccgcccacgcaacggagggcttttcctcatccggagcgccacttcggtccgggcacgggggccggccccccgtgtccccggttggcggtgccggctgtcgagcctttgtggcgagccttcggaacgtccgttggcccccaaggttccggcccaccatcaccgaaaaatacgacggaagcgtcaaccccgccgagtttctccagatctacacgaccgggatcgaggccgccgggggtgacgacagggtcatggcgaatttcttccccatggccctgaagggtcaggcgcggggttggctaatgaacttgccacccgcgtcggtccactcttgggaggatttgtgccagcagttcaccacgaacttccagggcatatatccgcgcccaggcgaagaagcggacttgcatgtggtacagcgaagggacgatgagtctcttcgctcgtacattcagcggttctgtcaagtccgcaacaccataccgtgcatccccgcacacgcggtgatctgcgcgttcagggggggtgtgcggcacaaccgcgtgctcgagaagatcgcctccaaggagccccagaccaccgcgcagttttttgagctcgcggaccgtgtggctcgcaaggaggaggcctggacctggaactcctccggttctggtgtggcagctccggccgcccccgggtccgccgctcggtcagggcggcgggacaggaggaggaagaaggggccggcccgttccgacgacgagggtcacgtcctcaccgtcgagggcgcttcgcgggccccccgaaaggggaggcctgcgagcgacaaaaagaaggaggccggcgctcccagcagggagcgcccaaccggcaagtggtgtaccgtgcacaacacctccctccacgacctcgcggactgccgcgcggtcaaaagtttggctgagcggacgaggaagtgggaggaggagaagaggcaggagcgccgtgagggcaagaccccggcagctcccgccggcaaccggcgaggtgaggccaagcagaaggccaccgccgaggacatcgacgatggcgacgatgacctggggttccaggagcctgaggccaccgtcgccaccgtcgatggaggtgcatgcgctcacgcttctcgccggagcctcaaggccatgaagcgagagcttctggccgcggcccctacccatgaggcgacgcggcgggcgcggtggtcggaggttgccctcaccttcgaccagaccgaccacccgccgtgcgttgcccggggaggacagatcgcgatggtggtttcccccaccgtttgcaatgtgaagttgggacgtgtcctcatagacgggggtgcagccctcaacatcctttcccccgcagcctttgacgccatcaaggccccggggatggtgctccggccgtcccagccgatcatcggtgtgacgccggggcacacctggccgctgggtcatatcgacctcccggtcaccttcggtggttccgccaacttccgcacggagcgggtggacttcaatgtggcggacctcaatctgccctacaacgcggtcctagggaggcccgcgttggtgaagttcatggcggcggtccattacgcctatctccaaatgaagatgccgggccccggtggccccatcaccgtccatggcgacctcaaagtcgcgcttgcttgtatggagcagcgcgcggaccacctcgccgcggcgtctaagcccgcgggtggcgacgagaggctcgccacctccgtcccggccgccccaaggcagcggatggtcacgtgcgacgaggtcccggaagacgcgctcgtctccttcctgcgggcaaacgccgacgtcttcgcctggagaccggtggacatgcccggggttcccagggaggtgattgagcaccgtctcgccgtgcggccgggcgcaaggccggtccggcagaaagtgcggcgacaggccccggaacgtcaagccttcattcgcgaggaggtggcgcgacttctggaggccggattcatccgtgaggtcatccatccggagtggctggcgaacccggttgtcgttcccaaggcgaacggcaagcttcggatgtgcatcgactacaccgaccttaacaaggcatgtcctaaggacccttaccccctgccacgcatagaccagattgtcgactccaccgcggggtgcgaccttttgtgttttctagatgcatactctggttatcatcagattcgcatggctagggaggatgaggaaaaaactgcattcattacccccataggaacttattgttacaccacaatgcctttcgggttaaagaatgcaggtcctacttttcaacgtactactcgaatttctttgggtagccagataggacgcaatgttgaggcctatgttgatgacttggttgtgaagacgcgcaaccaagagaccttactctcggatctagcggaaactttcgaaagtctccgctccgcccacataaagctgaaccccgataagtgtgtgttcggcgtgcctgcgggcaagcttctcgggttcttggtctctgcccgaggcatcgaggccaaccccgagaagatacgagctatagagcggatgcgcccccccagcaagcttagggatgtgcagtgcgtcaccggctgcatggccgccctaagtcggttcatatcgaggctgggagagaaggcactgcccctgtttaagctcctcaaacgctccgggccttttacctggacggaggaggctgagcgggccttcactcagttgaaggcgtacctcagttctcccccagtcctggtcgccccggagccagatgagccgttgctactctacccggtggcaaccccgcaggtggttagcgcggcgttggtcgtggagcgcgacgaggacaaccctcactccgcgcatccccaccctgcatcgactcgacccgggagagagcagggaggagaggcccccgagccgaacggtggcccaaggcccccgacggccggagctggccctccgcctgcttgtccgacggtgccaggcgcccccgacccccaggatggccccggggccactgcgcgaaggccgcgcctgtcgccctctgaccccgaggtcgtcggcacagaagccgagtgcgccccgcgtggcctctcggacgaagagcgccctggagatacggcccctggcgaagaggatcggccccgccgaaaggtgcagcggcccgtctacttcgttagtgaggccctccgggacgccaggacccgataccctcaggcccagaagatgctttacgctattctgatggcttcgaggaagttgcgccattatttccaggcgcatcgggtcacggtggttacatcttaccccctcggccaaatcttgcataaccgagagggtactggacgggtggtgaaatgggcaatcgaactctctgaattcgatttgcgctttgaaccacgccacgcgatcaagagccaggccctcgccgactttgtggcggagtggaccccagctcccgagcccgtctccgccctcgaggccagctcgggcccctcgcagctgcctcacaccgcctactgggtgatgcagttcgacggctccctgtctcttcagggcgctggtgcgggggtcacgttgacctcgccgagcggagacgtcctcagatacctggtctgcctcgactttcgggcgaccaacaatatggcggagtacaagggactccttgcgggactcagagtggcagctggactagggatccgccgtctcctggtctgtaaggagtaccggtgctctgacccgcagatgaacgcttacgtgcgccaggtgcggcgtatggagcgccacttcgacgggatagaacttcggcacgtgcccagacgggataacgcggtcgccgacgaactctcaaggctcgcttcctcgcgagcccagaccccaccgggcgcctttgaagaaaggctcgcccagccgtcggcgcgacccgaccccctaggggagacggacgcgcctgaacggcccccgaggcccgtcggagtccaggcctcgggacccgaggggagcgctcccagctcccctagattgattgcttggatcactgagatccaggcgtacctcgcagataagactctacccgaggaccgcgaagggagtgaacgcgtccggcgcatctccaagcgctacgtgctggtggaagggaccctctatcggcgtgcggctaacggagtcgtcctgaagtgcattcctcgggaacaaggcgtcgagcttctcgccgatgtccatgaaggcgagcgggccccgggtgggttcgagtatctgtatgtcgctgtcgacaagttcactaagtggcccgaggcttatccggtcatcaagatcgataagcactccgcgcttaaattcatcaggggcatcactgctcggtttggggtgcctaaccgtatcattacggataacggcacccagttcactagtgagctcttcggtgactactgcgaagacatgggcatcaagctctgcttcgcctcccccgcccaccccagaagcaatggccaagtggagcccgccaacgcggaaatcctcaagggcctcaaaaccaagaccttcaacatcctcaagaaggacggcgactcgtggatcgaggagctgcctgcggtgctctgggcgaaccgaaccacgccaagccgagcaaccggggaaacgcctttcttcctcgtctacggcgcggaggcggtcctcccatctgagctcaccctgaggtcccctcgggtcaccatgtattgcgaggctgatcaagatcagcttcgccgagacgacctcgactatttggaagagcgaaggcggcgcgcggccctccgagccgcgcgctaccagcagagcctgcggcgctaccatcagcgccacgtccgggcccgatcactctgcgtcgacgacctcgtcctacgccgcgtctaa

SEQ ID NO: 52861 - DNA, 2622 bp, Oryza sativa
  Clone ID: PAT_MRT4530_55116C.1
atggcgccaaaaccacaggggggcggggcgccccagcccttggggccaaaacgggaacggaccgacccctcggggagacagagggaggggtggccacgtcaccctcgggcccgaccgccccgagggggtcaggccacgtgggtgaccgcggctacccaagcctctagtcacgatacccccggccccatgtcaccgacaaggggaatgtactatcattggtactcgcaaattttgggttttccggggcacacctggccgttgggtcatatcgacctcccgttcaccttcggtggttccgccaacttccgcacggagcgggtggacttcgatgtgacctctgacatgcccggggtccccagggaggtgattgagcaccgtctcgccgtgcggccgggcgcaaggccggtccgacagaaagtgcggcggcaggccccggaacgtcaagccttcatccgcgaggaggtggcgcgacttctggaggccggattcatccgtgaggtcatccatccggagtggctggcgaacccggtcgtcgttcccaaggcgaacggcaagcttcggatgtgcatcgactacaccgaccttaacaaggcatgtcctaaggacccttaccccctgccacgcatagatcagattgtcgactccaccgcggggtgcgaccttttgtattttctagatgcatactctggtcctacttttcaacgtactactcgaatttctttgggtagccagataggacgcaatgttgaggcctatgttgatgacttggttgtgaagacgcgcaaccaagagaccttactctcggatctagcggaaactttcgaaagtctccgctccgcccgcataaagctgaaccccgataagtgcgtgttcggcatgcctgcgggcaagcttctcgggttcttggtctctgcccgaggcatcgaggccaaccccgagaagatacgagctatagagcggatgcgcccccccagtaagcttagggatgtgcagtgcgtcaccggctgcatggccgccctaagtcggttcatatcgaggctgggagagaaggcactacccctatttaagctcctcaaatgctccgggccgtttacctggacggaggaggctgagcgggccttcactcagttgaaggcgtacctcagttctcccccagtcttggtcgccccggagccagatgagccgttgctactcagagtggcagctggactggggatccgccgcctcctggtgttaggcgactcccagttggtcgttaaccaggtctgtcaggagtaccagtgctctgacccgcagatggacgcttacgtgcgccaggtgcggcgtatggagcgccatttcgacgggatagagcttcggcacgtgcccagacgggataacgcggtcgccaacgaactctcaaggctcgcttcctcgcgagcccagaccccaccgggcgcctttgaagaaaggcttgcccagccgtcggcgcgacccgaccccgtaggggagacggacgcgcctgaacggcccccgaggcccgtcggagcccaggcctcgggacccgaggggagcgctcccagctcccctagattgattgcttggatcactgagatccaggcgtacctcgcagataagactctactcgaggaccgcgaagggagtgaacgcgtccggcgcatctccaagcgctacgtgctggtggaagggaccctctatcggcgcgcggctaacggagtcctcctgaagtgcattcctcgggaacaaagcgtcgagcttctcgccgatgtccatgaaggcgagtgtggagcccactccgcctcacgcaccttggttggcaaggcctttcgccagggtttctattggccgacggctctcaacgatgcggtcgacctggtccggcggtgcagggcgtgccagtttcacgccaggcaaacccatcagccggcccaggctctgcaaaccatacctctttcgtggccgtttgctgtctgggggctcgatatcctgggtccgttcaggcgggccccgggcgggttcgagtatctgtatgtcgctgtcgacaagttcactaagtggcccgaggcttatccggtcatcaagatcgataagcactccgcgcttaaattcatcaggggcatcactgctcggtttggggtgcctaaccgtatcattacggataacggcacccagttcactagtgagctcttcggtgactactgcgaagacatgggcatcaagctctgcttcgcctctcccgcccacccaagaagcaatggccaaatggagcgcgccaacgcggaaatcctcaagggcctcaaaactaagaccttcaacatcctcaagaagcatggcgactcgtggatcgaggagcttccagcggtgctctgggcgaaccgaaccacgccaagccgagcaaccggggaaatgcctttcttcctcgtctacggcgcggaggtggtcctcccatctgagctcaccctgaggtcccctcgggtcaccatgtattgcgaggctgatcaagatcagcttcgccgagacgacctcgactacttggaagagcgaaggcggcgcgcggccctccgagccgcgcgctaccagcagagcctgcggcgctaccatcagcgccacgtccgggcctga

SEQ ID NO: 52862 - DNA, 4701 bp, Oryza sativa
  Clone ID: PAT_MRT4530_55117C.1
atggccggacgggcagtggcgcacagcctctctccgaacgctagcggtgacgacggggagcagaacccgcgccgtcgggctcgcaccccaccgtccccctctcgccgaaatcttgggcggggggaggcgctcggggaggtcggaggatccgtgacttcgccgcccgcgggcgacgggggaggacggcgagacggggcgcgtcgctgcctcgtctacggcgatggcggcacgccccagggcgcgctccaggctgcgggtgcgctcctgcgtcacccgcccgtcgtccccgatccagagactccagcccgacgttggctggatgacgtggccgacttggtcatgacggcgcagcagcgcctaggcgccggcgggcggtcctccgccaccgaggcctctggcgctgccgccgccggctccatgtcgtcgaggcggagggcgcggcgagcggcggccgtaacccgccgttcgtccgccattccctcgtcaacgcctccgacccaagaagatgaggaggcctgggcctggaactcctccggttctggtgtggcagctccggccgcccccgggtccgccgctcggtcagggcggcgggacaggaggaggaagaaggggtcggcccgttccgacgacgagggtcatgtcctcgccgtcgagggcgcttcgcgggccccccgaaaggggaggcctgcgagcgacaaaaagaaggaggccggcgctcccagcagggagcgcccgaccggcaagtggtgtaccgtgcacaacacctccctccacgacctcgcggactgccgcgcggtcaaaagtttggctgagcggacgaggaagtgggaggaggagaagagacaggagcgccgtgagggcaagaccccggcggctcccgccggcaaccggcgaggtgaggccaagcagaaggccaccgccgaggacatcgacgatggcgacgatgacctggggttccaggagcctgaggccaccgtcgccaccgtcgatgggggagcgtgcgctcacgcttctcgccggagcctcaaggccatgaagcgagagcttctggctgcggcccctacccatgaggcgacacggcggttggggcgtgtcctcatagacgggggtgcagccctcaacatcctttcccccgcagcctttgacgccatcaaggccccggggatggtgctccggccgtcccagccgatcatcggtgtgacgccggggcacacctggccgctgggtcatatcgacctcccggtcaccttcggtggttccgccaacttccgcacggagcgggtggacttcgatgtggcggacctcagtctgccctacaacgcgatgaagatgtcgggccccggtggccccatcaccgtccatggcgacctcaaagtcgcgcttgcttgtatggagcagcgcgcagaccacctcgccgcggcgtccaagcccgcgggtggcgacgagaggctcagcacctccgtcccggccgccccaaggcagcggatggtcacgtgcgacgaggtcccggaagacgcgctcgtctccttcctgcgggcaaacgccgacgtcttcgcctggagaccggcggacatgcccggggtccccagggaggtgattgagcaccgtctcgccgtgcggccgggcgcaaggccggtccggcagaaagtgcggcggcaggccccggaacgtcaagccttcatccgcgaggaggtcatccatccggagtggctggcgaacccggtcgtcgttcccaaggcgaacggcaagcttcggatgtgcatcgactacaccgaccttaacaaggcatgtcctaaggacccttaccccctgccacgcatagatcagattgtcgactccaccgcggggtgcgaccttttgtgttttctagatgcatactctggttatcatcagagtcgcatggctagggaggatgaggaaaaaactgcattcattacccccataggaacttattgttatacgacaatgcctttcgggttaaagaatgcaggtcctacttttcaacgtactactcgaatttctttgagtagccagataggacgcaatgttgaggcctatgttgatgacttggttgtgaagtcgcgcaaccaagataccttactctcggatctagcggaaactttcgaaagtctccgctccgcccgcataaagctgaaccccgataagtgcgtgttcggcgtgcctgcgggcaagcttctcgggttcttggtctctgcccgaggcatcgaggccaaccccgagaagatacgagctatagagcggatgcgccccaccagcaagcttagggatgtgcagtgcatcaccggctgcatggccgccctaagtcggttcatatcgaggctgggagagaaggcactacccttatttaagctcctcaaacgctccgggccgtttacctggacggaggaggctgagcgggccttcactcagttgaaggcgtacatcagttctcccccggtcctggtcgccccgaagccagatgagccgttgctactctacctggcggcaaccccgcaggtggtcagcgcggcattggtcgtggagcgcgacgaggacaaccctcactccgcgcatccccaccctgtatcggctcgacccgggagagagcagggaggagaggcccccgagccaaacggcggcccaaggcccccgacggccggagctggccctccacctgcttgtccgacggtgccaggcacccccgacccccaggatggccccagggccactgcgggaaggccgcgcctgtcgccctctgaccccgaggtcgtcggcacagaagccgagtgcgccccgcgtggcctctcagacgaagagcgccctggagatgcggcccctggcgaagaggatcggccccgccgaaaggtgcagcggcccatctacttcgttagtgaggccctccgggacgccaagacccgataccctcaggcccagaagatgctttacgctattctgatggcttcgaggaagttgcgccattatttccaggcgcatcgggtcacggtggttacgtcttaccccctcggccaaatcttgcataaccgagagggtactggacgggtggtgagatgggcaatcgaactctctgaattcgatttgcgctttgaaccacgccacgcgatcaagagccaggccctcgccgactttgtggcggagtggaccccagctcccgagcccgtctccgcccccgaggccagctcgggcccctcgcagctgcctcacaccgcctactgggtgatgcagttcgacggttccctgtctcttcagggcgcctgtgcgggggtcacgttgacctcgccgagcggagacgtcctcagatacctggtccgcctcgactttcgggcgaccaacaatatggcggagtacgagggactccttgcgggactcagagtggcagctggactggggatccgccgcctcctggtgttaggcgactcccagttggtcgttaaccaggtctgtaaggagtaccagtgctctgacccgcagatggacgcttacgtgcgccaggtacggcgtatggagcgccatttcgacgggatagagctttggcacatgcccagacgggataacgcggtcgccgacgaactctcaaggctcgcttcctcgcgagcccagaccccaccgggcgcctttgaagaaaggcttgcccagccgtcggcgcgacccgaccccctaggggagacggacgcgcctgaacggcccccacggcccgtcggagtccaagcctcgggacccgaggggagcgctcccagctcccctagattgattgcttggatcactgagatccaggcgtacctcgcagatgagactctacccgaggaccgcgaaaggagtgaacgcgtccggcgcatctccaagcgctacgtgctggtggaagggaccctctatcggcgcgcggctaacggagtcctcctgaagtgcattcctcgggaacaaggcgtcgagcttcttgccgatgtccatgaaggcgagtgcggagcccactccgcctcacgcaccttggttggcaaggcctttcgccagggtttctattggccgacggctctcagcgatgcggtcgacctggtccggcggtgcagggcgtgccagttccacgccaggcaaacccatcagccggcccaggccctgcagaccatacctctttcgtggccgtttgctgtctgggggctcgatatcctgggtccgttcaggcgggccccgggcgggttcgagtatctgtatgttgctgtcgacaagttcactaagtggcccgaggcttatccggtcatcaagatcgataagcactccgcgcttaaattcatcaggggcatcactgctcggtttggggtgcctaaccgtatcattacggataacggcacccagttcactagtgagctcttcggtgactactgcgaacacatgggcatcaagctctgcttcgcctcccccgcccaccccagaagcaatggccaagtggagcgcgccaacgcggaaatcctcaagggcctcaaaaccaagaccttcaacatcctcaagaagcacggcgactcgtggatcgaggaactgccagcggtgctctgggcgaaccgaaccacgccaagccgagcaaccggggaaacgcctttcttcctcgtctacggcgcggaggcggtcctcccatctgagctcaccctgaggtcccctcgggtcaccatgtattgcgaggctgatcaagattag

SEQ ID NO: 52863 - DNA, 339 bp, Oryza sativa
  Clone ID: PAT_MRT4530_55118C.1
atggccttggaagatgtggctgttcctgatcagcgatggactgatgatgtggcacgccagcgccagatcgcgcccgacggcgacaccctccacctccgcgggcgacgtggccggatccgccccatgcgacgcgcctgtggcccgtacgcgaccgccgcgcgccccgcgacgcggccgggcggccccacccgcgcgctctgtgccgccgggagagagagccaggcgaggccgcggcgagctcggctgtcggcagcctcgccgttgtggctttgccgccgcggtgaaggacaagtccggtccttttcccggctcttgcagtcttgctgctactgtggctaa

SEQ ID NO: 52864 - DNA, 627 bp, Oryza sativa
  Clone ID: PAT_MRT4530_55119C.1
atggcggcgccgagggagaagtccgccgcggcgacctcgtcggcggcggcggcggatgcggcgggggcggggggtggaggggatcggtggggcgcggcggtggggaacctgacggagctgggggcgaacgtggcggcgctgcagaggctgctcgcgaagaaggcggtgttcgtcgacgaggacatcttctccaaggcctccctcgccgccgaccaggcccgcaccatcaaggtgattttgctctgctttgctttgctcgttgctggtgctcctgattcgcccccaatcccttcgccggtatcctcggcgatgctgttttgtcaattggtggatctcattcttgaccagagggtgcagtcgctggaacgtgaactagatgctgccatttctgctgctgcccgagctcgtacagagaaacgccaagctgaagctgctcaacgagctgcggagttacgtgcgcaggaagtgaccaaggaattggagaacactgcaaaagtgttcaagctacacatggaagagttgcgggcaaagcaagaggagattgcaaagaaagaaagtgatatcaaggtgttagaagcaataattcgaaccctgagtaacaaagatgatgggggatccagcgaataa

SEQ ID NO: 52865 - DNA, 457 bp, Oryza sativa
  Clone ID: PAT_MRT4530_5511C.1
aaagagaggggaaagagagtgttgacgtggcacgctgacatgtatggcccacgagggtttcacgctgactcagccgccacgtagaccaaaaccggggacaaaaccaccgaaggacctcgggtgaccggttttgtatacttaaaggaccctacgtatctggttttgtggttcgagaacgttttggtatcccgatgacaagttgagggacctttggtgcactttttccggatttcttgtggtttagaccgcttttcggggacagaatagaatagcgtgcgcgccgcaaccagattgtctcggctcggcggcgctggtcacccgccgtttcaaatcccaactgccagacagagtcatacacgtacggaacacggacctttgagatgtgtacttagagcaggtacaatagtaggctataagctagctataaatatattttaaagagaaaaaaaaaaaaaaa

SEQ ID NO: 52866 - DNA, 308 bp, Oryza sativa
  Clone ID: PAT_MRT4530_55120C.1
acagccacctgctacattgctgacttcaaacggccgccaaatctgcatacgacctccgtttttggcccatgagtatttgatggaaacctctcggagtcctctttccatcggatttggcctcaccaccaaattccatccaagtcatccgcagatgaaaaaacaaggtactacgtcacctgtcatgggcctatgggcttgtaactttgtttggaaccccggcccaagtggggcccatgtggggtgcgccccaaccaggtggaggacgacctagggtcctcccacctccttaaatagttaggtaccccttg

SEQ ID NO: 52867 - DNA, 258 bp, Oryza sativa
  Clone ID: PAT_MRT4530_55121C.1
atggacctcgatcgagtcgtgctcgccacgcgcgcccgcgctcgctcaaccgatcgagagcagcggaagccagccgcctcggcgaacgcggacgcggacgcgggcgctgctgccgcgcgcgacatgccgatcgacgtcgcgcacgtcggggggagcgggaggaccagcggcgccgcggggggcatggcggcatggggtgatgtgggggtggaaggcgggcgcgtgtacccgcgacatgggtgggacggggccgactag

SEQ ID NO: 52868 - DNA, 2714 bp, Oryza sativa
  unsure (1)..(2714): unsure at all n locations
  Clone ID: PAT_MRT4530_55122C.1
gcgcgtggctgcgtacatcccgtgtgcagtgtgctcggcctgccatcccctgcacaacccgtgttccgggcttgcccttgttctgcctggcgctcccttcctgttcttgcgggacccttctcccccgtcaagatcctgcgcctcctctgcttgttctttgtgcttctgtttccatcgctccctgcgggccaggccagctaccgacccgcgggcggtccggtagccctagcatctactcctgctgcctccagcgctggccacggctagaacgatggctacctccgttctccccatcatggcgcgtggcgtggtcgctaggtggagggtggtgtgccgccgctctcctcttcttcagaggtggcaggccattctgcttctctcgccattggagtgctccgggtgaggtgaggttcgcaaactgttcagcacaatgaagccttcggacgataaggcgcagctctcaggattggcgcaatcagaagaatcgtcacttgatgtggatcaccagtcatttccttgttctccatcaatccaaccggttgcttctgggtgcacacacacagagaacagcgcagcatacttcttatggccaacatccaacctacagcattgtgcagccgagggacgtgcaaactactttggaaaccttcagaaaggattgttgccaaggcaccctggtcggttgcccaaaggtcagcaagcaaatagcttgcttgacttgatgactataagagctttccatagcaagatattgcggcgttttagcctcgggacagcagtgggattccgcatcaggaaaggggatctaacagatatccctgcaatccttgtctttgttgctcgcaaggttcataagaagtggcttaatccagcacaatgtcttcctgctattcttgagggtccaggaggtgtttggtgtgatgttgatgttgttgaattttcgtactacggtgcaccggctcaaacacctaaagagcaaatgttcagtgagcttgttgataagttatgtggcagtgacgaatgtattggttcaggctctcaggttgcaagccatgaaacttttggtactttgggtgcaattgtgaaacggcgcactggcaacaagcaggttggtttcctcactaaccgtcatgtcgcggttgacttggactaccctaatcagaagatgtttcatccattaccacccaatcttgggcctggcgtttatcttggagctgttgaaagagcaacttctttcatcacagatgacgtttggtatggaatctatgctggaacaaacccagggacagctgttccagctgaccgggcctggcccccatctgctgttgtctttgacatttccaccgtcacgactgtagttaggggaggcggtgacattggggatgtcaaggttatagatctgcagtgtccgctcaatagcctcatagggaggcaagtatgcaaagttggcagaagctctggtcacacaactgggactgtgatggcctatgcccttgagtacaatgacgagaaaggaatatgcttcttcacagacatccttgttgttggtgagaaccgccaaacatttgatttggaaggtgatagcggaagccttattatcctgactagccaagatggtgagaagccgcgtccaattggaattatatggggtggcacagcaaatcgtgggaggttgaagcttacaagtgatcatggccctgaaaactggactagtggggttgatcttggccgtctactcgaccgtctggaacttgatattatcattaccaatgaatcactccaagatgccgtgcagcagcaaagatttgctttggtgcccgccgttacctcagctgttggggagtcttccggggcgcctgtcgccatcccggaagagaaggtcgaagagatcttcgagccattggggatccaaatccagcaactgcctcgccatgacgtggcggcctctggaactgaaggggaggaggcatccaacacnggtggtcaatgtggaagagcaccagttcatctcaaacttcgtcggtatgtcgcccgtgcgcgacgaccaagacgctccgaggagcatcaccaacctgaacaacccctccgaggaagaactcgccatgtcgctccatctgggtgaccgagagcccaagcggctccgttcggactccggatcaagccttgacctggagaaatgaagtgcaaaaagtgctggttctgaatttctcattctggttcttcagagtttattgtcattgtggacagccaaaagtagtagtagatcaaaagacctcatatgcagttcagaaaaattgaacctgcagtaagcttcagtgagcttgaatggctttggcaagcatatcatgtaacatgatgcactattattactacaattgattcagccccttgtcgcgtgtctggtgctagtcctgcagttttgctgtgctcatgatcgtgagacctgatatacaccattgccggatcccttcctctttgtagaagaagaagaacaatgtgcagggaattatgataatgatgatctttgatctatttcccctcctgtcagtgacacagaggaagaggcgtaagtacggagccgcgtagccgtcgctcgcttcatccggtttggcgtacggatacgggattgcgaatcccccacgcatccggaaatcggaatcccacccggttcgggaaaaggataaaaccaccccggttcgggaagattcgtccat

SEQ ID NO: 52869 - DNA, 303 bp, Oryza sativa
  Clone ID: PAT_MRT4530_55123C.1
aaagcttgaagattatacatattatatattaaaaaaaaaattaatacaaaaaaaaaaaaaaaaaacaaaaagggcgaactctatcataaacccgggattcctcacatcatcatttcaacttatcaccatttggtacatctttaaataaggttcaattcatttcaatcagatactaacttcttgcttgagtaaactgtttccttaactagaaaaattagatgcatctgaatctatctttaaaaaacttgaagcttttataattctttataagggaaaaagaagacattggatttcttcctcatt

SEQ ID NO: 52870 - DNA, 225 bp, Oryza sativa
  Clone ID: PAT_MRT4530_55124C.1
cttgtaccaaaacaatctggctgcccacatggtgaacgctatgtgcactgaccctgtgcagggtgggtgatgctgggtgatgtggaaattggtacccaagtgatgaggtgagtaaccagggaggagaaaatatgataaaggtgcaatgcctagcattgcaggtggtggtgagacaaaagttggaaacatgcggggtggatgacaaaatgctgggaatgaaaaatg

SEQ ID NO: 52871 - DNA, 468 bp, Oryza sativa
  Clone ID: PAT_MRT4530_55125C.1
atgtcattttcactccccctattcctcctctctcctcatctcccctctcttcatctctcattccaggaagaaggcagtggcacggacacggacggaggggattggggaggtggcatgggcacggataagggtgttggcgaggaaggcgtcgagcaggacagaggggcggaggtggacaatggtgtttttgagatcgagttctttaacccgccgggctccaatgatacctacgtcagggttgtcaaccgcgccgaccaggtcccaggccccgttggcgccacgctgtccatgtcccgcggctgcgagctcgccgacgctaactccaccgtcgtgtggttggtctcgccgatggcggcggtgaaaggatcgtgcgcggccaggatacgggacgacggcaactgggtcgtcaccgatatgatgcttaagacgacggtgggcaagcagcgaccggagctaggcgggcgatag

SEQ ID NO: 52872 - DNA, 251 bp, Oryza sativa
  Clone ID: PAT_MRT4530_55126C.1
actgataacctcaaaggaacatggttgcgtgaggctttacaaactagagtgacacctactgcaaataaccatcctacatcaattatttcatgtatgcatacaaatatataaaattttacatagacactctttctttcatacatgatccaattaatgttttgaccttcacgtcttctacatcatcttgacctcctgggatacacacatcctaattaacaccacacaggttgtacatcataagctttcaactc

SEQ ID NO: 52873 - DNA, 307 bp, Oryza sativa
  Clone ID: PAT_MRT4530_55127C.1
gctatttataggattcgtgcgaagagattggatataaatcaatgcttaaagtcaagcataatgaggtggagaattcgtatcattgggcttgtgggcgcccaacatcacttcatgactgtggtagggatagtgatgatgacgacttccgagacatggattatgatgtggtagctcttactaataacttgagccaggcattgcgatatgggatatatagcaatgatgatatggaagaggatgtctattttgatgatgaatcagcagaggtcgtaatatgttctctgcgactgggagatgaccaagatgg

SEQ ID NO: 52874 - DNA, 247 bp, Oryza sativa
  Clone ID: PAT_MRT4530_55128C.1
gcgcccaacatcacttcatgactgtggtagggatagtgatgatgacgacttccgagacatggattatgatgtggtagctcttactaataacttgagccaggcattgcgatatgggatatatagcaatgatgatatggaagagaatcaagggacacttgaacatgatgatgaggatgtctattttgatgatgaatcagcagaggtcgtaatatgttctctgcgactgggagatgaccaagatgggtaa

SEQ ID NO: 52875 - DNA, 528 bp, Oryza sativa
  Clone ID: PAT_MRT4530_55129C.1
atggacacatggcaagaggagatgaaatatgctctttggatgcttgaccatgccacttgtcatgaggagagcaaagatgctcctaggatgcttggagcatctccacactcccaaggcacctcatgggctataaatacccctcctctcattcattcccacacacacctcaaggagaagatcaagagctccctcaagtattgtttagtagttagtgctagtggagtaggaaatagaatagtcttcatagtccacgagtcttcaggagattccggcgggacttggcacctgacgcggggctgcatcagtgttcaatctctggcgaaggggtatgtccaatgttccgtcggcccaggcaattgtatcatctacatcggcgtcgttcaaggctgcatcagtacattcgacctcttggattgctctggagttaagcagatctcccaggccggtgtgttcgattttttcgtcaacactgtcacctccttggtagaacgggtgaacactggcaagctcatcaggcttgccgcataa

SEQ ID NO: 52876 - DNA, 1968 bp, Oryza sativa
  Clone ID: PAT_MRT4530_5512C.1
atgggtataaacgggatcaagacgaaatctcaggggtatacaagggatgtgacaaaattcaagggcatgcaagggatggagcaaactttaggggtatgctttgggaaaaagacatccacaaagataacacgcttcaacatgtatcaactaacaacagcccatcaggtttcagaagcattttcgtttggaataagttcacccaagggttatgggttaggcataccctttacccttcgatatacgtcacatatcgatccttataccaacgtaccccaataccctctatatccggtctacgggtaccacccgtcaacagtggcgcgccaggtaggggcacttggtattcaaggttctactactatgtcatccagcctcgtcgacaacagcgtcaacaccaacctcagccaagtaatccctgcttcaacgatgctggtgtggactaaagtcggcgaaatcgtcttcccggtttacaccacgacgccgatctcaaccggtccctcaatgaccggaaacgagaacgcagttgctacaaaccaaggcgaatccatgtcgaaaaatcctcccgctgagacggagaacggagcatcgatgacatccaagctcgagaaggattctgatgcggccaaaccttgtcattccgacatgaaccacgagccgacgaagatgacttccgaagcggcaaggtcctggtgtcctatccacaaaaccaggaaacacaccttgcaagcctgctgggttttcctcaacgtccgcgctgaaattcgcgcttgcaaagagcgtggaattcagcgtatttctccaactcgtgatgtctattgtcctattcacaagacaaagaatcacaacctctcaagctgcaaggtctttctcagcgccatgaaagcgccatctcctaaggttcaacagtcacacattcccatcagggataaagacaaggaacaaggagcgacgtcaacttcagatcgatttgttggggtaatcgatatcgatcctcacgaaccatcagtcttgcaccttctcgaagactatggatcatcgacaacgagcgcgccgcgggaggtattggctatcgatgatatcggcacgtcaacgcgcaccaatgcagaagcggagaatcaattggccactccggcccagcacatcagagctgtcaacgctatactgagggaaaccccctacgatcctattctgaacgacgatctcgcgcgttggacagaacgactacgggaatcagtgaccaacctcagcaacgcgttcgaagaggccgctgccgcagcgcacccggagtagccaccaactggcgatgccaatggtgaagaccctgaacggagggaatcgcctcatcgagccacccctccacctcgcggcactggcgatctccgagatcacctcaacggccgccgggaggcacgacgcacacgagacaatgagaatcatcagcggcggaggcggcgtgccggcaacggcgacgaccagcggcggcggcggcggcggctagaggtgtgccgccggagccggatagacgaggcgaggcgatggcggcagatagacgaggcgcgccgccggatagacgaggcgaggcggcgggggcggcgtgccggcgacggcgacgaccggcggcggcaacgaccggcggcggcggctaggctagggcacgggagagtagtacagcgccgccgccgccgccggcgacctgcttcttcagacgcatcctcgccggtgagcgcagcaccaccctccttctcgtctttccattacccacgacttctctccttgcatcaaccttcaccaccggcagcggggcggcggccgcggccgcggcggctgcgatcggcgatgcggcggcgccggccgcgctggttgggccgtccctccaagtcctcacggcactctccgtacctatattttttccctgttcatattggttcattcaatagagatgctacctcacatgtgtcatgagcttga

SEQ ID NO: 52877 - DNA, 378 bp, Oryza sativa
  unsure (1)..(378): unsure at all n locations
  Clone ID: PAT_MRT4530_55130C.1
gtcgcgtcgcaccgaagcagagtagagaaggagaggagcggagcgccatcagccgtccgatcgagtgagccgatggctctcgctctctccacctctgctgctgctgccgctgccgccgcggcgcgggcgctcgcggcgagggtgacgacgacaaggggttacgccgagttgacggggatgcaggagccgtggctaaacgaatcactggactactcgtatgatcatgatgcatatcttacgcactcacactagcttgagacgatcaagcttgccacagactgtggtcaacatactccacccaatgttggggatgtgggcccgaattatactagaantttggaacggccattgccagttcgagacttgattttgcctaag

SEQ ID NO: 52878 - DNA, 298 bp, Oryza sativa
  Clone ID: PAT_MRT4530_55131C.1
cttcctgtcgcgacacactcctaacgcccacatctcgaaaaaaaatacgcatcaacagccagccatggcgtccacgctgaccaacgtcggcctgtctaccccggcggcggcgtgcgtcttcctcgttaggccggtcgccggagctggacgcgtggtgtttccccgtgttggccgcggcggtttctcggcggtgagggcgagcgggccggcgacgccgccggacatttcggacaagatgtcggagagcatctacaaggcgaaagaggcgtgcgcggaggacacggcgagcggctagtgc

SEQ ID NO: 52879 - DNA, 114 bp, Oryza sativa
  Clone ID: PAT_MRT4530_55132C.1
atgtcaacttggggtacgttacgttctattcctgacaagcgacaacggcatgatgggccggctgaacacactggcccggggcccatcagaagtattcacgatctgcgctggtga

SEQ ID NO: 52880 - DNA, 351 bp, Oryza sativa
  Clone ID: PAT_MRT4530_55133C.1
aaaaaaaaaataaaaatataaaaaaaaaaaaaaaaaaaaaaaaaaaaaaaaaaaaaaaaaaaaaaaaaaaaaaaaaaaaaaaaaaaaaaaaaaaaaaaaaagggggggccgaaaaaaagggacccaagctaacgaccccgggcaggccacgacaaaacttttctatggggcccccaaaatccaatccacgggccggggtttcacaccgtcgggacgggaaaaccccgggggtaacccacctaaatcgcctggaagaacatcccccttaccccagtgggggaaatagcaaaaaggcccgcaccgagggcctttcccaacaggtgggccaccctgattgggcaaggggacccc

SEQ ID NO: 52881 - DNA, 397 bp, Oryza sativa
  Clone ID: PAT_MRT4530_55134C.1
aaaaaaccaaaatcagatgggcatagcattctttatttactcgccctatttgcaacttccgactttgaaaaaaaaacccctgaaaatgcagggggcttagcctgctacatttgcatccttttaaatcaccggttgtttagcgaccacaaaagagcaggggcccagacccagcagctggcttagatccccccaaaacccccccgggttttacggggcaggcctattttagaaattttacctggcctcttttttatggacccaaaggggtcggtcatttatctccttctgggacgctaccttatgcggggggcagcttcttcttcttcttcttcttctacagaaactggggacgatgagcagcccgatcgccgtgaccacaatggtcgacggccccccg

SEQ ID NO: 52882 - DNA, 3024 bp, Oryza sativa
  Clone ID: PAT_MRT4530_55135C.1
atggctcctctctgctgctgcctcctgcgcgcgcggcggctcctcttcttcttcttcttcttcttcttcttcttcttcgccgtcgccgtcgtcttgttctcctccgtctccgtcgcccagatacctgggttccagagcatcgactgcgggggctccggcaactacaccgacgaggtcgggctggagtggacgggcgacgaggcgtacgtgggcgggggcgcaggcacgacggcgagcatctcgtccatctcggggcaggggcggcggccttacaggacggtgcggtatttcccagcggacgggcgcaagtactgctacagggtgagcgtgaaggccaggacgaggtacctggtgcgtgcgagcttcctgtacggcaacttcgacggcagcagggtgttcccggagttcgacctgtacgtgggcgcctcgcggtggtccaccatcgtcatctacgacgagtccaaggtggtgacgagggagatggtggcgctggctcagtccggaccctccctctccgtctgcctcgccaacgccaccaccggccaccccttcatctccaccctcgagctccgccctctcaacgcctccctctaccacaccgccttcgaggccgccttcttcctctccctcgccgcccgcatcaacttcggcgcccccaccgccgatcccgtccgctaccccgacgacccctacgaccgcgtctgggagtccgacatggcgcgcaggccaaacttcctcgtcgacgccgcgcccggcaccatccgcgtcgccaccgacaaccccgtcttcgtggcctccggcgagcgcccgccgcagaaggtgatgcagaccgcggtggtgggcacgctgggcgcgctcacctacagactggacctcaacggcttcccgggcagcgggtgggcctgctcgtatctggcggagatcgaggacgacgcggccgccacggcgcgaaggttcaagctctacatcccggggctggccgaggtgagcaagccgacggtggacatcggagagaacgcgccggggaagtaccgggtgtaccagccgggctacgacaacatctcgctgccgttcgtgctccccttcgccttccgcaagacggacgactccgccaggggccccatcctcaatgccatggagatctacagctatatccccatactccctgcctcgcccgacgccgtcgccatggacgccctggcggcgcgctaccagcagcagcagcacagctgggcgcgggagggcggcgacccgtgtgttcccgcaccctggtcctggctcacttgcacctcatccagagtcatcgccatccggcttgacaacaacatgctgacaggcccaattccggacctcagtgcttgtacaaacctgacagtcatacacttagagaacaatcaactggagggcggtgtgccgtcatacctaagcggtctgcccaagctcagcgagctgtacctagagaacaacaggctgtctggagtcattcccagggctctgctaagtagaaccattgttttcaagtactcagggaacaagcatgtccgagtggggaagcaagaggaggaggagcggaatgtgataattgggatatgtgcgctgatgggaataggcttgttgcttgcagctgccctgtgctatgcctataatgttagtgttagcgggaggaaacaattacaaggtgctagtgcgggtgggaacagcaagagcaagagcatagtcgtgtccgcggagcagaagaagaaggcaacaccagtagcaggaggaggaggaggagaaatagacaacatgatggcggctatggcagcgcggggtccgttggagttcgaggtgagggagctggaggaggcgaccagcaagttcgcgaggaagatcgggtcgggcgggttcggggtggtgtactacgggaggctgggagacgggagggagatcgcggtgaaggtggcgagcagcaacgagtcgatccaagggaagaagcagctggccaacgaggtggcgcttctgtccaggatacaccaccgcaacctggtggcgttcctgggctactgctgggagcgcgacagcagcagctacatgctggtgtacgagtacatgcacaacggcagcctcaaggagcagctgcagatgatgagcatcagctggctccggcggctgcaggtggcggaggacgcggccaaggggatcgagtacctgcactgcggctgcacgccggccatcatccaccgggacatcaagaccagcaacatcctcctggacgcccacatgagggccaaggtgtccgacctgggactctccaagtccaacaaggccaccaactccaccaccaataccatcaccacccacgtgcgcggcaccctcggctacctggacccgcactactacgtctcccagcagctcacccacaagagcgacctctacagcttcggcatcatcctgctcgagctcatctccggccgcccgcccatcctgctcacgcccggcgccggtgccatggccagcctcgggccctgggccaagtcgcactacgagagcggcgacatcgaggccatcgtggacccgtcgctgcgcggccgctaccgcgacgtgcactcggtgtggaaggtggccgagacggcggtgcggtgcatcgacgccgatccccgggggcgcccgtccatgcccgaggtggtcaaggacatccaggaggccatcgcgctggagatgccgtcctcggagtcggagaggcccgccgccagcttcttctctccgggggcgggggcagccggtgcgcgctcctcggcgacggtgcggtcgcacgacctcgtcatggacaacctcatgtacgactccagcttctgcgattccctcaacctgccccgcacgcccagatagagacatgctcgatcgtctctactcctatttttctgtttaattacttcatcacgcgtaaattacgcggctggtattatctttttataggaggctggtattgtttttcacgcttacatttgctatatcatatttatttctatctacagatattctctt

SEQ ID NO: 52883 - DNA, 1144 bp, Oryza sativa
  Clone ID: PAT_MRT4530_55136C.1
atgagtagagtgtccactagttggggttttgtttattctagggtgaacaaggccgaggggaggggcgcgcggaccgggtccacgggagtggggcccacgcagcagcctcacggtccacggtggaccgggtgcacgcggcttacgccggccggcgccgtgggtcccacgcgtcagccgtacccgcgggcgcgggcggctgacggccgggccccacatggcagccgcggggcgcgcccgaaggctgcctcgccggcacagccgacgggaggcgacgcgcccgcgccccgatggtcgccgccggcgaccaccggcgcggcggagcggcgcccgagagaggggagggaagggggaagcgaaacggcggtccacggctcaccccgggtcgacggcgacaacggaaacggcgaccggagcggagagaggcggcggcgcggctcgggtcgacgaggacggcggcgttccggcggtcggcgggcgaaacggaggggtggacgaggtcggcgaggtcgcggcgaacccgaagaaggcgacgccgaaacgggagagggtcggggcgacgacggcggcggaccggagctcggcggcgacggcggagagagagaacgacggcgcgagctcgattccgacggggagagagagcggcgagggtcggaaacggcggagggaggcacggggagcgtttatatagggttgggagggggagagagcggccggatgagggggaatcggccgcggaagatccggccgccattgatgcgccggcgaagtttgggggagagtttccaaacgaatccgagggagagagagagggaaaagtggggggaaagggagagggaatcacggggagtgatttccccctctttattgcgcgcgggggcggcgggatgcggcggaatccgcggcggcggcggcgctagggcacgggcgaggcggcgggtgcggcgcgaggtaggggatgacgggtgggccccacccgtcagcgagggtggcgggcgggcccgcccgtcagcggcgcgcgcgcgggggaaggccggatgggccgcgggggagaggagagagagggagggagctgggccgagccggcccaagaaggggagggggggaaaaaagactttttagggtttttctttttataaaacctttt

SEQ ID NO: 52884 - DNA, 749 bp, Oryza sativa
  Clone ID: PAT_MRT4530_55137C.1
tagcgttaacacatgttttatagttgcaaagtgtgctttctttttatgtgttgttattgcttctttataggcttgtagctttgcttgtgtgcttcgcgtagcttctgtcgttccggaggttccagaagcgtggttcgcggtcgtcgccgaaggttcggaaggccgttctccctctcttcctctttcaaagcccctaaaacctgtttttcggtggggtttgggtgcatgccagttgtggaaagtagcaccccggccactataaggatgaagctcgggcctctgttgcaaagcactaccgtacttccacatgtctagtgggtaaggcttagtttgtggctcagtctggttataaacaaaagtacacggatggagatggacgaagtcgggggtcgatggacatctctagggaaaatgaaggctacacgagctacggcccggtagtcgagatgtcatggcatagggctggtgtcctgctgctaggggctcagtcctgcctacctgtcctggaggttccggccgtaggtggggttgggtcggtactcttgtctatggctaggatgggttggaaactatgtcacgtcttccgtccgtataccgtggtggtatgtggcacgtggttacacgtgaggaagatgtgtgttgtggcacttgtgggtgtgtcttgttgagtacggtggttgtactcagtcttgcttaatttttttccaaaccgagaagaggagttcctggaagatgaaggctttggtgtc

SEQ ID NO: 52885 - DNA, 580 bp, Oryza sativa
  unsure (1)..(580): unsure at all n locations
  Clone ID: PAT_MRT4530_55138C.1
cctacttgtttgaaatcggtatcttcggacgagttagtaagcacgatggattgataggatatgaacaccaaaaacgttgaaatctttctctctctctctctctctcgaaaaaaaaaaaaaacaggttgaaattgacaattgtgagtgcggagtaaatgtgtgggtaaatcacctgaacgatgcatccgccgagcccgatgccctcgaagaactgatgaaacgtcagcgccggcacgagcggccgcaccgtgctcgggaagtcggaggcgcccagcgacatcccgatgatgagcgagtgcaccaccactcccagctccagnncctccaccatcaaggacgcacaagcaaaatcgattaagaaaataagaacagaaattttgattgaattttcttaatttggttgcgtttttttgttttcgcagctctgtttcttgaatggcgcggtggcgggagatgtntatgacatacctgagaaatgaccggtggcggacgaagtctcctcnccggggggagcgacnganatgacggacatgccgtgggcgtggncgtgggtgtgctcctccgaaggctccangtcctc

SEQ ID NO: 52886 - DNA, 475 bp, Oryza sativa
  Clone ID: PAT_MRT4530_55139C.1
ctcccatcctcttgctggtcattgtgggctcatggcgccgccagaatgcccgtggcggtggacgtctcgcggtggctaggcgaccgccccggcctccgccgctcagcgtggtccgtccccgacgccgcgcacctcatcgcagccgccgatagggagggatgacgttcttggcggagctcgtcgtcgtcggaggcgagagggagctcgttcggttttccccgcccgtcgtcggcctccttctcccgcctcctgggcggctgccgacgcctcctctccatcgcagggacgccaccaccttctctcgcgtcgtcgtcgccgctgccccggccgccgccgctgcgtcaccggctgccgacgcctcctctccatccgcctgccagccggcccagtccagagagaaggctgatagagagagggagagagagagaggaggaaaggagagaaagagagtggccggcctgctgacgtggcacac

SEQ ID NO: 52887 - DNA, 519 bp, Oryza sativa
  Clone ID: PAT_MRT4530_5513C.1
atgaaggaaatcgcggtgggtcggcgctggaagccggcggcgcggggaggcaggaaggcagtgtcctgctccaccaacaccgacgctcgcgaggtgctcttcctttccccgccgaggacgacgcgtctccatctctgcgtctacttccgcttcaccgcgcatcgccgggttagggagggtgatgtcagcggcggcagcgtacttgttgcggtggcaggtgttcgtctgcagcgccctcatcatgttgccaacggccgcggcggcggcgctgctcctgcggctgcgcagggcggccgcggcgccttcgccctcgccgccgccaaggccagtggtggacggagtgatgatgcgatgcgaggctggtggcagatgatgtggacggcgtcggcactccttggctcgggggatggcggccgtggtgggaggggggaagatgacggcgctcctccctgtggatggtggccgcggcgcaaggagacgacgatgacgctcctcccatgggcgacgatgataaggtag

SEQ ID NO: 52888 - DNA, 3303 bp, Oryza sativa
  Clone ID: PAT_MRT4530_55140C.1
atggatgaagtcgggcgtcgatggacattctccagggcaaatgaaggctacacgagctgcggcccgatgtttaacagagaaaaaggaaagaatgtcagcgggtatgccccaagtaactcaagttttcaactcaatccaccactggcctcaagagagttaacaagggcacacccttggtccattccaagcacgctgcttagttcacagctaccattggttggaagtcaagaccaaaatcagtatgtgtttgatcgagcatttgccacccaggtcaatgagcttccaatgccaggagaggatgtccccttttgtcatgattgtagagagcaaggacactatgccctgaattgtccatgggtatatgccaaagaagccccttcctttggtttaacagggcaggcatcgctaaaccagcctcctcacaccaagtcaagcttgcagcctagtgtgcaaagtagagagctcaacggagagaacccattgaatcccgggaaatgctttccccctagcctctcgtaccacgtggggtcgcatactaagcaagccaaaggcaagaagagtaagaatcagaagagaaaagcaccgatgcgaactgaagaagaagtacgtaagatgactattaccagcaccgaatggcctccagctgggataactattcctagacgtcaaagaggaaatactttccgaggtgcacgacagttgacccagcacctcctaagccatgacggcagagtatctgatagtgaagggtcagatcaagtctcctcggattatgaagatgagtctctccgacatctcggcgaggaagagatggaatcaaaagcatgcccccgttgtggggaaattggacacattgctagcatgtgtctcacactctgcactcattgtgaagaagaccatccaccaggggagtgtctcacccgcaaggtcacatgttttctgtgcgaaggtacaaaccatgtgcccaaggattgccaactcagtgtgttgttgaccaagaccgtagaaatccaacgaacaaccctacgattgtctcatcagctagtcagctccaacagcaacatcgacgatatcatccacagcaccaatgctcctcctgctgcacctgactctgcagtaaatcatagcgataataccttcagcaccaaccattctctgcaccgacagcctcagcaaagaattgtcgtcgatggaagaagttgtgtctctccccgaccaggcaaagaagtaggtcgaaaggtgattgataagagaaatttgtatgaggttgactccaaagatacgagttataagaagttctggaactgaagccccatcttccaatgccgcatcccagtcgaagtcagctatcttcttgctagcctcctcgaatctcggggacgagattcttgtaaggggggtggatttgtcacgtcctgataaattcatcccgaaataaaaatcattccctaaaactccccgccgtcgtcccctctctcccgtgccgccggccgtcttcagccgcccctgccgccgcgttagcacgccggccggccgtgccgtcgcctcctccagcgtcgcagccgcctcctcttcgccggcctgcccctctgtttcccgcgaagacctccggccgtgcctcccccgccggcccccgtggcgttgccgcccctgttccgcctccggccgcctctgccgcgtcccctgtgcgccggccgacgtcgcccccccctctcccggccccggcccgccctcctcttcccccggccccgccccggcgtcgcccgtctttcgtcggctcgccgttgcgcgccccgcctctccctcggtctcgtcggccccccctccggccgccccttttgccgtgcccgtgcgccggccgcccctccgcgctccatcgtcgtcgtctccgttcatcctcgttgacgactcctccggtcggtcgttagtcctcgccggctcgtcgtctcgctgcgccgccaccctcgtcgtcatcgtaccggcgtgttccgcgccgtcctcgtctctgtgcagctgctgccgtctgccctcatcacctcctcgccggttcctgtcgtcgtcctctcgtcattcctggttgtcgtggcgttcgtccctccgtcaagccgttctcgtccgtcgtccgcgtccgtcaagtgtgccgctgcagccccgtcgtcgtcttcgtccttgcctccgcgtcgccaagcgttgcgccggccgcgtctcgctcgtgtaccggtgtcggtagtcgttcgcttgtgcgtgtggtgaccgtgttagtgtgcccgctcggtagccgcgtggtttccacgtgtgcagcccgtgtggtgtctagtggagtccgtttgtcggccactcgcctcggttgacacacgggatctgcttctgtcgaccagtggaccatctctgtgtactcggttttctttttatgtattgttattgcttctttataggcttgtagctttgcttgtgtgcttcgcgtagtcttcgtcgttccggaggttcccgaagcgtggtttgcggtcgtcgccgaaggttcggaaggccgttatctctctccccctctattcaaaacccccaaaatggttttaggctgggctcgaggtgcgtggttgggttttgttagtcgtacctcgagtactataaggattaagctcgggcctctgttgcaaagcactaccgtacttccacatgtctagtgggtaaggcttagtttgtggcttagtctggttataaacaaaagtacacggatggagatggacgaagtcgggggtcgatggacatctctaggacaaatgaaggctacacgagctgtggcccggtagtcgagatgtcatggcacagggctggtgtcctgctgctaggggctcggtcctacctacctgtctcggaggttccggccgtaggcggggctgggtcggtactcttgtctatggctaggatgggttcggaactatgtcacgtctttcgtccgtataccgtggtggtatgtggcacgtggttacatgtgaggaagatgtgtcttgtggcacttgtgggtgtgtcttgttgagtacggtggttgtactcagtcttgctcaatttttcccaaacccagaagaggagttcctggaagatgaaggcttcggtgtctagctcgtgcctgccgtcaagtgtctgtggtcgtcgccctagtcttccgctgtttctcgtttgtctttgtgtgtgctgggccttgcctcctgggacaaggattaatgcacgcacgtaaggaacgcccgttgggttatttccggtcgtgacaagttggtatttagcaagtgtgagttctggttgtccgaa

SEQ ID NO: 52889 - DNA, 1410 bp, Oryza sativa
  Clone ID: PAT_MRT4530_55141C.1
atgtcatggcacagggccggtgtcctgctgctagcggctcagtcctgcctacctgtcccgggggttccggccgtaggtggggttgggtcggtactcttgtctatggctaggatgggttggaaactatgtcacgtcttccgtctgtataccgtggtgatgtataacagagaaaaaggaaagaatgtcagcgggtatgcctcaagtaacttaagtttccaactcaatccaccactggcctcaagagagttaaccagggcacacccttggtccattccaagcatgctgcttagttcacagctaccattggttggaagtcaagaccaaaatcagtatgtgtttgatcgagcctttgccacccaggtcaatgagcttccaatgccagaagagcaggtccccttttgtcatgattgtagagagcaaggacactatgccctgaattgtccatgggtatatgtcaaagaagccccttcccttggtttagcagggcagacatcgctaaaccagcctcctcacaccaagtcaagcttgcagcctagtgtgcaaagtagagagctcaacggagagaatccattgaatcccgggaaatgctttcctcctagcctctcgtaccacgtggggtcacatactaagcaagccaaaggcaagaagagtaagaatcagaagagaaaagcaccgatgcgaactgaagaagaagtacgtaagatgactattaccagcaccgaatggcctccagcagggataactattcctagacgtcaaagaggaaatactttccgaggtgcacgacagttgacccagcacctcctaagtcatggtggcagagtatctgatagtgaagggtcagatcaagtctcctcggatgatgaagatgagtctccccgacatctcggcgaggaagagatggaatcaaaggcatgcacccgttgcggggaaattggacacgttgctagcatgtgtctcacactctgcactcattgtgaagaagaccatccaccaggggagtgtcccacccgcaaggtcacatgttttctgtgcgaaggtacaaaccatgtacccaaggattgccaactcagtgtgttgttgaccaagaccgcagaaatccaacgaacaaccctacgattgtctcatcagctagtcagctccaacagcaacatcgacgatatcatccccagcaccaatgctcctcctgctgcacctgactctgcaatgaatcatagcaataataccttcagcaccaaccattctctgcaccgacagcctcagcaaagaattgtcgtcgatggaagaagttgtgtctctccccgacctactccaggccgagcgaagggcaatcaacctcaggagggcgataccaagcagaagaccgttattcgcttcaaccagcaatcagaaggaagcttctcctgtgaa

SEQ ID NO: 52890 - DNA, 1409 bp, Oryza sativa
  Clone ID: PAT_MRT4530_55142C.1
atccccattgaatcctcttcaattgcccccaaattcccccttgattccctccccgtggtccctagccctctccccgccgccctcctctctctcccacgccgccggccgcctccagccgcctgtgccgcctcgaccgtgcgccggccggccgcgccgtcgcctcctccagcgtcgccgccacctcctccaccccggcctgccctccgtttcgcgcgccgcctctccctcctcaccggagcgccgtccggccgcgccgtcttctccctcggcctcgcagccacctcctctccctcggtcagccctccgtttcgcgggggaagcaccggagacgcgtcctcgccggcaaaacagtggcgttgccgccactgttccacctccggccgccactgtcgcgtttcccgtgcgccggccgacgtcgccaccacctccctcggcttccgcgacgccgccctcatccccggcatcacctcctcctcgcccgaagttcgccggaacgccggcgccgcgccaaccacccattcctcctcgtcggctagtcgccccgttgcaccaccaccttctccaacatcgcagcagcgcgttccacgccgtcccctcctccgctcagccgctgctgcctgccatcatcgtttcctcgtcaccgttcgtcctcgccgatcgacgtcccgtcggtcgcccggctcatcgtctcgcggcgccgcctccgtcatcatcatcgctgcggcgtgttccacgccgtcctcgtccccgtgcagccgctgccggctgtcctcgtcgcctcctcgccggtcccggtcgtcgtcgtcgtcgtcgtcctctcgtcgttcccggtcgtcgtggcgttcgtccctccgtcgagccgttctcgtccgtcgtccgcgttcgtcaagcgagccgctgcagccccgtcctcgcctccgtcctcggctccgcgtcgtcaagcctcgtgccggccgcgtctcgcctttgtccaaggatcgccgccgaagccgtcccctcgccgttcgtctccgttgtgcccgtctgtctccgccgcgcccgttcgtcgttggcgttcccacgcctcgtcgcgtggtggtaaggatccgtcctctcgcttccccgccctcgtcctttcggtgtcgccccgtacccgttgtgcggttgtcgacaccggtacccgtgtgccggtgtcggtagtcgttcgcttgtgctggagtccgtttgttggccactcgcctcggttgacacacggggtccgcttccgtcgacccgtggaccgtctctgtgtacccggtctaccgcggtcctttaggttgacatgtggggtttgtagctttgcttgtgtgcttcgcgtagcttctgtcgttccggaggttcccgaagcgtggttcgcggtcgtcgccgaaggttcggaagtccgttctctc

SEQ ID NO: 52891 - DNA, 220 bp, Oryza sativa
  Clone ID: PAT_MRT4530_55143C.1
gtttgactcacgttgtccaaggtcgagagtggtggaaatgagctcctgatcacgctctgtgtttgatctggacacgttcatttctcttggtagggcactggtgttctgcgtatcactgatggtgctttggtgcctgtcgactgtcctgagggtgtctgtgctaatactgatactgggctgggccaagccttgtggcgaggattattgaccttacttactg

SEQ ID NO: 52892 - DNA, 4405 bp, Oryza sativa
  Clone ID: PAT_MRT4530_55144C.1
atgccgcgctacaagcctgagtacttgtttggtgttgagggatttgtccaagagttgcgtacgatgtcctttgccataggatttgggactgcccctttttatgcccagattcctcatgatcgtcacgaagaaaagtgccgagtcaaagtcaccttgaacagtaatagtgaagatatcccctcagagatgttcgaagctggaggaagaaactacatccatgcatgtcaggaggtggcaaggatcgccataggggagctccgcgatagctacagtgatcagttggccgacactgagtatcgctaccatcctcgccaaccacagggaagtgaccgtggcagctaccttgagactgagggaattgagaatgatgctaccacaaggcatttggttgagatgctgtgggctatggatgaaacccgtgcggagactatgttagcagttcaagatcgtgaagatcggaatcgtggtaagatttgcaagctagaggacaaggtggatcgtttggagaaggaactagccgcgttgaagggagaagcaccaccgcagaaggccaggattcgtcttaccgcaaggaagagagctctatttgtccctcgctaccaattggcgccaaaggtccgtgtggtggaaaaagaagttaccccagccctagcggatcctccggtcgttaacatggtgctcactcgcagcaacgggaatggccccaacaacaacaataacaacaacaatggagagaatcccacacttgcccaagtcctggctcaacaggcacagcttatgaacatgatgatgcagcaactccagaaccagcagaaccagctcaaccaaggaaacaacaatgctccgccgccgcagaacaagttagcagaatttcttcgtctgcatgccatagagaagaagttggatttgctccagtgcactgatcaggagaaggtctcatttgcatcacaccagctgcatggcccagcctctgaatggtgggatcacttccgccttaataggactactgctgaacctatcacttggcttgagttcaccgctgctttccggaagacacatataccatcgggagtggtgtttctcaagaagaaggaattcaggtcgctcacccagggatctcgctctgtcaccgagtatctgcacgagttcaatcgtctggctcgttatgctccagaagatgttcgcaatgatgaagagcgccaggagaagttcttggaaggacttaatgatgagctttcttaccccctcatgactggagattatcctgatttccagaagttggtggataaggctattcgtcaggaggacaagtacaatcgcatggaacaaaagaaacgccggattgctcacttcaaggcacaacaggggaatacttcgacacagcaacaacctgccaagaaggagcaaggcagcaagcccgtagtgtgtttcaactgtggagacccaggacattatgctgacaagtgtccgaagccccgacgcgtgaaagttgtccctgcccagagcaactctaccgcaccagcatccaaggctcgtgtcaatcatgttgctgctgcagaagctaaagatgctccagatgtgattttgggtacgttctttgttaactcagttcctgcaacagtgcttttcgattttggtgctacacattcatttttatctatgagttttgcgggaaatcatgggatggaagtagaagatcttagatgtcctttgatggttagtaccccaagtaatcaagcactctctttgcaacgtagcccctcggtcagaatagaaattcaaggagtaccatttctggccaatcttattctgttagaatccaaagaccttgatgtcatcctagggatggactggttagccagatataaaggtgtgatagactgtgccaacagaaaagtaactctcaccagcaatgatggtcgagttgtaactgttcatgcattgtcttctgagtttttaaggtcaagtctgaaccaaatagctttggaagagattcccatagtacaggaatacccggacgtgttcccggacgatttacctggtatgccgcctaaaagagatattgaattcagaatagatctggtaccaggaacaactccgatccattagagaccttatagaatggcagccaatgaattagcagaagtcaagaggcaagtagatgatttggttcagaaaggatacattagaccaagttcgtctccatgggggagctcagttatttttgtggaaaaagaaagatcatacccagaggatgtgtgtggactatcgtgcactaaatgatgtgactatcaagaataagtacccgctacccagaattgatgatttgtttgatcagcttaaaggtgccaccgttttctccaaggtagatcttcgatcagggtatcaccagttgagaatcaaagaggaagatatacctaagacagcttttaccactaggtatgggttgtttgaatgtactgttatgtcttttggacttaccaatgcccctgctttcttcacgaatttgatgaataagtttcttggtcacgtcatctcagcaggaggagttgccgtcgatcctagtaatgtggaatccgtaaccaactggaaacaaccaaagacagtttcagagattcgcagtttcttaggcctcgcaggttattatcggaggtttatagagaatttttccaagattgctaagcccatgacacgactgcttcagaaagatgtgaagtacaagtggttagaagaatgtgagcagagttttcaagagttgaagaatcgcttaatatcagctcctattttgattttgcctgatccaaagaagggtttccaagtgtattgtgatgcatccaaacttgggttaggatgtgttctgatgcaagatgggaaggtggttgcctatgcatctcgtcagttacgtccgcatgagaagaactaccctactcatgatcttgagttagctgtagtggttcatgcgttgaaaatttggcgtcattatctttttggtactcgtacagagttatgcaaggaattagaaagattaaatttaggaattgtcagtagaggtttcgttgcagccttagaagcgaagcccactttaattgatcaagttagagaagcccaaattaatgatccggatattcaagaaattaagaagaatatgagaagaggaaaggctatcggtttcttggaagatgagcaaggaactgtatggttgggcgagagaatctgcgttcccgacaacaaagatttaaaagatgcaattctaaaagaagctcatgatactttatactccattcaccctggtagtaccaaaatgtaccaggatctcaaggaaaggttttggtgggcaagtatgaagcgtgaaatcgcagaatacgtagcagtatgtgatgtttgtcagcgagtcaaggcagaacatcagaaacccgccggtttgttgcagcctttgaagattcctgaatggaaatgggaggaaatcggtatggatttcatcactggtttacccagaacgtcatcaggccattactctatttgggtgatagtcgacagacttaccaaagtggctcatttcatcccagtaaagacaacttattctggaagtcggttggcggaattgtatatggcaaggattgtgtgtttgcatggcgtccctaagaaaatagtgtctgatcgaggcagtcagtttacttcaaatttttggaagaagcttcaggaagagatgggttctaagctgaactttagtactgcttatcatccgcagacagacggacaaaccgaaagttatcaagctagtcttcagatggctccgtacgaagcactgtatggtcggaagtgccgcactccgcttttgtgggatcaaacgggagcacgtcaggttttcgggactgatatcctgagggaagcagaagaaaagtctcgtcataagagttatgccgacaatcgccacagagatttgagttttgaagaaggagattatgtgtaccttcgtgtcacgcctcttcgaggagttcatcgttttcacaccaaaggaaaattggcaccgcgttttgtgggaccttataagattgtcagtagaagaggagaggttgcttatcagttggagttacctcaatctttggcaggagtccataatgtgttccatgtgtcgcaattgaagaagtgtttaagggtacctactgaagaagctaatcttgaacagatagaagttcaagaggatctgacttatattgagaaaccagtccgtatcttggaaatagatgagaggagaaccagaaatcgagttatccgtttttgcaaagtccaatggagtaatcactcggaagaagaatcaacttgggaacgggaagatgaattgaagtcagctcatccgcatctgttcgccagttcttccgaatctcgaggacgagattctgtttaa

SEQ ID NO: 52893 - DNA, 375 bp, Oryza sativa
  Clone ID: PAT_MRT4530_55145C.1
atgcggctagagaattcggccggccttctgctacgccgtccagctcgaccggagcgactgcattgccagatgcacgggcaagtcccatcggtattgacggagctcgtggctcctcaccgggagaccgcgcaggcccccctttgccggttcggccgggggcttaggcccacacctacctccactcccggcggagacaggcgcaacgtgggatcgtggctgtccgttgctgatgcgaccagtgtcagaccggtcattcttgtccaccacacctccggcttgagacgagtgcctagaggctttcgtcttgacgggacggggcaaggcgtgcgccagaccgccagtcgccacctaacccgcgatctgaccggtctgtga

SEQ ID NO: 52894 - DNA, 177 bp, Oryza sativa
  Clone ID: PAT_MRT4530_55146C.1
aataaacatcaacatacggcactggggaatatctgaaccagagcagccatacacactaccatttcagaggtgaacctacctccaatacattaagatacatagaggccatttacaacaaaacctacatcaatgcgcagcaccgtcattcaaatactcgtccacaaacagacaccccaa

SEQ ID NO: 52895 - DNA, 946 bp, Oryza sativa
  Clone ID: PAT_MRT4530_55147C.1
tcaaggatgatgtgacttgccttgctggctttcccaaacgtcggcttcaacctccacgtagagcggatctttcgaagctgcagcgtctgagggcgcggtcggtgagaggtggcgcacccacgccccgatggtcgccgccggcgaccaccggcgcggcggagcggcggccgagagaggggaagggaagggagaaaggaggcgacggtccacggctcaccccgaggcaacggcggctacggaggaggcggccggagcggagggaggcggtggcgcggctcgggtcgacggggacgacggcgctccggcggtcggcgaccgaaacggagaggtggacgaggtcggcgaggatgcggcgaagccgaaggaggcggcgccgaggatgcaaatccagatatgcataaacgagattcatggctttaagcttatctcttacgctccaggaatggatcagtcagaacatcaccgccggtttgctttcgccgccaccgactggtgttaccgcctgcacagctggcctattatgccactgttgttgagcgtctacgtcttcaccgaccggtcgcctcgtccgccgccgactggtgtttccgcctgcatggctggcctattatgccgccgttgttgggcgtctacatcctcaccgaccggctgcctcgtccgccgccgactagttaatgaagacattcctagcattcactcatctccaaatgaagctacacttgatatagctggtccaattacaaggagtagagctaaacaattggagaaggaaattcattctcaggtgaacgctaaccttatgcttaataatcagattacattgaatgaacctatgcttttgagtacttgtttcaatgttcttaggaatgatggagtgcacgaacaagcatgggatgatgatggattctgcccgccaaatatatgcaaggaacctggacgtgcatga

SEQ ID NO: 52896 - DNA, 227 bp, Oryza sativa
  Clone ID: PAT_MRT4530_55148C.1
gtccttttctagtttcactatatgtgttcttggttgtgtcataatttggatcaaagttatggcctgttatggaattaattatgaagctgtttgacagttttaaacaattaaacatatgcttttacatgaaagtgtaattttttaatgcttgtgataagccacttaactaaagctgtttgagcactttccactcgaataggtcatttcattcctatgctacaaatttc

SEQ ID NO: 52897 - DNA, 10067 bp, Oryza sativa
  Clone ID: PAT_MRT4530_55149C.1
atgccgcgctacaagcctgagtacttgtttggtgttgaaggatttgtccaggagttgcgtacgatgtcctttgccataggatttgggactgctcctttttatgcccagattcctcatgatcgtcacgaagagaagtgcggagtcaaagtcaccttgaacagtaatagtgaagatatcccctcagtgatgttcgaagctggaggaagaaactacatccatacatgtcaggaggtggcaaggatcgccataggagagctccgcgatcgctacagtgatcagttggccgacactgagtatcgctaccatccccgtcaaccacagggaagtgaccgtggcagctaccttaagactgaaggaattgagaatgatgctaccacaaggcatttggttgagatgctgtgggctatggatgaaagccgtgtggagactgtgttagcagctcaagatcgtgaagatcggaatcgtggtaagatttgcaagctagaagacaaagtggatcgtttggagaaggaactagccgcgttgaagggagaagcaccaccgcagaaggccagggttcgtcttaccgcaaggaagagagctctatttgtccatcgctaccaattggcgccaaagatggtgctcactcgcagcaacgggaatggcctcaacaacaacaacaacaataacaacaacaatggagagaatcccacacttgcccaagtcctggctcaacaggcacatcttatgaacatgatgatgcagcaactccagaaccagcagaaccagggaaataaccatgcacctccccagaacaagttagcagaatttcttcgtgtgaggccgcccactttctctagtaccactaatcctgttgaagctggactactgctgaacctatcacttggcttgaccgctgctttccggaagacgcatataccatcgggagtggtgtctctcaagaagaaggaattcaggtcgctcactcaggggtctcgctctgttacggagtatctgcacgagttcaatcgtctggctcgctatgctccagaagatgtacgcactgatgaagagcgccaggagaagttcttggaaggacttaatgatgagctttcttatccactcatgactggagattatcctgatttccagaagttagtggataaggctattcgccaggaggacaagtacaaccgcatggagcagaagaaacgccggattgctcacttcaagacacaacaggggaataatcagaggccgcgtcttactttaggaccccagtccatgccacagggaggttcttcgtccgttgttcgtccgcagcgtcagttcttcaacaacaatgctggcaacaacatccgcaatcaagctccacgccctgttgcagcttcgacacagcaacaacctgccaagaaggagcaaggcagcaatcccgtggtgtgtttcaactgtggagacccaggacattacgctgataagtgtccgaagccccgacgtgtgaaggttgtccctgcccagagcaactctaccgcaccagcatcaaaggcccgtgtcaatcatgttgctgctgcagaagctcaagatgctccagatgtgattttgggtacgtttcttgttaacttagttcctgcaacagtgcttttcgattctggtgctacacattcattcttatctatgagttttgcgggaaatcatgggatggaagtagaagatattagacgtcctttgttggttagtaccccaagtaatcaggcactctctttgcaacgtagcccctctgtcagaatagaaattcaaggagtaccatttctggccaatcttatcttgttagaatccaaagaccttgatgtcatcctagggatggactggttagccagatataaagacgatttacctggtatgccgcccaaaagggatatagagttcagaatagatttggtaccaggaacaactccgatccataagagaccttatagaatggcagccaatgagttggcagaagtcaaaaggcaagtagacaatttgcttcagaaaggatacatcagaccgagttcatctccatggggagctccggttatttttgtggaaaagaaagatcatacccagaggatgtgtgtggactatcgtgcactaaatgatgtgactatcaagaataagtatccgctgccccgaattgatgatttgtttgatcagcttaaaggtgccaccgttttctccaagatagatcttcgatcagggtatcaccagttgagaattaaagaggaagatatacctaagacggcttttaccactaggtatggattgttcgaatgtactgttatgtcttttggacttaccaatgcccccgctttcttcatgaacttgatgaataaggtgtttatggaatacctagacaagttcgtggtggtctttattgatgacattcttatctactcccgaaccagagaagagcatgaggaacatcttcgccttgcactagagaagctacgagaacatcaactgtatgctaagtttatttcagagattcgcagtttcctaggcctcgcaggatattatcggaggtttatagagaatttttccaagattgctaagcccatgacacggctgcttcagaaagatgtgaagtacaagtggtcagaagaatgtgagcagagttttcaagaattgaagaatcgcttaatatcagctcctattttgattttacctgatccaaagaagggtttccaagtgtattgcgatgcatccaaacttgggttaggttgcgttctgatgcaagatgggaaggtggttgcctatgcatctcatcagttacgtccgcatgagaagaactaccctactcatgatcttgagttagctgcagtagttcatgcattgaaaatttggcgtcattatcttttcggtactcgtacggagttgccattggaattatgcaaggaatttgaaagattaaatttgggaattgtcagtagaggttttgttgcagccttagaagcgaagcccactctaattgatcaagttagagaagcccaaattaatgattctgatattcaagaaatcaagaagaatatgagaagaggaaaagctatcggtttcttggaggatgagcaaggaactgtatggttgggtgagagaatctgcgtccccgacaacaaagatttaaaagatgcaattctgaaagaagctcatgatactttatactccattcaccctggtagtaccaaaatgtaccaggatctcaaggaaagattttggtgggcaagtatgaagcgtgaaatcgcagaatacgtagcagtatgtgatgtttgtcagcgagtcaaggcagaacatcagaaacccgccggtttgctgcagcctttgaagattcctgaatggaaatgggaggaaatcggtatggatttcatcactggtctacccagaatgtcatcaggccatgactctatttgggtgatagtcgacagacttaccaaagtggctcatttcatcccagtaaagacaacttattccggaagtcggttggcggaattgtatatggcaaggattgtgtgtttgcatggcgtccctaaaaaaatagtgtctgatcgaggcagtcagtttacttcaaatttttggaagaagcttcaagaagagatgggttctaagctgaactttagtactgcttatcatccacaggcagacggacaaaccgaaagggtgaatcagattttggaagatatgttgagagcttgtgctttagacttcggtggaagttgggataagaatctaccttatgcagaactttcgtataacaacagttatcaagctagtcttcagatggctccttacgaagcactgtatggtcggaagtgccgcactccgcttttgtgggatcaaaagggagaacgtcaggttttcgggactgatatcctaagggaagcagaagagaaggttaagatcattccagaaagattgcgtgtggcccagtctcgtcataagagttatgccgacaatcgccgcagagatttgagttttgaagaaggagattatgtgtaccttcgtgtcacgcctgttcgaggagttcatcgtgttcacaccaaaggaaaattggcaccgcgttttgtgggaccttataagattgtcagtagaagaggagaggttgcttatcagttagagttacctcaatctttggccggagtccctaatgtgtgtccatggtgtccgcaattgaaaaagtgtttaagggtacctaccgaagaagcctaatcttgaccagatagaagtcccagaggatctgacctatgttgagaaaccaatccgtattttggaaatagatgagagaagaacccgaaatcgagttatccgtttttgccaagtccaatggagtaatcactccgaagaagaatcaacttgggaacgagaagatgaattgaattctggattcgaggtcgaatcggatcgatctctttcctccgaaccccaatgtttctttcgcgtcgccggtcgccgtgggccttcgccgctgcctccttgcccctataaaaggatccccggtgtcgccgctacccgccaccaccattgtcttcgtctctcgccgtcggaagcgccctagcgccccgtgcttcgccgtcgttccggtcgtcgtcatcgctcggggaggtcgccatcgtggtcgccaagtcgccgccgtccttgtccgcccctttgccgtcgctgtagaccgccggagcaccgccgttgttgtcaagccgaaggtctccgccgcttcttttttgtcgccgccgccgtccgttcatcttccgccgacgttttggtcatcgcgccgtcgttcgccggcgagcaagcgcgcccgaaccggtgaaccccccaaccgccgccggaggtgacgttcccgctgacgtcatgggggccgtctgccattccgacgtttccggagagtccgttttcgcaggagaagaatttgaatagttccaaggccagcaaggcaactcctggtttggaatggtatattcctggtttggagatagatctgtacagccgggtatggttgttcaggatggttgggcctgagcagcatgatgccgcgctacaagcctgagtacttgtttggtgttgagggatttgtccaggagttgcgtacgatgtcctttgccataggatttgggactgcccctttttatgcccagattcctcatgatcgtcacgaagagaagtgccgagtcaaagtcaccttgaacagtaatagtgaagatatctcctcagtgatgttcgaagctggaggaggaaactacatccatgcatgtcaggaggtggcaaggatcgccataggagagcttcgcgatcgctacagtgatcagttggccgacactgagtatcgctaccatcctcgccaaccacagggaagtgaccgtggcagctaccttgagactgagggaattgagaatgatgctaccacaaggcatttggttgagatgctgtgggctatggataaaactcgtgcggagactgtgttagcggctcaagatcgtgaagaccggaatcgtggtaagatttgcaagttagaggacaaagtggatcgtttggagaaggaactagccgcattgaagggagaagcaccaccgcagaaggccaggattcgtcttaccgcaaggaagagagctctatttgtccctcgctaccaattagcgctaaagatggtgctcactcgcagcaacgggaatggccccaacaacaacaataacaacaacaacaatggagagaatcccacacttgcccaagtcctggctcaacaggcacagcttatgaacatgatgatgcagcaactccagaaccagcagaaccagggaaataaccatgcacctccccagaacaagttagcagaatttcttcgtgtgaggccgcccactttctctagcaccactaatcatgttgaagctggtgattggctgcatgccatagaaaagaagttggatttgcttcagtgcactgattaggagaaggtctcatttgcatcacaccagctgcatggccctgcctctgaatggtgggatcacttccgcctgaacaggactactgctgaacctatcacttggcttgaattcaccgctgctttccggaagacgcatataccatcgggagtggtgtctctcaagaagaaggaattcaggtcgctcactcaggggtctcgctctgttactgagtatctgcacgagttcaatcgtctggctcgttatgctccggaagatgtgcgcactgatgaagagcgctaggagaggttcttggaaggacttaatgatgagctttcttacccactcatgactggggattatcatgatttccagaagttagtggataaggctattcgccaggaggacaagtacaatcgcatggagcagaagaaacgccggattgctcacttcaaggcacaacaggggaatagtcagaggccgcgtcttactttaggaccccagtccatgccacagggagtttcttcgtctgttgttcgtctgcagcgtcagttcttcaacaacaatgctggcaacaacatccgcaatcaagctccacgccctgttgcagcttcgacacagcaacagcctgccaagaaggagcaaggcagcaagcccggggtgtgcttcaactgtggagacccaggacattacgctgacaagtgtccgaagccccgacgcgtgaaggttgtccctgcccagagcaactctaccgcaccagcatcaaaggctcgtgtcaatcatgttgctgctgcagaagctcaaggtgctccagatgtgattttgggtacgttccttgttaacttagttcctgcaacattgcttttcgattctggtgctatacattcattcttatctatgagttttgcgggaaatcatgggatggaagtagaagatcttagacgtcctttgatggttagtaccccaagtaatcaagcactctctttgcaacatagcccctctgtcaggatagaaattcaaggagtaccatttctggccaatcttatcctgttagaatccaaagaccttgatgtcatcctagggatggactggttagccagatataaaggtgtgatagactgtgccaacagaaaagtaattctcaccaacaatgatggtcgagttgtaactgttcatgcattgtcttctgagtctttaaggtcaagtctgaaccaaataactttgaaagagattcctatagtccgggagtatcccgatgtgttcccagacgatttacctggtatgccgtctaaaagggatatagagttcagaatagatttggtaccaggaacaactccgatccataagagaccttatagaatggcagccaatgagttggtagaagtcaagaggcaagtagacgatttgcttcagaaaggatacatcagaccgagttcatctccatggagagctccggttatttttgtggaaaagaaagatcatacccagaggatgtgtgtggactatcgtgcactaaatgatgtgactatcaagaataagtatccgctgcccagaattgatgatttgtttgatcagcttaaaggtgccaccgttttctccaagatagatcttcgatcagggtatcaccagttgagaatcaaagaggaagatatacctaagacagcttttaccactaggtatgggttgttcgaatgtactgttatgtcttttggacttaccaatgcccccgctttcttcatgaacttgatgaataaggtgtttatggaatacctagacaagttcatggtggtctttattgatgacattcttatctactcccgaaccaaagaagagcatgaagaacatcttcgccttgcactagagaagctacgagaacatcaactgtatgccaagtttagcaagtgtgaattttggttgtctgaagtgaatttccttggtcacgtcatctcagcaggaggagttgccgtcgatcctagtaatgtggaatccgtaaccaactggaaacaaccaaagacagtttcagagattcacagtttcctaggcctcgcaggatattatcggaggtttatagagaatttttccaagattgctaagcccatgacacgactgcttcagaaagatgtgaagtacaagtggtcagaagaatgtgagcagagttttcaagagttgaagaatcgcttaatatcagctcctattttgattttacctgatccaaagaagggtttccaagtgtattgcgatgcatccaaacttgggttaggttgtgttctgatgcaagatgggaaggtggttgcctatgcatctcgtcagttacgtccgcatgagaagaactaccctactcatgatcttgagttagctgcagtggttcatgcgttgaaaatttggcgtcattatcttttcggtactcgtacagaggtgtacaccgatcacaagagtttaaagtatatctttactcagccggatctgaacatgagacaacggagatggttagaattaattaaggattatgacatgggaatttattatcacccgggaaaggctaatgttgtagcagacgctcttagcaggaaaggctattgcaatgctacggaaggacgacagttgccattagaattatgcaaggaatttgaaagattaaatttgggaatggtcagtagaggtttcgttgcagccttagaagcaaagcccactctaattgatgaagttagagaagcccaaattaatgatcctgatattcaagaaatcaagaagaatatgagaagaggaaaagctatcggtttcttggaggatgagcaaggaacggtatggttgggtgagagaatctgcgtccccgacaacaaagatttaaaagatgcaattctgaaagaagctcatgatactttatactccattcaccctggtagtaccaaaatgtaccaggatctcaaggaaagattttggtgggcaagtatgaagcgtgaaatcgcagaatacgtagcagtatgtgatgtttgtcagcgagtcaaggcagaacatcagaaacccgctggtttgctacagcctttgaagattcctgaatggaagtgggaggaaatcggtatggatttcatcactggtctacccagaacgtcatcaggccatgactctatttgggtgatagtcgacagacttaccaaagtggctcatttcatcccagtaaagacaacctattctggaagtcggttggcggaattgtatatggcaaggattgtgtgtttgcatggcgtccctaagaaaatagtatctgatcgaggcagtcagtttacttcaaagttttggaagaagcttcaggaagagatgggttctaagctgaactttagtactgcttatcatccgcagacagacggacaaaccgaaagggtgaatcagattttggaagacatgttgagagcttgtgctttagacttcggtggaagttgggataagaatctaccttatgcagaattttcgtacaacaacagttatcaagctagtcttcagatggctccttacgaagcactgtatggtcgtaagtgccgcactccgcttttgtgggatcaaacgggagaacgtcaggtcttcgggacggatatcctgagggaagcagaagaaaaggtgaaaatcattcaagaaagattgcgtgtggcccagtctcgtcataagagttatgccgacaatcgtcgtagagaactaagttttgacgaaggagattatgtgtaccttcgtgtcacgcctcttcgaggagttcatcgttttcacaccaaaggaaaattggcaccgcattttgtgggaccttataagattgtcagtagaagaggagaggttgcttatcagttggagttaccttaatctttggcaggagtccataatgtgttccatgtgtcgcaattgaaaaagtgtttaagggtacctaccgaagaaaccaatcttgaacagatagaagtccaagaggatctgacctatcttgagaaaccaatccgtatcttggaaatagatgagagaagaaccagaaatcgagttatccgtttttgcaaagtccaatggagtaatcactcggaagaagaatcaacttgggaacgagaagatgaattgaagtcagctcatccgcatctgttcgccagtttttctgaatctcgaggacgagattctgtt

SEQ ID NO: 52898 - DNA, 275 bp, Oryza sativa
  Clone ID: PAT_MRT4530_5514C.1
cccacgcgtgcgggatcatcgagcgctaaactaaaaatatatgtatgctgccagccgcatgatgagagaacgatcatatacatgcatcgatgagagtagagagagagagagcacataccatggcggccagcattaatgaggtgaggcacagaacagaccagacgaatgtgaacggcgactacaagatgctgcagactggctacatcaacgataccctggtcgaggccagcacggtgtgctgactgctgatgcgcgagatctctcggagcaggcta

SEQ ID NO: 52899 - DNA, 1793 bp, Oryza sativa
  unsure (1)..(1793): unsure at all n locations
  Clone ID: PAT_MRT4530_55150C.1
cctaggtcgacggcgacgacgaaaaaggctgtcggagcggaggaaggcggcggcgcggctcgggtcgtcggggtcgacggcggtccggcggtccgcgggctcagcgaggggttggacggggtcgacggcagtgcggcgaagccggaggaggcgacgccggggcgggagacggtccggcgagcggagaaggccggccggaggtcgtatgcgacttgcctccctacgccgaactcattatgctcggtgatggaactanggccaccagatacagaaataatctggcagaccccttcaacaaaggaaccgatctcgggtcggaaggtaaagtcgncagagacaacttggggcgcggtgagtgtcatatcagacacagcgccagaggctttcgccgtcgccagttgcaatgcttggtccgaagcaacagcgttggccgaagtgctgcccccggttggcgcgtccgcatcactagcaggcagtggagacaggagcctcttttgtggaggtgggtgtcgtggccccgacgaagttggcatcccatccgaagatgtttcgctgtccgagaagccaccggccacctgcaccacccctttcttcttcctttgggcggcggcaccggcctggcttctcttggccacgtcgcgcttccacttttttgacgtcccaacgtcgtgatcgactctcgcagggttcgcccggctggctagcgtcccgtcgtagacgcgattcgcctgtccattggattcttcaccctctgcggtagtaatcccccaatctcgcgcgaggggagaaatctgtagcatgcaaaatttttcgcagaggtcgcgggtgctcaaccgatgcgcaaccttgcgaagaaggatgagccgtgcctcaagcacgccatcaacatccacgttcggcttgatgatcatggcgatagaaagacgccggaagcgaagccacttcgccttgtcatcttcggcggaatcgtctttggagaagtaggggttggcgatgtagaaccatttttgcatcgaattgcggtcccactttgccatcgacacaaggacaggccatgcatccgagcgctttggccgaagcatgaagttacactgccaaaaacagtcttctttggccccgccagagtgttgtcgtccttggtccccacgcacaccatgaacagggtggcgaagagctccgcgaaagttgtcacatggaaggcggagcccggcggtgaaaaagccggcgaacaccaccgttcgcccgtccccggtcgaagggacaacgtcttcgcccgcacaggacacctggcgctccgcaaggacgctggagaggacaagctcggccaggtcggcctccttgacaagaaacttgccaaggtagcacgaccaaccatcgctgaggctgccagggtcttcgccagacgatccggccttagtaggcttgcgaggagccatcgaatccgcgatgaaagaggtggcgaagacaggaggcgaaaagctagagcaggaatgatagggctgaaggcacgagagtctgacagcggtaaaaacgagaagtggggaggagtgatagcgacctgggatgagggttgtatagcccgatcgcacgacggttcgactcccacccaaccacagcctgacacatgtcaaatggtagacggaacggtaaattcccatcgagccgggccacacagtggcaggctagaaccaaggaaaaccaagaggcccacggagcccgatactgttcactttcaatttcaaaccacctatccatttcgccataacttgggcgaaataagaaaagattactaa

SEQ ID NO: 52900 - DNA, 146 bp, Oryza sativa
  unsure (1)..(146): unsure at all n locations
  Clone ID: PAT_MRT4530_55151C.1
tggcgcnncnttggatggcttgccgatcgcacaggagctcatcatgcattccacactgtcgcgcccgccagcataccttaacggcgcgttctggaccgtcagatattcaatgtttcgtcgtaccgaccgctgcttcgtggcctatg

SEQ ID NO: 52901 - DNA, 141 bp, Oryza sativa
  Clone ID: PAT_MRT4530_55152C.1
atggcggccacggtggaccagcgtgggaggtggcaaaatccgagacctggcgaaattcgacctgaactcggactcagcggtctgactggccacgagcctctggggtgaccggtcccacgaagaaaaccagttggtgtgtaa

SEQ ID NO: 52902 - DNA, 508 bp, Oryza sativa
  Clone ID: PAT_MRT4530_55153C.1
gtcccacatatcatacacatattgcgtcttggagtccgtgctacagctggctacagatctgtagctcgctgctcttctttctttcttatccgacaaggactagtatctacacatgggtataaatatgtgcacatagggtcactataatctatcaatctctagatcaatacaactactcttggcgcatcgccaccctctttcccgaggtctttaattatcatccagcggaattaggcacccgatgtggggctgcatcggttcagttcgatatccggcgaaggggtaagtcctacgtttcgccggccctggtgaatctattggccacgttggtgttgttcaaggctgcatcgcttcgatctcttggatcgctcttgtttggttgatatatttgcctacctgatatctcaattctatctctaattgcattgtgtttagagacacatcggtttagttggaactgtcttacggctggtatcggtatcggctggaattacttcatcggcttgtc

SEQ ID NO: 52903 - DNA, 183 bp, Oryza sativa
  Clone ID: PAT_MRT4530_55154C.1
atgaagatcgaagggttcacccccaagctcacaaccccggggagaagccattgggcgaagctgggcgacgaaggccaaagggttcgccaccaagctcaccatctggccaagtcgccactaagggcgaaggccataaggcgaagcaagaggccttcgcctgaactagaagatgccttcagctaa

SEQ ID NO: 52904 - DNA, 3627 bp, Oryza sativa
  Clone ID: PAT_MRT4530_55155C.1
atgaatgctctagtgatcttgctatccgcagcgttggttttgtattcccatgccgaaggataggagggttgcatcaaccccgacaacacaaacgagacggcgaggcaggcaatcgcgccggactccttcagccccgtcgtttccgaagaattagtgtccagcgacgatgagatagatttctccgtggagcccgagttctacgatcccgacctgggtgatgtcggtcagcggtgggtgagcaagcagaggaaagggaggacttctgacgccgtgctcagctgccccgccgtgcttgcactcaccttgtgcctggattgccagaggcttgaggacgtatgtaaatcagtacagtgcaatgttcgttcgcaacttcaagggacaagactaaacagaatctacgggaggggctcgctagaagggggcatcccaccggcgttggcgataggatgtagcaagctcgagagccttagcctggactccaaccacctccgtggtgagatcccgggtgagatcgccgcgttgaggaatctagcgtacttgaatcttcgtgcaaataatctgtcgggagagatcccgccatccctgggtaacttgtcatcactttacttcttgaatctagggttcaacatgctatttggtgagattccagcttccttgggcaatctttcccagctcaatgctcttggtattcaacataaccaattatctggtggcataccttcttctcttggtcacttgaacaaccttaccagtcttctcctacaagctaacggtctgatagggtccattcctcctaatatttgtaacatatcattcctaaaacatttttctgtagaaaacaatgagctcagtgggatgctaccaccgaacgtgttcaacacacttcctatgctcgagactttcgatgcgggggagaatatgtttgatggccatatcccatcatcactggttaatgcctccaaactctctagatttcagatcgcggaaaaccacttcagtggtgtaattcctccagagttaggagggttacagggtctcaagtggtttattctcactgaaaatgatcttgaagccaaagaatctaacgactggaagtttatgaaagcattaacaaattgctcccaattagaagttttggaattggaagccaataagtttagtggaactcttccatccgtaatttccaacttatccgcatcactaacaatcctcactctagctagcaacaaaattgtagggaacatgcctagagaaattggcaaactaatcaatttaggtgcacttgtcgcacataacaattttctgactggaagtccaccgtcatcattaggtatgcttcaaaacctaagaattttgtggctagataacaattactttagtgggccattccctcgtgttatatgcaatttaactcatatggactctttagaccttggaaggaataattttagtggtagcatcccaataacagtgggaaacatggtttcactgtcgagtctacgtttctcgtttaataactttataggtaccatcccaactagtttattcaacatcacaacactctcaatatatttggatatctcctacaatcacttagacgggtcaataccacctgaagttgggaatctaccgaatcttgtataccttgatgcccggtataatcaattatcaggggaaattcctattactttcgaaaaatgccagcttctccagattttgtatctgcaaaacaattcatttattggtaatatcccatcatcctttagtgagatgaagggtttagaaattctcgacctctctagtaacaatttttcaggccaaataccaaagttctttggacacttcctcacactctatgatttaaacctctcttacaataactttgacggtgaagtgccagtgtttggtgtttttgcaaatgctactggcatttcggtccaagggaacaacaagctttgtgggggcattccagatcttcacttgcctacatgttctcttaagatttccaagagaaggcatagagttccagggttggcgattgttgttccccttgttgctacaacaatatgtatcctttcattgctccttttcttccatgcttggtataagaacagattaacaaaaagtccttcaacaatgtccatgcgagcccatcaacttgtctcctaccagcagttggtacatgcaacagatggcttctcgacgaccaatttgttgggtactgggagctatggatcagtctatagaggtaaattgttcgatgaaactggtgagaatgaaaatcttatcgctgtaaaagtattgaaacttcagacacctggggctcttaagagtttcacggcggaatgtgaagcgatgaagaacttaagacaccggaaccttgttaagatagttacagcatgctcaagcatggacttcaatggaaacgacttcaaagcaattgtgttcgacttcatgcccaatggttgcctagaagagtggctccatcctcagatagataaccaattggaagagaggcacttgaatcttgtccacagagtaggtatactctttgatgtggcttgtgcattggattatcttcatttccatggcactacacctgttgtgcactgcgatcttaaaccaagtaatgtgcttcttgatgctgatatggtagcacatgttggagattttgggctagccaagatactgtcttctcaaccctcaacgagctcgatgggatttagagggacaattggttatgctccacctgaatatggtgctggaaatatggtttcaactcacggagacatctatagctatggaattcttgttcttgaaatgattactggaaggcggcctacagataacacatgtgagcaaggatttagccttcgcaagtgcgttgagatggccctgaataatcgagcgatggacattctcgatgtagagctggtaacagagcttgaaaacgcgccgcctgcaacatccatggatggtccgtcagaaagggtgaactccctgatttcgctacttaaactcgggctgctctgctctggggaaatgccattgagtagaatgtcaaccaaagatatcatcaaggagctgcttgccgacaccaagctgtcggttcggcccaaaacctcgcagccacaggagagagaagaatcgcgaaggaagaaggccggagaagcggaagcgagagcgcacggcggaggcgaggagggtttcatggagcccgagaaatccaaagaggcggcgagccagccgatggaagcggacgccggcggccccgtcgatccccgagaactagtgtccagcgacgatgagatagattactccgtggagcccgagttctacgatcccgacctggatgatgtcgatgagcggcatgagacgtatgtaaatcagtaccgtgcaatgttcgttcgcaactgcaaggtcaagactgatcagattctacgggaggggaaaggcaaacggaaaaaccgcaagggaaaggctgctgattcttctactacatcagaaggtgaaaagaagggtgcagtttatcaccctgtttgttgtgaggtttgctcaactgaggttggagtgtttgatgaagatgaagtttaccacttctttaatgtcattcctagcaactcctga

SEQ ID NO: 52905 - DNA, 317 bp, Oryza sativa
  Clone ID: PAT_MRT4530_55156C.1
gggggaaaccatatcaatttactaaaccacctcaaaacaaacgggtacatttggacagcccagtaaatgttggaaaaccaaacaaaatataagcccttatagggcccacgaaaaggaacaatctggtcctaccctccacaaaggggttttttccttaacaggcccccacactatgtgggggagggggtatatgttatataaaatggaaaccggccctagggaattgttcaaaaatccagttgccaaaacgctcaagccttgttggcaatgttgttggaaagcccaataaaacccttatacaacccttaaccaaatgt

SEQ ID NO: 52906 - DNA, 453 bp, Oryza sativa
  Clone ID: PAT_MRT4530_55157C.1
cccacgcgtccgcccacgcgtccggccggagaagcggaagcgagagcgcacggcggaggcgaggagggtttcatggagcccgagaaatccaaagaggcggcgagccagccgatggaagcggacgccggcggccccgtcgatccccgagaactagtgtccagcgacgatgagatagattactccgtggagcccgagttctacgatcccgacctggatgatgtcgatgagcggtgggtgagcaagcagaggaaagggaggacttctgacgccgtgctcagctgccccgcgtgcttcactaccttgtgcctggattgccagaggcatgagacgtatgtaaatcagtaccgtgcaatgttcgttcgcaactgcaaggtcaagactgatcagattctacgggaggggaaaggcaaacggaaaaaccgcaagggaaaggctgctgattcttctactaca

SEQ ID NO: 52907 - DNA, 408 bp, Oryza sativa
  Clone ID: PAT_MRT4530_55158C.1
atggcgatggcggtggtgcgggcggcagcggtggatggcgatggcgatggctgtctgtggcgccgcttcgcctcgtcgccctcctcctcctccttcgtggccgactgctgcgtcgcgcacgccacccttgtggagcgcggcgccgctctcgccgaccgcctggaggtggcgcgctcgctcctcggcgagaacggctacaccatcacgcgctgcagatgcgggcccgtgtggcaaatcctccggcgcaaccttgtcgccgagacgctgcacccgtcgcgcgtccgcctggcggggaggccgagggaggatacaacagatcaacagcaactcgtgtttcctggtaacaactgcagagctgagcaggacacaagccgccgcaagatttcatcagtgatattcttcttttga

SEQ ID NO: 52908 - DNA, 238 bp, Oryza sativa
  Clone ID: PAT_MRT4530_55159C.1
atgtgtgtatattataggtcatcttctatctccaaggggtcttttatacatccatttggggctccaaaacacatgtgaatattgcttcagcattctataatgcaccccaggaggtgctagccttatgacctcttcacaatatttttaattttggtatgccgtgtacactatgaactacccgcttgttgcttgaaagataccctgcggtctgaattttaatggcaactcgtcatagatg

SEQ ID NO: 52909 - DNA, 452 bp, Oryza sativa
  Clone ID: PAT_MRT4530_5515C.1
gctattaaaattttcatacgttcttaaactaaaccagaaaaccaatgacagccggcctaagctgttaacgacttaagcattcacatcccaaaattcccaagtcctaacacgtatccatccctattctagtattctgataactctcaagctcttgatgatatcaccatgtccgcgtcgccgttgcgacgacggcgagcaccatctccagctttccagctgctcctcgacgccacgcagccgcagatgccctcagctctgatgatttctacgctggcgagcctgagaaaaaccagtggcagatgcgctcaccatgggcaaggccggtgacgccgagcaagcggtgcacagcactgcgccggcggccggccacggttccgccgtccgccggtacgccgccacgattggcggggctgtcgatgccaagtgtgtccttgtgctgttcctctccatcg

SEQ ID NO: 52910 - DNA, 487 bp, Oryza sativa
  Clone ID: PAT_MRT4530_55160C.1
gtgatattttggtggtttaaccggattataattatccccttataccatagaaatgacatagttacgcccatccacacgaccaagtaattggacttagcctagtacattgtcctactatatgaaagattgttgggtggcttattaggagcaggttttgtggtgaatcatgcgtaaggtgtttgggtggcatgaatcacaacagtgggcttcatgaaagtgtgacgatatagataccttgcctaggcctggcaagagtttgaccactatgatgaaccaagaccccactgtgcagtaactagtggtaaatgggactcgaacggctatggtgtttacaacctcgcgaattgttctcatcgtgtgggtaaagctgggcagacattgcagacgtattcgaatacaccatgctcccggtcaaggagatatgtcataagggttattcctactccaaaagtataagtagttttgaaaatctaaaatgttgagactt

SEQ ID NO: 52911 - DNA, 1710 bp, Oryza sativa
  Clone ID: PAT_MRT4530_55161C.1
gcgcaggcatcgcgcggacggtgacgaggggaaaaaaaaatcaatcaaaccctaatcagatcagggagaggcgagggctagggtttcgactcctcggcgggcgatccatggcggcggcggcgaggcatcgggggacggtgaagtggttcaacgacaccaaggggttcggcttcatctcccccgacgacggcagcgaggatctcttcgtccaccagtcctccatcaaggccgacggcttccgctccctcgccgagggcgagcaggtcgagttcgccatctccgagagcgaggacggccgcaccaaggccgtcgacgtcaccggccccgacggatccttcgtcaagggcggcgccggcggcggcggcggtggcgggggaggcttcggatcgcgcggtgggggcggatctggcggtggcggccgcagctatggcggtagctggggcggggggaggagatccggcggtggtggacccggtgggggctgcttcaagtgtggggagtctggccacatggccagggactgcttcaacggcggcggtgtcggcgttggtggaggcggtggcggcggcggcggcgctggtggtggctgcttcaagtgcggcgagatgggccacatggctagggactgcttcaacagcggtggtggtggaggtggtggtggtggcggcggcggcggcggcgcctgctacaactgcggcgagaccggccacctcgcgagggactgctacaacggcggcggtggaggcggaggcgggcgattcggcggtggaggcgaccgctcctgctacaactgcggcgaggctggacacatcgcccgcgactgccacaagtgatggattcacaacaccatctcccccccccccctcctcttagatctcgcctaaatcttcatcactcctaagtcgaattattgctttagttttgccgccgatctgggtcacatggagagcgcgttgcctgctataaaggaaccgcttgccttttgtttttacctctttttctttttttgctattgggatttcggtttagttttaacttctgctgctgctgctcgtgtgatgatgcttttgctgctatgagttggtctggtcctctggttcaggttaagaagacgtgatgtctggattggttttgtgtgttgggcgaggagattgacaaaatctctctcctttttgtggtttccccgagatgaaaaagatgattattgtcggttactccttaatatataccaaattaaaaaataaataagcaccgggcggcccccgttgatctttatttacctttctactctatattttcttttttgtcgcgcccgctccccaattcaatccacattcgattgcacttattctctctacacgcccccgccttttaggcgtgtgcgttgagaaacaacgcggtaccaatatctcgcgcctaatctttgttgtaatcatcgggttcggtgtgggcgcgttatggtttgcgggtctatgtctgctctttctcattgccccctactattgcgccgggcaagcgtatcagtatatattattaatatatcatgttattaaaacaaatttacattatatttttattacccacacagaacctcctctgccgctcttttatgttgtcatgctgttgtcgactcacggatgacgccgaggggccgagctcccttcttgtgctcgttaattcttgagatacctcacattcaacatcacaccg

SEQ ID NO: 52912 - DNA, 657 bp, Oryza sativa
  Clone ID: PAT_MRT4530_55162C.1
atggcagggatatgcaagaccattatagatcacctagctcgacatcgacatcttcgtcgagacatgaagagtgatcaacatgattctaatgaggtacgtgatgacgttctaactaagatcaaatttgcactaccttatttcaaaggaaattatgatcctcatgcttacatttattgggagctagcggttggcagagaatttaaaaagcatggtttagctgagaaacaaaaggaaatgcataatcacggaaaagatgagagaaacatgaatgagccgccaatcccattgttcacaatccaaatcgaggcacctccatcatctgaacaaatcatcaaaggtaaactaaatggtgctgaaactaatcaagtagagcaaccattagtggaaccaactgctgagactcctttgtcacaagttggtttgtttgttgttccttgtgataaagatgagttgagtgataatgattcacatatatccataccacaactagtgaatgaacatgctattcctactgttaattcttactgtgcggattttatgcatgttattcacattgctattgaaatagaggaacgaataaggttgatctgcaccggtaatatcaacaacccatggaggggtgtatcgatcgctaaggtgcaacacaacaatgtctag

SEQ ID NO: 52913 - DNA, 926 bp, Oryza sativa
  Clone ID: PAT_MRT4530_55163C.1
accccgctcgcgccagatccccccaaacccaatcgatccccatcgatcaccgcgctccccccggcgccgccgcggcgagaggtagggtttgctcgacgacgcgagggggagcgaccaccgcccgcaacccgataggagggatggcggcggccgagggcgagaagaagatgaccagttttatcgcgaagagctccggcgccgaggagttcgaggcgggggccatccgccgcgcgatcgaggacgactgcgacgacgacgacagcgggcatcctgccccccgacgtcctctccggcgagggcctcgataaccgcgacgccggcttcccgccttcacaaagaagcgcctccaagatcacgggagatcgcgcggcggtgaacccggcagccgctgatccaccaatgcccgttccagggttgcaccatcatcctaacatccccgctgcaaaccgccagctccctcctgccgctagactactgatcaactgtggcatcttcctcgtcgccactgccgggtcctccatagttttccacactgctggagacccttccgccatcgacggtcctgcatatgcccttgttgcattcttcttcgtcctcctcggcttgtggtttgtgctgcttggacccgtcgccggccagttccctggagccacgagggtcgccgttgccattgcgaaagcgctcaagggttacctgctcggcggcggcaattgatcaaatatttgattcattctttatataggtatagctttgctagctcacagtagttttctgtttgtttgtatgtcgtgtctataggcgttgtagcccataaactcactgtaaagtgtgaagtgtatatacgtgttcttgtaaggccctgtttctttcagcttaggattattataatctagattattgagttagattaaaaaaaaaaaaaaaaa

SEQ ID NO: 52914 - DNA, 1774 bp, Oryza sativa
  Clone ID: PAT_MRT4530_55164C.1
tcagcccggcttcacgccaagccgcctccgctgcctccgcgggaacttggggccagtcctctcgccgtggacttcccatagtaaaaccatagcaagcccagtgcttggcaccaaggattgtgctgactgcctagacgtcgtgcgtggtagccggccctcaagcagtgagccaccgcgcccgagccgtcctagccccgcctggtccgtatcaccccatccaatttggccaggaaacgccggagcgccgccgccgcccgtcactggaccgtggaatttgtcaccaccgcagagctgcccctttttgccggctaatcttatctctatatcatcatcgattgcatctctgatggacggtcctccacctggtgcctgcgtccccttcggcacgcataggtgtacggggacgagcaggtgcctccgaaactccgtccgcttgagaaccctccgcggcggtgcgccgggtttgttggccttccactcgtacgcccgaggcagtctcatggcgtcctggagatcatcaggcttctgcagttcaacgtcgatgctgatatcatcctgaagaccggcgatgaaaagttgcacttgctgactctcggtgagggggtctgggatgcgactggtaagtgccagaaaacactcctggtacgccaccacggtgctcgtctgcgtgaggcgcttgagctcaccaaatgggttgtggcggatcgggggagaatgatcggcgacccgtgatggacacagcgacagaaagagatgagaaacagaggaagctggagatgaggagatagctttgatcttgcttgcctttattctaagattaattgctattctccgtccggcacggaaacaatcacggcgccagcgcgccatctgcgcctgcgccgcctcctgctgttccgccctctcgactcttcttgcgacgtctctgttccccgacgccgccccgatcccggcgccacgacctctgttccccgacgccgccccgatcccgagtgccgtatcctccgtcgatccctcgtcgtcgctccacgtgcgcaggcagatcccctcccgcctccccatctccgcgccagtccccggcgtccgcccccagccgccgctgtgccgcgtcaatccccggatcagcgaaggccttgtcgagatctcgaagaagatgatggacttggcggcgcaactccgggccatggcggctcagtcagccaagccggcggctttcattgaggaggccgaaccattatactggcatgcggtggccttgcgttcgcgagggcgcgtcttcaagcagcacagatggcggcaatatttagcggtgacgctgcaaccacgcgggggcggcgtgactcgtggcgaggtgctcatgtttcctcttccggcggcgccaagtctgggagtggcaacgcaacctcgacctcgccgttgggactggcgatggcgccatcgccgttggcgccctcaacggcggcgatttccacttcaacggcgatacaacacggtacgggcgtttggttttcaggcgctattttccggcgatgcggctttgtttccgcaggtggaggcgcacgtaccagtgatggttggagcagagcttggcgacgtgcgtgcggcgcgattcgcaggcgcgacgggtgggtgtggcattcacgtgtcgcaatggcgcagatcgtgccggccccacgtgctggttcgcgaagttggcggatcgaccacggctgcgtcgctcctagcggtgtggtctcctgaaaggaaaggagatagggtttctgccctctcttag

SEQ ID NO: 52915 - DNA, 2240 bp, Oryza sativa
  Clone ID: PAT_MRT4530_55165C.1
ggtcgttttgggacgcgacacctgggaattcattatcaccctggaaaggctaatgttgtagcagatgctctcagcgggaaaggttattgcaatgctacggaagggcgacagttgtcattggagttatgcaaggaatttgaaagattgaatctgggaattatcagtagaggctttgttgcagctttagaagcgaagcccactctcattgatcaagttagagaagctcaaatcaatgatcctgatattcatgagatcaagaagaatatgagaagagggaaagctatcggtttcttggaagataagcaaggaactgtatggttgggtgaaaggatttgtgtcccagacaacaaagatttgaaagatgcaattctgaaagaagctcacgacactttatactctatccaccctggtagtactaagatgtaccaagacctcaaggaaatattttggtgggtaagtatgaagcgtgagatagcggaatatgtagccgtgtgtaatgtttgtcagcgagtcaaggcagaacatcagaaacctgcaggtttgttgcagcctttgaagataccagaatggaagtgggaggaaatcggtatggatttcatcactggtctacccagaacgtcatcgggccacgactccatttgggtgatagtcgacagactcaccaaagtggctcatttcatcccggtgaggacaacatattccggaagtcgcttggcggaattgtatatgacaagcattgtgtgtttgcacggtgtgcctaagaagatagtatccgatcgaggtagccagtttacttcaaaattttggaagaagcttcaggaagagatgggttccaagctgaacttcagtaccgcttatcatccgcagacagatggacaaactgaaagggtaaatcagattttggaagacatgttgagagcttgtgctttagacttcggtggaagttgggataagaatctgccttatgcggaattctcatacaacaacagttatcaagctagtcttcagatggctccttatgaagcactgtatggtcggaaatgccgcactccgcttttgtgggatcaaacgggagaacgccaggttttcgggaccgatattctgagggaagcagaagaaaaagtaaagatcattcaagagagattgcgtgtggctcagtctcgtcataagagttatgccgacaatcgccgtagagatctaagttttgaagagggagatcatgtgtatcttcgtgtcacacctcttcgaggggttcatcgtttccacaacaaaggaaaattggcaccgcgttttgtgggaccttataagattgtcagtagaagaggagatgttgcttatcagttggagttaccgcaatctttggcaggagtccataatgtgttccatgtgtcacagtagaaaaagtgtttaagggtacctactgaagaagctaatcttgaacagatagaagtccaagaggatctgacatatgttgagagacccatccgtatcctggaaacagatgagagaagaaccaggaatcgagttatccgtttttgcaaggttcaatggagtaatcactcagaggaagaatcaactagggaacgagaagatgaattaaatgccggattcgagtttggttcggattcgtttttccgctccaaaccctaaagtttccttcccgtcgccggccgtcgtgggccttcgtcgccgccccctagccgctataaaaggacccccggtgtctcctctacccgccgccaccctcgccttagcccaccgccgtctgtagcgccctagcccctcgtgcgccgccgtcgctccggtcgtcgtcgtcgcgtgggaaggccaccgccgtgttcgccgagttgccgccgacctcgtctgtccctctgtcgtcgccgtagatcaccggagcaccgccgtcgtcatcaagccgaaggtcgccgccgcttcttcctcgtcgccgtcgtcgtccggtcaccgtccaccgccgttcgcgccgccgcgccgtcgttcgccggcgagcatgcgaggctgagccgccaccggtggtgacatcactgctgacgtcatcgtcgccgtttcccattccgacgttcccggagagtccgattttgcagaagactttgaagagttccaaggccagcaaggcaagtcacacagatcgcaaacaaccctttgagtatgtgagcgtattcatcttcttcaccagctgcctcgtctgtcaccgactaattattttgccccccatggctaca

SEQ ID NO: 52916 - DNA, 810 bp, Oryza sativa
  Clone ID: PAT_MRT4530_55166C.1
atgggttcaggttctatacctccagcctccctctgcatggtcccgcgaccagggagggcaccatcatactgcagcttcttcatgaacgcggtgttcgaggaagacttctcaagatccatcgccgctggaggattgacggagaacaggatggaggaaatgagaatgacaacgattccgacatcagaagtcgccatcggttgcatgagttcatttaagcagaagtcagaggctactgtcagggttacaaataaggatcaaatcaactggcacgctagcatacccgaaggcgagttttggacctgcactggagttaagcagatctcccatgcctcatgtttttcatcaacacgcttttggcacgcctggtgggaccgattagaagtcagaagtcctctcatggacggcaaaccgccagcatcatcgtcctcggctagtccgggttctgttaaagagaaggtccagcaattagaccaatctgacgttaatgagggcaacgtcatgaccattactctagacaaattgacacctgatcagaagaaggagtttgaagcaatgatgcagtaagcacggaaccagttcttgaactcctttatgcagacccgcaaggggacagtggtgcaaaagtatcaggtgacagtagtggctgatgtccccgggaccagttcttctaaggatgggggagtgaaacaagctccaaatggctcggctcaaccgagcaacaaaggtgctgcagatgattatcaaggaaatcaaggtgacaactctcagggagctcaaggagttcaaggtgatggtttccaaggagttcaa

SEQ ID NO: 52917 - DNA, 5078 bp, Oryza sativa
  Clone ID: PAT_MRT4530_55167C.1
atgccgcgctacaagcctgagtacttgtttggtgttgaaggatttgtccaggagttgcgtacgatgtcctttgccataggatttgggactgctcctttttatgcccagattcctcatgatcgtcacgaagagaagtgcggagtcaaagtcaccttgaacagtaatagtgaagatatcccctcagtgatgttcgaagctggaggaagaaactacatccatacatgtcaggaggtggcaaggatcgccataggagagctccgcgatcgctacagtgatcagttggccgacactgagtatcgctaccatccccgtcaaccacagggaagtgaccgtggcagctaccttaagactgaaggaattgagaatgatgctaccacaaggcatttggttgagatgctgtgggctatggatgaaagccgtgtggagactgtgttagcagctcaagatcgtgaagatcggaatcgtggtaagatttgcaagctagaagacaaagtggatcgtttggagaaggaactagccgcgttgaagggagaagcaccaccgcagaaggccagggttcgtcttaccgcaaggaagagagctctatttgtccatcgctaccaattggcgccaaagtggtggatgatggtgctcactcgcagcaacgggaatggcctcaacaacaacaacaacaataacaacaacaatggagagaatcccacacttgcccaagtcctggctcaacaggcacatcttatgaacatgatgatgcagcaactccagaaccagcagaaccagggaaataaccatgcacctccccagaacaagttagcagaatttcttcgtgtgaggccgcccactttctctagtaccactaatcctgttgaagctggtgattggctgcatgccatagagaagaagttggatttgcttcagtgcaccgatcaggagaaggtctcatttgcatcacaccagctgcatggccctgcctctgaatggtgggatcactcccgccttaataggattactgctgaacctatcacttggcttgagttcaccgctgctttccggaagacgcatataccatcgggagtggtgtctctcaagaagaaggaattcaggtcgctcacccagggatctcgctctgttaccgagtatctgcacgagttcaatcgtctggctcgttatgctctggaagatgtacgcactgatgaagagcgccaggagaagttcttggaaggacttaatgatgagctttcttatccactcatgactggggattatcctgatttccagaagttagtagataaggctattcgccaggaggacaagtacaatcgcatggaacagaagaaacgccggattgctcaattcaagacacaacaggggaataatcagaggccgcgtcttactttaggaccccagtccatgccacagggaggttcttcgtctgttgttcgtccgcagcgtcagttcttcaacaacaatgctggcaacaacatccgcaatcaagctccacgccctgttgcagctccaacacagcaacagcctgccaagagggagcaaggcagcaagcccgtagtgtgtttcaactgtggagacccaggacattatgctgacaagtgtccgaagccccgacgcgtgaaggctgtccctgcccagagcaactctaccgcaccagcgccaaaggcccgtgtcaatcatgttgctgctacagaagctcaaggtgctccagatgtgattttgggtacgttccttgttaacttagtccctgcaacagtgctttttgattctggtgctacacattcattcttatctatgagttttgcgggaaatcatgtgatggaagtagaagatcttagacgtcctttgatggttaataccccaagtaatcaagcactctctttgcaacgtagcccctctgtcagaatagaaattctcagatcattatttctggccaatcttatcctgttagaatccaaagaccttgatgtcatcctagggatggactggttagccagatataagggtgtgatagactgtgctaacaggaaagtaactctcaccagtgatgatggtcgagttgtaacaattcatgcattgtcttctgagtctttaaggtcaagactgaaccaaataactttggaagagattcctatagtccgggagtatcctgatgtgttcccagacgatttacctggtatgcctcctaaaagagatatagagttcagaatagatttggtaccaggaacaactccgatccataagagaccttatagaatggcagccaatgagttggcagaagtcaaaaggcaagtagacgatttgcttcagaaaggatacatcagaccgagttcatctccatggggagctccagtaatttttgtggaaaagaaagaccatacccagaggatgtgtgtggactatcgtgcactaaatgatatgactatcaagaataagtatccgctgcccagaattgatgatttattcgatcagcttaaaggtgccaccgttttctccaagatagatcttcgatcagggtatcatcagttgagaatcaaagaggaagatatacctaagacagcttttaccactaggtatggattgtttgaatgtactgttatgtcttttggacttaccaatgcccccgctttcttcatgaacttgatgaataaggtgtttatggaatacctagacaagttcgtggtggtctttattgatgacattcttatctactcccgaaccaaagaagagcatatagaacatcttcgccttgcactagaaaagctacgagaacatcaactgtatgctaagtttagtaagtgtgaattttggttgtctgaagtgaagttccttggtcacgtcatctcagcaggaggagttgccgtcgatcctagtaatgtggaatccgtaaccaactggaaacaaccaaagacagtttcagagattcgcagtttcctaggcctcgcgggatattatcggaggtttatagaaaatttttccaagattgctaagcccatgacacgattgcttcagaaagatgtgaagtacaagtggtcagaagaatgtgagcagagttttcaagagttgaagaatcgcttaatatcagctcctattttgattttacctgatccaaagaagggtttccaagtgtattgcgatgcatccaaactggggttaggttgtgttctgatgcaagatgggaaggtggttgcctatgcatctcgtcagttacgtccgcatgagaagaactaccctactcatgatcttgaattagctgcagtagttcatgcgttgaaaatttggcatcattatcttttcggtactcgtacagaggtgtataccgatcacaagagtttaaatagaggtttcgttgcagccttagaagcgaagcccactctaattgatcaagttagagaagcccaaattaatgatcctgatattcaagaaattaagaagaatatgagaagaggaaaagctatcggtttcttggaagatgagcaaggaactgtatggttgggtgagagaatctgcgtccccgacaacaaagatttaaaagatgcaattctgaaagaagcccatgatactttatactccattcaccctggtagtaccaaaatataccaggatctcaaggaaagattttggtgggcaagtatgaagcgtgaaattgcagaatacgtagcagtatgtgatgtttgtcagcgaatcaaggcagaacatcagaaacccgccggtttgttgcagcctttgaagattcctgaatggaaatgggaggaaatcggtatggatttcatcactggtttacccagaacgtcatcaggtcatgactctatttgggtgatagtcgacagacttaccaaagtggctcatttcatcccagtaaagacaacatattctggaagtcggttggcggaattgtatatggcaaggattgtgtgtttgcatggcgtccctaagaaaatagtgtggggatcctctagagtcgacctgcaggcatgcaagctttagtatgaagcttcaggaaagagatgggttctaagctgaactttagtactgcttatcatccgcagacagacggacaaaccgaaagggtgaatcagattttggaagatatgttgagagcttgtgctttagacttcggtggaagttgggataagaatctaccttatgcggaattttcgtacaacaacagttatcaagctagtcttcagatggctccttacgaagcactgtatggtcggaagtgccgcactccgcttttgtgggatcaaacgggagaacgtcaggttttcgggacggatatcttgagggaagcagaagaaaaggtgaaaatcattcaagaaagattgcgtgtggcccagtctcgccataagagttatgccgacaatcgtcggagagatctaagttttgacgcaggagattatgtgtaccttcatgtcacgcctcttcgaggggttcatcgttttcataccaaaggaaaattggcaccgcgttttgtgggaccttataagattgtcagtagaagaggagaggttgcttatcagttggaattacctcaatttggcaggcgtccataatgtgttccatgtgtcgcaattgaaaaagtgtttaagggtacctaccgaagaagctaatcttgaacagatagaagtccaagaggatctgacctatgttgagaaaccaatccgtatcttggaaatagatgagagaagaaccaggaatcgagttatccgtttttgtaaagtccagtggagtaatcactcggaagaagaatcaacttgggaacgagaaagatgaattgaatgttttattcgaggtcgaatcggatcggtctctttcctccgaaccccgaagtttccatagcgtcgccggtcatcgtgggccttcgccgccgcctcctagcccctttaaaaggacccccggagtcgccgctacccgtcgccaccctcgccttcgcctgtcgttgccgatagagccctagccccccgtgctccgccgtcgctccagtcgtctccgtcgatcggggaggtcgccatcgtggtcgccgtcgcgaacccgtcctcgtgcgccccttcgccgtcggtgaagaccgccgg

SEQ ID NO: 52918 - DNA, 157 bp, Oryza sativa
  Clone ID: PAT_MRT4530_55168C.1
atggagctgaagcagtgtcatctgggaactgagaagactagagagtggtgcagctttctccgagggatgaggaagcagctgaaaaagatgtcgaaacatgaggaggtggcccacttggaagaggaggttgtgccctcaaactggcaagatcgttggg

SEQ ID NO: 52919 - DNA, 1423 bp, Oryza sativa
  Clone ID: PAT_MRT4530_55169C.1
atgagtagagtgtccactagttggggttttgtttactctagggtgaacaaggaaataagggggggcgcgcggaccgggtccacgggagtggggcccacgcggcagcctcacggtccacggtggaccgggtgcacccggctcacaccggccggcgccgtgggtcccatgcgtcagccgcacccgagggcgcgggcggctgacggccgggccccacatggcagccgcggggcgcacccgaaggcggccacgccggcacagccgacgggaggtggcgcactcgttccccgatggtcgccgccggcgaccaccggcgcggcggagaggcgcccgagagaggggagggaagggggaaacgaatcggcggtccacggctcaccccgggtcgacggcgacggcggaaacggcgaccggagcggaggaaggcggcggcgcggctcgggtagacgaggacggcggcgttccggcggtcggcgaccgaaacggagaggtggacgaggtcggcgaggttgcggcgaacccgaagaaggcgacgccgaagcgggagaaggcggaaacactagtcgacggcggcgaaggccagccggtcggtgaagacgtggacgcccatgaacagtggcgaaaacaccagtcggcggcggcgaaggccagccagtcggtgaagacgtggacgcccatgaacggtggtgtgaccaaccaaccgtttaggcgagggcaccagtcggcggcgacggaggcaggccggcggcggaaacaccagtcggcggcggcaaaggccagccggtcggtgaagacgtggacgcccatgaacggtggtgtgaccaaccaaccgtataggcgaggacaccagtcggcggcgacggagccccacggtccacggtggaccgggcgcacgcggctggcggcggtcggcgccgtgggtcccgcgcgtcagccgcacccgcgggcgcgggcggctgacggccgggcccacttggcagccgcgagggcgcgcccgagggcggcctcgccggcgcgcccgcgccccgatggtcaccgccggcgaccaccggcgcggcggagcggcacccgagagagaggagggaagggggaaagcgaacggcggtcttcggctcaccccaagacggcgaaggcggtggaaacggcggacggagcggaagaagacggcggcgcggctcgggatgacgatgacgacggtgctccggcggtcggcgggcgaagcggagcggcggacggggtcggcaaccactcggcgaagacgatggaggtgacgccgagtcgggaggaggaccggagcgacgacggcggcgaaacggagctcggcggcgatggcggagagagcggagcacggcgcgagcacgaatccgacggcgagagcgagcggcgagcggtggaaacggaagagcggagctcgggcaacgtttaa

SEQ ID NO: 52920 - DNA, 698 bp, Oryza sativa
  Clone ID: PAT_MRT4530_5516C.1
cggaattcccgggtcgacccacgcgtccgaccattctgctcagcataaacggtgctaatggcccaaaacaagaccatttcggtggctctgctcctttccacccttgtggtggtggttgcggcagtagcagccaccggaccgccggatttattacaaggttggtgcgccgatgcgtgtagagaggagcaacaaaaagaccccatctacaacaagcattgcccagacttctgcgtcatctcgaccaagcagatttttagggcctataagggagccacggatccccccgtggaaagattcaacgccttgtgcgatgagggttgtagtaaggaatttaaggaggatcctgccatcagcaagaagtgtgtagacacctgcatcgtcatgtctaaggaagccaaggaatactttgcgaaaggtggcactattggtgctcccgcgggtgcatgatcgcgtagcagctgcacatctgatccttcttccatgatcgagtgacaatccccataaatggttctcacctggggaccgtccttgtatcacatttgtcctgttgttcccttttcatcttcggttgcttcattatttggtgtttataactctatgtggttgatgtgatatgttgttcttaccaatgttaccagaaacaattgttatctttatttgattaaatatatccggctgtgctttggctttttcccctc

SEQ ID NO: 52921 - DNA, 1904 bp, Oryza sativa
  Clone ID: PAT_MRT4530_55170C.1
atcttcaactcagaagcactacacttctgaaaaggggaataatagcaaggctgagtacaaccaccgtacttagcaagccacaccaacgatgcagacgtgcaaggggaacacaaggacgaggaaagctacactacaagcccagccgttgcccacgctggcttgtggggcgggccccacacgtcagcggcaaagcccaccgtggaccgagtccacggcggcagccggccacgtgggcgcgcacccgacgctccggatcggccggggccgatcggacggccgggggcggccgagcggcacgaccgggcaggcacgcccacaggcggcggcgaccgccgagcctagaccaccggcgacgacgccggcggcgggcggcgacggcgcgagaggcggcgagagagtggagagggaggctgttctcaccgagcgaatggggcggcgagacgaagacgaggagggcgacggcagaggtgcgactggaggcacaaaagtggctgtggctcgggttcaccgtggagcgggcggctcgggggtggaatggaggagcggcgtggtggccgggcttgccggcggagcagcgaagctagtggtggtggcggcgcggcttgaggtggacgggaacggcggcaagaggctgccgaaggcggcgaaacggcggcggtgctcggaccgaggcgtccaccaccaccaccaccactcgagttcccccacgatccccaacccttcctcctccgattcgccgccggtagctgccagcgtctgctccccggctcgccgcgcgccggccggcgagtgcaccgcgcgcgggcgcttggtcgacgctatctccggagtactccgcggtgacttgtgctgtgctcgatcgcggtcgtcgcttgctgttgatcgaccggtccagatccgcgtcgtttacacggtgcgtggctgttcctcaatctacggatcggacctcggactcatggagaaccgcgtcggtgagtcgtcggcgaccgccgtcgatggcggcggcggcgccaaggactcgggcagcttcgagtgcaacatctgcctggagctagcccaggaccccgtcgtcaccctctgcggccacctcttctgctggccgtgcctctacgagtggctccacgtccacgcgcactcccgcgagtgccccgtctgcaaggccggcctcgaggaggagaagctcgtccccctctacggccgcggcaaggcctccaccgatccccgctccaggtcggtggccggcgtccagatccccagccggccggccgggcagcggccggcgacggcttcccagcctgatcatcaccacgaccatttgccgcaccacgacccgtggttcatgggcggcgccggcgcccctgtggccggcggtcgctgggggaactacactttctcggcggccattggggggcttttcccattgctgagcttccaggttcatgggttcccgcaggcggcggcgtatggacctgccgctgggtttccttacgggtatggacattcgttccatggctggcatggccatggtttcccgcaccaggcaccgcagggccagcatgttgatgtgttcttgaaggtattgcttgttctggttggtgttcttgtgattgccagcttgattgtgttttagatgtgtgcagttagctatggccaatcctcggtgatgagcctgtatgaaacggttttattgtgtcaatattaggtagtagctcccacgggttgatcagtgtggagagatagtacaaagatgatgcttcagtagttactagtaggattctgtgataatgagtggtagctgataatgttgtcgtgcttctcgatatattacttgtgcagttgcaagtcttgtttgtaggtttttaagtgaagtttgaatccttgttatcttttcataatgcatttgc

SEQ ID NO: 52922 - DNA, 287 bp, Oryza sativa
  Clone ID: PAT_MRT4530_55171C.1
cggacgcgtgggctaatggagggatgcactctttcaggtttgcaaaggctgcacacaggtttccattggggtgagcgaatttggtggtcgtcgaagttctcgaggaaaactctgtagcctaatcattgtacagtttgactaatcgaaaagatgaaagtttgagatttggtgtgttgtactgtttctgcttggattggttgtgtaactgggtttggtggcaaatgggtctacttggattattgccataaaatttttgctacgatttcttaaaaaaaaaaactttttac

SEQ ID NO: 52923 - DNA, 848 bp, Oryza sativa
  Clone ID: PAT_MRT4530_55172C.1
atgacgtcaccaccggcggcggcagctcggcggctcgggcgacgcacgctcgccggtgaacggcgacgcttcggcacgaacggagggcaccaacgggtagcggacggcacggcgaactcaccggcgaccaaagcgacggcggaagaccaacggacggcgacggcgacgaggttgaaatggcggcgctcttcggcttgatgacggcgacgatgctccggcggtctccgacggtggcgaagcggcagacgaggacggcgacgacttggcgagcacgatggcggtcttcccgagcgacgacgatgactggaacggcggcggcgcacggctggagcgacggcggcgacggcggcgctagggcacacggcgctagggcgtttccgacgacgagaggcgaaggcgagggtggcggcgggtagaggagacaccgggggtccttttaaaggggctaggaggcggcggcgaaggcccacggcggctggcgacgagatggaaagctcgagctcgcagagagaaaagctgatccgattcgaactcgaatccatcgatttccaaaccgatttagccgatgtttccaaaggagaaaaggtagaggagatctcggggatcatttcccctctttcaattcggccggagaaggaaatgagcggccggatttggaaaggaacggcggcggcgcgaaactacggtttcgggcggcggcggcgcgacgaagacgacgaccctgacaggtggggcccacctgtcagcgggagagagagaagagcggcggctcggactgggccgtctgggccgaggagagagagagcggttttgggccgactttcggcccaaagccaaaagaagacttt

SEQ ID NO: 52924 - DNA, 437 bp, Oryza sativa
  Clone ID: PAT_MRT4530_55173C.1
gttccagacaaatgttcgaaagaaggattctcttcttgcagagcttgtcactgatcataggagcctgccttcagaaaatgattctattgggagcccttttgtattgtcaaaggtgatgtacttggcaaatatcaatgactcgctgtctgcttctgctgtaccagtaggagcgaggtgtgatgatttttcaaccgaccccagtctccaagagtttttttgacaggagcattggcttgccagcttccgttcttcattgaggccacctttgctgattaaacggcataactatgctgctggcctaatactgaggtcaaagaactttgccgtttctcttgctgagttgatctcagcagctgggaagccaaataactcgggtgaagccagtagatttttcacaggatttgggcaaatgtcatgtcagatgcaaaatggaatga

SEQ ID NO: 52925 - DNA, 1275 bp, Oryza sativa
  Clone ID: PAT_MRT4530_55174C.1
atgaaagccagtgattggttgcgcacagtcgagaagaagctggggttgattcagtgcacagaccaggagcgggttggcttcgcaactcatcagttggttggaccgacttcagaatggtgggatagctacgaagcatcacggccagaaggacataccatcacttgggatgagttttcatctgtattcaagagatcacatgttcccgcaggaatgatcacactaagaaaacgagagtttcgctacctgaagcaagaagatttgaccgtgacagagtacctgcacgagttccatcgtttggctcactatgcaccagaagatgtggaaacggatgaagacaaacaagagaagtttctccaggggttaaaagatgaggttgcagtgcaactactcctagaggattatgaagattttgagaaacttgtggacacaagccatacaactcgaaaggaccactcggatcaagcgtgcgatgtcaatagcattcaccaagatatcgacgatagtatcaatgaaggcacccagaatgacaaccctagcaattttgactctgagaaagactccaatggtgatagcaactatggtaccactgatgccaatgttagcaaggatttccaaccaccaattccaactccaagtcagaatgatcgttcccagacgaacagctcagtaaagaagacattgatttgttacaattgcaaagaaccaggtcatttctccacagattgtccacaaccgaagcgtaacctgcgtcatcactccggccattatgcaagaagaagacaagtcactcgccttgtggtcactggagcaaacgccatacctgtttctctgaaaggcagcaggctcaagtaccacatcgtcaccagaagcatccacaactctcggagtgaagagtacttagttgacaaaggtcaaaagatgattgatagaagatatcgaaaaagatgtttattaccgggcaaagaagtaggtcgaaacgtgattgataagagaaatcgggaaagaacacatcaagttgataacttgtgtgaggttgacgccgaagatatgaatcatgagaagttctggaacggaagcatcattaaactaccgcaacctagtctaagtaacctaaaaggtgcaccctggttcgagtcaggtgaagagaagattccatccgcaataggaggtcaagccaagcagttccgagtggtgaagttttgctggaagtttgtgaagacgcaacagaagaagtcagacaagaagagaagaccgcccaacctatcttcttgctag

SEQ ID NO: 52926 - DNA, 2639 bp, Oryza sativa
  Clone ID: PAT_MRT4530_55175C.1
atggccattatggcaattttttgcaaggcagcgcgggcgaaagcggcgcaagatgggtccggagggaactccagtgcgtctcctgcagtggcctcgacagatgtcgtagtcatgcccaggagccgtgaggcgacgcccagtggccctgccggcgatcttgtgcctgctcgaggcccgcctgctgacgtcctcacctgggaggagctccaagtcgagatggggcgcatcctccaggccggcgctcgcggcataggtcgcgagattgcggaggcgagggcggcggcggcgtcgtcggcgaatgaacgcgccaacaagctggcgcgtgacctggcagaggttcgcgaggacctcaagaagatgaggaagctggtggccggcaacgagcgacaaaggcaggggctcgagcagcgcatgtcggagctcgagaacaacctgtcggagatccgtggttcgctgcgggttacctacacaggcctacaccagctcgccggggagtgtggtgtcatgagcaccatcctggcgaatcccgacgagttcttgctgacgacttcgctcgcgaaactggcgacggcgatggaggtgattcgctccaagcatgtggccaggatcggggaggagacgtccaacgggatctacaccggggcgtgccacttcctcgcgtgcgtaaggttgtcgcaccctgaactcgatttccagaggatcttggatcagggggcggctaacaacgcgcatgtagatgtcgaggatgtccagcagcgcgggcagcctgagttgcctgtaatcgttccggcacttgcgctcgagccatatgtgccgcaggacgacgtggaccagaatctgcccgtggaaacgggcatggcgacgacttccttaggatctgacaaggccttatcggctctgggcgtccccagccgaagatcccttaggttcctcggaggcgggagttcttcgacccattttttgtcatgtgacatgagcctgtcgtagacgcgggttttgatcccttgtagtactatgctgtttgccctctcgacttgtccgttgctttgagggtgagagaccgaggcgaagcatatcttgactcccagcccgatgtagtaatcctgaaaatcagcgctgatgaactgggagccgttgtcggttatgatggggtgcggtagtccgtatctgcaaaatatctccttgatgaatttgatggcgttgtcagccctgtttggcactttcttgtatagatcgttgccgaccatacagtagattttttctttacgggttattttctcagcctctgtatcgtcctcgggcaactcctcgctgttgatgaatttgattagtggggtgcgccagtcgtctgtggtctcgatgttggcaacggcgcgttctgcttttgtggcctccgagctaatgtcgggggtggccgagctgacttcgccgctaacctcttttactgatggcttcgtcaggatgtccagaaaagtgccgggctcgagcggttgtcgtctggacgcacgtcgtgctaggtcgtctggctcgatgttgtcctggcggtagatgtgtcggacctcgatcccatcgaaccttttctctagcttcctgacttctgcgagatacttggataactcagggttagagcatttataatctttgtgcacctggttcacgactagctcggagtcccctttgacgattagtcgcttgaccccaagtgcggctgcagctcttatcccggcgagtagtccctcgtattcggctgtgttattggtcgccctgaagttgaggtggattgcgtgcttgaattgatctccggagggagatgtcaagataaatcctgcccctactccttggctgttgagtgcaccatcgaacgccattgtccacgtttcgttgtcgacttggttgtctgatttgttatcaggcatagtccagtcggctacgaagtcggcgagtacctgggacttgatggaaatgtcttgtttcttcagcagagcaaagaaaggttgccctcgttctcccatcctagcgacgaacctactcagtgccgccatgcatccggttagcttttgtacttccttgagtcttgtgggtgacttcatgttctcgattgccttgatcttctcgggatttgcttctattcctctgccagaaacaaggaatccaagcagcttgcccgacggtactccgaacgtgcacttagccggctgttgagtccaccagttgtctattcgaggaagagggaagtgatcctttgggcacgccttattgaggtcggtgaagtcgacgcacattctccattttccgttggccttccgcaccatgactagattggctagccactctggatgaagtacttctctgatgaagccagctttgagaagtttgtcgagctcttctcgtatggcttgttttctgtctggtgcaaatctccgcagtctttgctttactggcttggcatcgggtcgcaccatgagtttgtgctcaatcacctccctggggacccccggtatgtcggacggtttctttggtggttcagtcgtggcgggtgggctaggtgtttgctcgaccatgtcgaggctccgtttgtcgcactgtactgccagctttgcgttcccttgaatagtgattgttcctttcggtcccggcat

SEQ ID NO: 52927 - DNA, 3789 bp, Oryza sativa
  Clone ID: PAT_MRT4530_55176C.1
ctagaaatttccggcggccatctctctcctttccttggaattcgcaccatcagtagtgcgcttatttaagggagttttggggatccattttgaagtccgtttgctgcaaaactttccagccttcaaacatccctcttcttctccgcttctgtagaaaaaccctagctttcccatcttgtcctgttctccggcgatcttccggcagtgatggacctcgacaaatccacctccaccaatgcgtccctgaagaagctgcaggacgacggtgccctccctggtcgcgggaccatgcagagggaaacaggaggtactgaccctgaacctgtcctgggccgcatggttgcggttgaggattacattctttgcggttttcttcctccgccttccgagtttcttcttctcgtcttgaatttctacagcctttccttgcttcatctgaaccccaattctatcgcatttcttagcattttctcctatctttgtgaggcctacattggggtagagccatttcttgatctcttccgcttctactatgagttgcgctggatggaacctaaaaaggtatccggatgtgtcggtttctgacttcgggatggcatggtcgtttgtctctacatgatccgacaaggccttatccgctctgggcgtccccagccgaagttctcttaggttcctcagaggccttgtcaagacggcgtaaagggacatgaggataggtttcaacgctaggtgtcgtcgtggtaagggatcatcgggaaggaacactttgattgtgatctttaccgaggcgaagcagatcttgactcccaatccaatatagtaatcctggaagtcggcactgatgaactgggagccgttgtccgttatgatgcagtgaggcaatccatatctgcagaatatccctttaatgaatttgacggtgttgtcggccttgatttcccccgtgggtgtcgcttcgatccatttggtgaacttgtcgatcgccacgaataggaacctgtagccaccctgtcctcgtgggaatggtccgagtatgtcgaacccccagcacgagaacggccaagtaagagggatagtctggagcgcttgcgctggtagctttgtgtgtttactgtgaaattggaaggcttcacaccgctgaaccatgtcgcaagcgtctttgagggcggtcggccataaaaacccttgtcgaaaagcttttccgaccaatgtgcgaccggcggcgtgtaacccacagatcccttcgtgtatgtcgaggaggagatgtttgccgtcgtcggacgagacgcatttgagaagtagcccgtttagcgccttcttgtatagatcgttgtcgatcatatagtagattttggcttgacgggttatcttctcggcttctgcatcgtcctcggataactcgtcactactcaggaacttgatgagtggggtccgccagtcgtctgttgtctcaatgtcggcaacagcgcgttctgcctctgtagcccccgagctgatgtcggggacgactatgctatcttcgtcgtttgcctctttcaccgatggctcgattccatcaaacctcttttccagcttcctgacttctgcgaggtacttagataactcggggctagagcacttatagtctttgtgcacctggtttgagactagttcggaatcccctttcatgatcaatcgcttgactccaagtgcggctgctgctcttatcccagcgagtagtccttcgtactcggctgtgttgttggtcgccctgaagttgaggtgaattgcatacttgaactgatctcccgaaggtgatgtcaagatgaacccagcccctgctccttggctgttgagtgcaccgtcgaacgccattgtccatgtttcgctgtcggtttgactgtccgacctgtcttcaagcacagtccagtcagctacgaaatcggcgaggacttgggacttgatggctagagggaaggaggaaacaactgtgaccctgtgggcttggaagtagtggcatagctttcttgatgtcatgattactacgtaaagcagcttttggatttgtgggtatcttgtctttgcgtcgtggagagcttcactgacgtaataaactgctctttgcaccttctctctctcgacaacaatgacgatactcacagaatatggcgtggcggcgatatagaggaataattcttcattaggttggggagcaacgagtacagggggatttgacaggtagcgcttgagtgcgatgaacgcctcttcggcttcctgtgtccatacaaatttgtcttgtatcttcagcagagcgaagaagggttgtcctcgttctcccatcctagcaacgaatctgctcaatgcagccatgcgtccagttagcttctggacttcctttagtcttgtgggcaacttcatattctcgactgtcttgatcttctcgggatttgcatcgatccctcttttagagacgaggaaccctaggagtttgcccgatggtactctaaacgtgcacttctctggattgagcatgaggcgatatcgtcggaggttgtcgaacatttcccggagatcatcaatcaatgagtcgcttgtcttggtcttgacaacaatgtcatcgacgtatgcctcgacattgttcccaagctgatcgctaagtgccccttggaccgtgcgtttgaaagtatttcctgcggttatcagtccaaacggcatcttaacgtaacagaatacaccgaacggcgtgatgaatgatgtcttctcctcgtcctctttcgccatgctgatctggtggtagccggaataggcgtcaagaaagcttaacaactcacaaccagctgttgaattcaccaattggtctattcgaggaagagggaagtgatccttgggacacgccttgttgaggtcggtgaagtcgacacacaacctccacttcccgttggccttgcgcaccatgactgggttggctagccactctggatggagaacctctctgatgaagctagctttgagaagcttgtcgagctcttctcgtatggcctgttttcgatctggtgcaaacctccctggggaccccgggcatgtcggacggctgccaagcgaacacgtctgcattgtcgcggaggaaggtaatgagcgcgagttccttttctcgtccagtgatgccccgatcttgacggtcttgtcagggttggcgctggagagtggaacgaccttgattgcaccatctggcttcggcgtcatgtttgttttgctcactttcttgggtggctcagctgaggtgggtgggttgggcgtgtgctcgaccatgtcgaggctccgcttgtcgcactgcaccgccagctttgcatttccctgaatagtgattgttccctttggcccgggcatcttgagcacttggtacgcatagtgagatgtggccatgaacttcgcgagtgcagttctcccgatgatggcattgtatgttgtatcaaattcagcgacatcaaaggtgatctgctctgttcggaagttgtttgcttggccgaaagtcataggcatcgtaatcttgcccaaaggcttggacgatgactgaagagtaattccatggaagggttgatcagtgggcgtcaactcgcttcgtgggatccccatcgcgtccaaggtactggcgaagaataggttaatggagctgccgccatcgatgagaacccgtccgaccttgatattccgaatagtgggctcgaccacaatcggatatcgtcctggggtgacagcagtcttggggtggtcttcttctgagaattcgatcttctgctcagaccacttcat

SEQ ID NO: 52928 - DNA, 8841 bp, Oryza sativa
  Clone ID: PAT_MRT4530_55177C.1
atggccgacaacctcaaccgtcgtggtctggacttgactggctttgttttggagctgcggggcatgtgcattgtcttgggatatccacatggagtggactaccagggcaagaagcttccggagcaggacggtgacgatgcagagccccgcgccgcttgggaggtcactgcggtgatcctcaccggctctgccgagaggacttcgttggcagtcaccgtaggtggagattctttcccgccgcttgccagaacgccgcgctcctcaccatcagcactcttcaccagcgctatctggacgagttgcagcactcgccctatcgctaccaccctcgtcgaggaggagcccgcgactacgccaccttcagggatgctagctcggaggatgacgctaccatcatgcacctggcggatggtggaggcgtacgacgcggcctgtatcgacttccatcatatggtgcgccgtgggttggtcgataacaacatgaagatcctagagctgcgtcaggggaatttgcggctgaagaaggacttggacgcggtggaggcgtagctgtgttagctcaagatcgcccagggtgaggtctgtcgccccaagcgccgccgcgtctgccgcagcctgaagatcaccgcccgcaagagtacctccaggcctgagcttgttcgtcggtccttggcatggacttgctttgtggagacccctcgcgccgaatctcgccctcggttcctcaggaggagggagcctctggcgttggtagcacggaggatctctctctgtttgctggttctgtgagggattttcagatggtgacaaccaggagaagcgctgctaccggtgagggcagtcaccccgaaggcagcaaccacaacaaccatggcagcccacctccacctcctcccccgccaccaccaccgccaccaaacaccaaccccatcctcacccaaatcctcgcccagcaggccaacatgatggctgctttcctccaccacatccagaatccgccgcaacacaatgctccaccaccacccccgcaacattctaagcttaccgagttcctccgcatccggccgcctaccttctctagctccaataaccccgttgatgtcttggactggttgcatgccgtggggaaaaagttggacaccgtcctgtgcaatgatgaggagaaagtcatattcgccacccatcaactgcaggggcccgcatctctatggtgggaccacttccaggctacgcagccagaaggacagcctatcacttgggcccgcttcaccgccgctttctggaggacccatgtgcccgccagagtcatggcccttaagaagagaaaattttgggagttgaaacaaggcaaccgctccatgatggagtatttgcacgagttcaataatttggcccggtacgccccagaggatgttcgtgaagatgaggagaagcaggagaaattcctggcagggatggaccctgagctgtctgtgcgtctggtctccggggactatccagatttccagcgcctgggggacaagagcatccgcctggaagccaagcacaaggaattggagtcgcacaagcatcgcttggcgaatttccgcaaccaacagggggctaaccaaaggatccgctacaccaatctctatccagggggatcctcctcgcagcagcagcagcagcagcaaccccgctccgcgccccgacctcaattcatggtgagcgtcccacagccgcagcagcagcagaatcagcaaggggcccgtgcaccccgccctcctgcaccagccgtgcagcctggacaaggccgcagggatgctcaaagtcaacagcgtctgtgcttcaacagctttgagcccgggcactttgcggataaatgcccaaagccgaggtgccagcaaggccaagcgcctccccgcctcaacaacggtggtaaggatgtcactcggagccgtgtgaaccacgtgactgccgaggatgtgctgacaactccagacatcatcgttggtacgttcctcattcattccatccctgctaccattttgttcgactctggagcttcccactcgtttatatatgtgccattcgtggggagaaatcagctgggggtagaaaggattaggaaccctctgctcatcaccacccctggaggggttatgacagcaaagtattatagccctaccgttcctatagaaatccagggaattcctttcccctcggatttgattcttctggacaccaagaacttggatgtgatcctcgggatgaattggttagctcaattccaaggagtagtggattgtgcaaggcgcactgtcactctgtatcggggccctgatcaaccggttgttttctttgcacccccaacttccgccggcagttcagtacttcatcagctaggattgccagaaatacccatcgtcagtgagctcggagatgtgtttcaggaagaactacccggtatgccgcccaagcgagagattgagttccggatagatcttgctctaggaaccactcctctgtacaagcgaccctaccgtatggcagtaaatgaactggccgaagtcaagagatagttggaagagttgaaagaaaaggggtatatatggccgagcacttccccctggggtgctcccgtgatttttgtggagaagaaagacaagacaaagaggatgtgcgttgactacagagccctcaatgaagttactatcaaaaacaagtaccctcttccccggatcgatgatctgttcgatcaacttaaaggtgccattgtattctccaagattgatcttcgttccggatatcaccagttgcgcatccatgaagaagatatcccgaagaccgcattcaccacgcgatacggactgtatgaattcacggtgatgtcgttcggtctaaccaatgctcctgccttcttcatgaacttaatgaacaaagtgttcatggaatacctggataagtttgttgtggtctttattgacgacatactggtgtactcacaatcagaggaagaccatcagcagcatctccgtttagtgttgagaaagctccgggagcaccaattgtatgccaagctcagcaagtgtgagttctggttgtccgaagtcaagttcttagggcacgtgatatctgctaaaggagttgctgtggatcctgaaacggtgaccgccgtcactgattggaagcaacccaagacagtcactcaggttcgcagctttttgggtttggcaggatactaccgaagattcatcgagaatttctccaaaattgccagacccatgacgcagttgctgaagaaggaagaaaaatttgtgtggagccctcaatgcgagaaagcattccaaactctcaaagaaaagctggggtatcctcgccagtgctaatcttaccggatactcgcaaggacttcctggtgtactgtgacgctttgcgccaaggattggggtgcgtattaatgcaggaaggtcatgtggtagcctatgcctcacgccagctacggccccatgaaggcaactaccctacccatgatttggagttagccattgtggttcatgctctaaagatctggcggcactatctcattggaaatcgctgcgaaatatatactgatcataagagtttgaaatacatcttcacacagtcggatctgaatcttcggcagagaagatggttagagctcatcaaggattatgatgtgggaatccactatcatcctggtaaggccaacgtggtcgccgacgctctaagtcgaaaaagccattgcaacgctcttggcgtccgcggcattccaccggagcttaatcaactgttggaagccctgaacctaagcatcgttagtcatggattcttggctactctggaagccacgcctaccttgctcgaccaaatccgtgatgctcagaagaatgatccagatatgtatgggatcctcaagaatatgaaacagggtaaagccgctggtttcacagaagacgtacatggaaccctatggaacggaaatcgtgtatgcgttccggacgacaaggaacctaaacagctgatactttaggaagcttacgaaagtccttattccatccaccctggcagtacaaagatgtacttagacttgaaagagaaatactggtgggttagtatgaagtgggaaattgcagagttcgtggccctttgtgatgtgtgccagcgtgtcaaagctgagcaccaacgaccggccggacttctccaacctctacaagtaccagaatagaaatgggatgaaattgggatggatttcatcaccggacttccaaaaacccaaggcgggtatgattctatatgggtagtcgtggaccgactaaccaaggtagctcggttcattcccgtgaagaccacctatggagggaacaaactagctgaactctacttcgctaggatcgtgagtctccatggtgttcctaaaaaattgtatctgatcggggaagccaattcacctctcccttctggaagaagctccaagaagagttggatacccgattaaatttcagcaccacgtatcacccgcagacagatgggcagaccgagcgtctgaaccagatcctcgaagatatgcttcgcgcatgtgttctagatttcgcgaagacctgggataagagtctcccctatgccgagttctcctacaataacagctaccaagccagcatacaaatggcaccctatgaagcgttgtatggccgcaaatgccggacaccgctattgtgggaccaagttggggaaagccaagtattcgggactgatatcctgagagaagctgaagcgaaggtcagaaccattcgggataatctaaaggtggcacagtcccggcagaaaagttatgcagataaccgtcgccgtgacctggaattcgcagtggatgactttgtgtatcttcgggtcacgccattgcgaggtgtacacaggtttcagacaaaagggaagctcgcacctcggtttgtgggtcctttccgtatcattgctcggcgcggagaagtcgcttaccagttggagctgcccgccgccttgggcaacgtgcatgatgtgttccatgtgtcgcaactcaagaaatgtcttcgagtgccatccgagcaggccgactcagagcaaattgaagttcgcgaagacttgacctacgtggagaggccagtgttcctgcttgttaagaatttgaactcggaattggaccgttcaagtctctaaattttcctggatggagatggaagaagtcgggggtcgatggacatctctaggacaaatgaaggctacacgagctacggcccggtagtcgagatgtcatggcacagggctagtgtcctgctgctgggggctcattcctgcctacctgtcccggaggttccggccgtaggtggggttgggtcggtactcttgtttatggctaagatgggttgggaactatgtcacgtcttccgtccgtataccgtggtggagttggcaacaaggcgaatcacaactactcgaagattgttcgaggtcgtcgatcgatgcgctcacgcagacgatgcactgagacgcaagaatgacaagctgaagacagggggagagaagaaaccaaccaatgacgcacctgaaccaagcaagaagaaaagtggcaatagtgggaaaaggaaagctcaagcggaagtccttgcgtcggaatacgagcgccctcccaaacacccagacccacaaggcagcgacacgaagagaatatggtgccccatacacaagtcgaacatacattctctagaggattgcctcatcttcaaaaagtcgctggaaaagcaactggcattggagaagggcaagtgcattagtccaaggtgtggaagatggatgcttggagacccccaaaagggggctgcacccaagatgaagtggtctgaacagaagatcgagttttcagatgaggaccaccccaaggctgctgttatcccaggacgatatccgatcgtggtcgaacccactattcggaatatcaaggtagcgcgagttctcgttgatagaggcagctccatcaatcttctcttcgccagcaccttggacgcaatggggattccacgaagcgagttgacacctactgatcaacccttccacggaatcactcctcagtcatcgtccaagccattgggcaagatcacgcttcctgtgactttcggcagagcgagcaacttccgaacagagcagatcacgtttgatgttgctgagtttgacacagcatacaatgccatcatcgggagaactgcactcgcgaagttcatggccgcatctcactacgcgtatcaagtgctcaagatgcccgggccgaagggaacaatcactattcaagggaatgcaaagctggcggtccaatgcgacaagcggagcctcgacatggtcgagcacactcccagcccacccgccacagccgagccacccaagaaaccgtccgacatgccgggggtccccagggaggtgattgagcataaactcatggtgcgacccgatgccaagccagtaaaacaaaaactgtggagatttgcaccagatcggaaacaggccatacgagaagagctcgacaaacttctcaaagctggtttcatcagagaggtactccatccagagtggctagccaatccagtcatggtgcggaaggccaacgggaggtggaggatgtgcctcaacaaggcgtgccccaaggatcacttccctctccctcgaatagaccaactggtggactcaacagctggttgcgagttgttaaacttccttgacgcttactccggctaccaccaaatcagcatggcaaaagaggacgaggagaagacagcattcatcacgccgttcagtgtattctgctacgttaagatgccgtttggactgataaccgcaagaaacacttttcagcgcatggtccaaggggcacttaacgatcagcttggaaacaatgtcgaggcctacgtcgatgatattgttgtcaagaccaagacaggcaactcattgattgacgatctatgggaaaccttcgacaacctccgacgatatcgcctcatgctcaatcctgagaagtgcacgttcagagtaccatcgggcaagctgctcgggttcctcgtctctggcagaggaatagaagcaaaccccgagaagatcaaggcaatcgagaacatgaagtcgcccacaagactcaaggaagaagcagaagaggcgtttatcgcactcaagcgcaacctgtcaaatccccctgtacttgtttctccccaacctaatgaagaattattcctctatattgccgccacgccctattctgtgagtactgtcattgttgtcgagagagaaaaggtgcaaagaccagtctactacgtcagcgaagctctccacgacgcgaagacaagatacctacagatccaaaaactgctctatgcagtaatcatgacatcaagaaagctacgccactacttccaagcccacagggtcacggttgtctcctccttccctcttggtgaagtcgtgagaaacaaagacattgtcggccgcattgcgaaatgggtagtcgagctaagccagtttgatgtccactttttaccacgaacagccatcaagtcccaggttcttgccgacttcgtagccgattggaatatgcctgaaaacaggttagatagtcaaaccgacaacaaaacatggacaatggcgttcgatggcgtactcaacagccaaggagcaggtgcggggttcatcttgacatcaccttcgggagatcagttcaagcatgcaattcaccttaacttcagggcaaccaacaacacagccgagtacgaaggactactagctgggataagagctgcagctgcacttggagtcaagcgactgatcgtaaaaggggattccgaactagtcgcaaaccaggtgcacaaagactacaagtgctcttgccccgagttgtccaagtatctcgcagaagtcaggaagctggaaaaaagatttgatgggatcgagccatcagtgaaaaaagcaaacgacgaagatagcccaatcggccccgacatcagctcgggggctacagaggtagagcgtgccattgccaacatcgagaccacggacgactggtggaccccactcattaaattcataagcagtgacaagttgcccgaggatgatacagaagctgagaaaataacccgtcaagcaaaaatctactgtatgatcggcgacgatctatacaagaaggcgccaaatggggtacttctcaattgcgtctcgtccgacgacggccgacatttccttctcgacatacatgaaaggatatgcgagtcacacgccgccggccaaacattggtcagaaaagcttttcgacaagggtttttctggccaacctccctcaaagacgtttgcgacatggttcagcggtgtaaagcctgtcaatttcacagtaaacacacaaagctaccagcgcaagcgctccagactatccctcttacttggctgttctcgtgctgggggcttgacatactcggaccattcccacgaggacagggcggctacaggttcctattcgtggcgatcgacaaattcactaagtggatcgaagtgacacccacgagggaaatcaaggccgaaaacgccatcaaattcatcaaagggatattctgcagatacggcttgcctcaccgcatcataacagacaatggctcccagttcattagtgccgacttccaggattactgcatcaggctgggagtcaggatctgcttcgcctcagtttctcaccctcagagcaatggacaggtcgagagagcaaacgacatagtactacaaggaatcaaaacccgtgtatacgacaggcttatgtcacatgacaagaaatgggtcgaataa

SEQ ID NO: 52929 - DNA, 159 bp, Oryza sativa
  Clone ID: PAT_MRT4530_55178C.1
tgcagttcggtccgattccgggtcgacccatcgtccgataaatctctcccccctcatctaggttttttggagttgtaaggatccctatgtatatccattactactttccacgctctaggtggagcatcacatctggatcatcccgggaaccctaagccg

SEQ ID NO: 52930 - DNA, 285 bp, Oryza sativa
  Clone ID: PAT_MRT4530_55179C.1
gttgtttttttttttttttctttttttttttttttttttttttttttttttttttttttttttttttagggaataaaaatcggccaaaataggaagaggtccgaccttaaagtgccaggaaaggcctggcgtgggtggaagaaaaaaaagaaaagggaaaaaaccaacatgagaaaaccctacccccgggggggtactgaacccaacacacgggaactatctaacccttagccggcaaagccagcctgaacaagaaccccaggaaagtggggcccggccccataa

SEQ ID NO: 52931 - DNA, 207 bp, Oryza sativa
  Clone ID: PAT_MRT4530_5517C.1
ttcagactgtgtcgttggattttgactatcatcgtttaccggccgatcgctgcggttcgcctccactaacacacagctcctgaagcgggaacggatgaggaagaagaggagcaatcggggctgaccgacaaggccatcgaatctagccgcgatcatggacgacccgattgatcacagaacattggggcttacatcgggcctggacgc

SEQ ID NO: 52932 - DNA, 1404 bp, Oryza sativa
  Clone ID: PAT_MRT4530_55180C.1
ctacctttgttggcgaccctggtacgataaaagcggctcataaacggcgcattcattagggacagacaggtggagtaggagaaagaaagggggccatacaccacaccacagctcaaaagccaagtcctcctcggctcgccgctcgcggcgcctccctctccttttccgtctcctactccactccaatccctctccggactcggtctctctcccccactctttttcagtttttccccaccaaactcgcctcgccctcctctcttccttcttcttcttcctcctccgagtaccagagcgcacgaaacccctctcgaattctccgctctcctcccgccggtgaccccatccgaccgatcgcaagccatggccgccgccgccgccgactccgccgatcccgtcatcaccaccgccacctgcgcgcactggtaaccttccggtctcccgctggatgattgacatggttctcctcaaattcttcagccatcgagaaattccatctccaaacatcgcgctgcattttgcggtgaatagtctgtagttgattggttccatatcactgattataccgaactgcttgttgtagaagccccatagctcgcaccagtatgccaagaactgaaacggggcatacttgccgtagatattatccaattccttctgaacagaactgatggtgcttgctctcttgtgaaacatcttatcctcgttaaattttgtttctagcttcacacggacattccgcttattgctgcgcttccttttacattccctgattggaggcgtccttgactgaaaattttcggtgctagatgaagatcttagctccaactgaagctcacacagtgcagtagacattgacaaggtccttgtccattggcaattgcagaggaggatgcacttgatcatgtcctcgaagagcgtgggcgagcggaagatgcgcccgaaccccacctccctcgccacggcgtgcatcgcctggaactccgccacggccctcccgtcctcctcatccagccgcagcatccgccgcacttgctcgaggatggaggtctggtcgagcggggagagggcgtcgtcgtcgggcgcgccgaggacggagacgaggagggcgtcggaggggcgcgcggggtggcgggagacgcggacggcgacggaggcggcgcggtcggaggcgaggcggagcgggcgcaccagcgcgcgcgacgcggggtcccagcggttgggcgccatcatgaacagcccgtggctgcacaccgccgcctccaggtcgaacggggcggcgccggggtagggcggcgcgccgcctagcgggagctccagctccagctccacggccacgcggcgcgcggcggcggggtcgccgccttccggggacggcatgggcggtgattgggcctcttgcca

SEQ ID NO: 52933 - DNA, 153 bp, Oryza sativa
  Clone ID: PAT_MRT4530_55181C.1
atggacagcacaaaaatccccaaatccttcgttgtagtcatgccgcgccaccgccgctaccgacggtgccgcgagcgccagcatcacggcaacgccgggatccataacatcgcggcagcgtcgggatcctgctgccacgccgcccctcactag

SEQ ID NO: 52934 - DNA, 393 bp, Oryza sativa
  Clone ID: PAT_MRT4530_55182C.1
atgcgccaaatcgagaagaaatatgtcaaatatgacgattctctctcctcacgccatacctcaacgctagcgctcccgcccccatccggagttccggatcaaccttgctccatcacgacctccccttcatcgtcggctagaggaatggaagtagagaggagatacttactggatttggtggcggaggctcggagtagaggcggaggcccgcccactgccggctgccgttccttcgtcgcgacaccgccacccgcgccccgcagcaatgtggctgccgcccgccgctcctccgcccgcgaccccgctgcccgcgcccgcggccgtgcggctgccgcccgcacctcgccgcccaaaaccctcgcccgcccgctgccgtctccggttgtccgctga

SEQ ID NO: 52935 - DNA, 575 bp, Oryza sativa
  Clone ID: PAT_MRT4530_55183C.1
atgtctccacatgccgcatctcaattaccttcccaaagcggtggcggcggcggactcgagggaaacggagggcgactcaccggcggcggcagcggcgatgacggcggcagcgacggcggcgcacggtggcgcgagaacggcggtgcgggcacggaaacggtcggcgcggcagcacaacggcggcggtgcggcggcactacgatggcggcgcggcggcactacgatggcggcgcgacggcgtggaggacggcgacgcggctgcggggacgggatggcggcgcggggctcggggcggcgcgcggggctcggggcggcgcggggctcggggacggcgacgcgacgggcggtgacggggtgcgtgggcgcgcggggcgaggtggcaggcggcgatgggacggcgacgcgacgcgggacggcgacgcgacggggagcggcgcggcagcgggacgggcgcggctcggcacggggctcgacgcgacgacgacggtgatgcgacggcgagcgacgcggcagaggggaggcggagcggcgcgcgtggcaggggaggggaaaggctggggaccaggtcgaacacg

SEQ ID NO: 52936 - DNA, 507 bp, Oryza sativa
  Clone ID: PAT_MRT4530_55184C.1
atgacggcggcagcgacggcgacgcacggtggcgcgagaacggcggtgcgggcacggaaacggtcggcgcagcagcacgacggcggcggtgcggcggcactacgatggcggcgcgacggcgtggaggagtgggtggtggagacggggagaaggggggggaatactgcggtgacgggatggcggcgcggggctcggggcggcgggacgcgagacgcgacggcgacggacgagcggcgaccggacggcgacgcgacgggcgacggcgcgcggcgatggcgacgagcgggcggcgcggcgcggggctcggagcggctcggcgcgggaggggacggcgacgcgacgggcggtgatggggtgcgtgggcgcgcggggcgaggtggcaggcggcgatgggacggcgacgcgacacgggacggcgacgcgacgcggcagaggggaggcggagcggcgcgcgtggcaggggaggggaaaggctggggaccaggtcgaacacgtggcgggcaatga

SEQ ID NO: 52937 - DNA, 964 bp, Oryza sativa
  Clone ID: PAT_MRT4530_55185C.1
agggggccggtcgggggggcctagccggcgccgttgacaccttttggccggccggcgaggtcgggcggtggtgcgctggggcagcggcgacagtggcggaaatacgaattattacatcataggcccgcaggcatagtcttaaatcatcggaccgagaggtccggaatacatccaaaagcagaaatagataaggcagcggaattcaggcagcggcatgccattgccacaggcaacgaccgtactaagacctactggacgccatcgtcttcatctccctcctgtggcggcggcggactcgagggaaacggagggcgactcaccggcggcggcagcggcgatgacggcggcagcgacggcggcgcacggtggcgcgagaacggcggtgcgggcacggaaacggtcggcgcggcagcacgacggcggcggtgcggcggcactacgatggcggcgcgacggcgtggaggagtgggtggtggagacggggagaaggggggggaatagtgaggcttttataggggaagggagagagataagggggaaggaggaggagggaagagggaagaggggaagaggggaagaagaagaggggaaagagaggagggggaggggcggcgacgcagctgcggtgacgggatggcggcgcggggctcggggcggcgggacgcgagacgcgacggcgacggacgagcggcgaccggacggcgacgcgacgggcgacggcgcgcggcgatggcgacgagcgggcggcgcggcgcggggctcggagcggctcggcgcgggaggggacggcgacgcgacgggcggtgatggggtgcgtgggcgcgcggggcgaggtggcaggcggcgatgggacggcgacgcgacacgggacggcgacgcgacgcggcagaggggaggcggagcggcgcgcgtggcaggggaggggaaaggctggggaccaggtcgaacacgtggcgggcaatga

SEQ ID NO: 52938 - DNA, 469 bp, Oryza sativa
  Clone ID: PAT_MRT4530_55186C.1
ataccgtctccaagcatcagtgctgtccatcggcattagcagaggtgtgcccaaaagatgaccctgaaatcaaatctcccggagttcgtgaccgagtcgttccaccggagcaagccgctcttgacagacctcatggagctgggcgtgcttgccgtgccattctcgacggacgggaacacgccggacctgcggttcgacgagaccgatgacgatgacgccgacgacgcggcagctttcttcttcgtataatcaatcaaaaattcaaacgttaattcattattcatggctagatggccagaagaagcaagctaatgtgtcacctgattcccctgtgtatctctcgctccggccggacagtcgcgtccgtggcagcgacgtcgggtacccaccgtggcaagctttcgtggcgcagctgccaccggtaaaggggatgtggtctgaccttcttaacgggatggatgggagggta

SEQ ID NO: 52939 - DNA, 488 bp, Oryza sativa
  Clone ID: PAT_MRT4530_55187C.1
cctgtacctacacaagcactcccgtttgcgcgtcacacatagagatctgaaagcaagtaatgttctcttggatcataatatgaatcctaaaatttcagattttgggctagctaaaatattcagctctaatgatattgaaggaaacacaaaaagggtggcgggtacatacggttacatggctcctgagtatgcttctgagggtctcttctcggtcaaatccgatgtgttcagtttcggtgttctgaccctcgagatcgtaagtgggaaaagaaatcctggcttccaccagtatggtgacttcctaaatcttctaggatatgcctggcagctatggacagagggaagatggctcaaactcatagatgtggtcctgttaaccgattgcctagtagaagcaccactgatgatgaaatgcgtcaacatcgcattgctatgtgtacaggagaatgcggctgatcgacctaccatgtcagatgtcgtggcaatgc

SEQ ID NO: 52940 - DNA, 539 bp, Oryza sativa
  Clone ID: PAT_MRT4530_55188C.1
ggaaaccgctatgaccactgagttacgccacagctctaatacgactcactatagggaaagctggtacgcctgcaggtaccggtccggaattcccgggtcgacccacgcgtccgattttgattctctatacacatttaagaacttttcttaaaataaaaatatttcccctgccctggaacagaagagctagcttaaaagcacaattctccaaagtgaaaaataacttcacatcccaaatattgcagatataacatcaattgccattaccaatcctataccttccatgactttaaacccttaaaaaaaactatagtgctatggattgagactctgaaatatgtcacctaaatctatatataaatatagttttatgatacgacgtcttaaatccggtgttaaatttacggttctattatagtttgattagttacgttaattttcggaaggactacattacaaggtcagtcaagtcttcctagcccttttagctacatccactccactcattattagttcttaaaaaaaaaaaaaaaaaaaaa

SEQ ID NO: 52941 - DNA, 687 bp, Oryza sativa
  unsure (1)..(687): unsure at all n locations
  Clone ID: PAT_MRT4530_55189C.1
tttttttttttttttttaatccaacgatttaaaattcattattagcacaggatcccacctcaaacaaaggaaaagccacagaataatgtgggattgtccattgggcattcactattcagaccagacctgataaaacaccaaacgtacatatcgatagctgctcccattggaatgcccagcagtggtgcgtgcattgccaaagttgcagagtcagaaagagaacgccgtggaagcagtgatgcatggcaaatgtcaggtgtagcttgccttgcaagagacaactgacacgccatgtaactgattccaatccatctgacaaaagaaaaaaacactgcttcatcacaagattttaggacaaaatctaggatctggcaccagtggccaccattgtctggtctaaatgcagggtgggcatctcactgttacttcttggaattgctatgacatgcagtactacaccttcaatactgtagtccctggcataccaggccacatcttgtccaatagaaagggagatagtagtagtagaagtcatagaaccgcgtataaaagagaactagtacagggttacaggcgcatgggaaaacctctgaaataaattactagtactgaaacaatttgtagcaacattgttcagtactaccagaccaggttgctaatttttatgtataaacaccaacatttntg

SEQ ID NO: 52942 - DNA, 164 bp, Oryza sativa
  Clone ID: PAT_MRT4530_5518C.1
atgccgccgacgcccctcccctctgccggatctagggagggaaggaaggggagaggaggggagctggatcccgcgtggggagatggcggccggctgccggatccgtgcggggacggccgccaccgctggattcttgcattgacggccaccaccgttggatccgt

SEQ ID NO: 52943 - DNA, 234 bp, Oryza sativa
  Clone ID: PAT_MRT4530_55190C.1
atgcggattcgacgagtacgtggcgtccgtcttcagctgcagatggcgacgatcgaggaaacacggcgccacatcaccctcgtcatcccctgtcccgtcgccgtccatccgatgtcgcgggcatcacctcgccatcccatcccggacctcccgcggacgcgcgtcccttcgccgtctcctcccgggaagcccctctacagcccgtccaccgccaactctttattgtcattgtga

SEQ ID NO: 52944 - DNA, 1699 bp, Oryza sativa
  Clone ID: PAT_MRT4530_55191C.1
gcacgaggcccaaccaaatcttcttggcttcatccatccttgctccacgtcccaatctcctcctcctcctcctccccacttcttcttctttgttttttctctttttttttcccgaattcccagaccaaatctcctcgctttttgcttcgttctccgctccggtgacccggaggaggcggaggttggagaaagtttgcgcctttgcggtgagtggtggtgtcggtgatgggatcaagaacggtggggtggtggctactggcggcggccgtcgtgctcgccgcggcggcggcggattccggggaggcggagcgcgcggcagagcagcacagcgagcgcatctcagggagtgccggcgatgtgctcgaagacaatcctgtggggaggttgaaggtcttcatctatgacctcccaagaaagtacaacaagaagatggtcaacaaggatccccggtgcctcaatcacatgtttgctgcagaaatattcatgcatcgcttcttgctctcgagtgctgttcggacactcaaccccaaggaggctgattggttttacacgccagtttatactacttgtgacctaactccggctggactgcccttgccatttaagtcgccgagggtgatgaggagtgcgatccagtacatttcgcacaagtggcccttctggaatagaacagatggagcagaccacttctttgttgtcccgcatgattttggtgcatgttttcactatcaggaagaaaaagctattgagcgtggaattctaccgttgctgcaacgtgctacgttggtccaaacatttggacaggagaaccatgtttgcttaaaagagggttctatcactataccaccctacgctcctccacagaaaatgcaggctcacttgatcccccctgacactccacgttcaatcttcgtctacttccggggactattctatgacactggaaatgaccccgagggtggttactatgcaagaggggcgcgagcttccctatgggaaaacttcaagaacaatccattattcgacatttccacggatcaccctcccacctactatgaagacatgcagcgtgctgtcttctgtctgtgcccattgggctgggcaccatggagccctaggttggttgaggctgtggtctttggctgcattccagtcatcattgctgacgacattgtgctaccatttgccgatgcaatcccttgggaggaaattggcgtgtttgttgaggagaaggatgttccaaagttagacaccatcctcacatcgatgccaatcgacgatattttaagaaagcaaagattgcttgcaaatccatcaatgaagcaggccatgttgtttccacagccagcccaaccaagagatgcgttccaccagatcttgaatggccttgctcgcaagcttccacacccagagggagtatacttgcaacccagtgacaagcgcctcaactggactgctggacctgttggagatctgaaagcttggtagtgagcagcttccctctccttggacgatccttgtatgaaaacctcgtagggtcagtcatcagttcatacttcctgaaatgtgatgtaatcaacgtgcagtgccgggtgtaatgtacaccttggccttatctaacttaatgaatctttgtaagttagtaaattttgaaagaaatgaaaattgtatcgttggaatcaaaaaaaaaaaaaaaaaa

SEQ ID NO: 52945 - DNA, 631 bp, Oryza sativa
  Clone ID: PAT_MRT4530_55192C.1
acgcaaacagggaggatagatacagatcacagcatgctaatggtagtaccgtacaatttaagtttcaatataatccttttgattaatcattatatcatcgccatttgaaaatgataaattataacagcgagagtgggcgggagagcgtaaccttgaacgcctacctcctacattttcaacacagctttttttttcttctttggctcgcccggattctgcatatcgcaacacataccgaccacacaatgcccaacctcaacaaactcaaagaacccaaccggaaacacaattacgtcgtaagattcgtcgtattactagcagcagcagaggcggccatgccggcgccgagggtcgccgcccacgagcggcggataaactgtactggacgaaggagcggaagaatgtagcgggcctgcagttggccgacgatgacgttgttggcgacgagcgtattgccgtactcgctgccgatgcggatggataagggggcctggagcctgacgctggtgcccacgcctccagatggagccccacaactgcctcatcggggtccacctccccgtcggcggcccgcgcggcgtcttggactccatcaggtgcatctgtaccaagtacggcgtcgccggggctc

SEQ ID NO: 52946 - DNA, 193 bp, Oryza sativa
  Clone ID: PAT_MRT4530_55193C.1
gtcttttccatcacacgatgcttggaccgtatccgggaatttaatattcaagggcaggataagatgcggctacgtgccaagcgacagacacgaatgggcattttaatctagcgtacagggagaggaattccaaatcggcatatgaggttgacaccaagttctagaggatgcattaaacagccaaaagttatag

SEQ ID NO: 52947 - DNA, 273 bp, Oryza sativa
  Clone ID: PAT_MRT4530_55194C.1
atgcacacgccacatcccggattcccagtatcccaaccgctgtcccgccgccgccagcgacggcctcctaccagacgcaccggggggacggtggcctgcgccaacgagagcacgagggggtgctgcgcgctggtcggctcgcctgttcgcctcgtggtgttcccgtcgctctcaaccggaggcacccaggcagttggtggatgcaggcggctgctgccgcggcgcctgcgtcatccgtacgtgggcatgcaaaacgggggcgccctgacttga

SEQ ID NO: 52948 - DNA, 220 bp, Oryza sativa
  Clone ID: PAT_MRT4530_55195C.1
caatcccgctatcattagtttaattttttactcactaagtaaagtccatcaccggtcactagacttgtatcgctgtgtcattccggtccctaaactcataaattgaccgttcagattctcaaacttgttcgactgtatcatcccagtccctaaacttgcaaatcactcgtttagatcctccaacttgtttagttgtgtcacctcggtccctaaacatgac

SEQ ID NO: 52949 - DNA, 1245 bp, Oryza sativa
  Clone ID: PAT_MRT4530_55196C.1
atgaagcaccatcatgtggcgcgggggcgcgccgagccgcggcggatgggcaacgccgccatggtcatcaccatgctcctctccctctgcgtcctcacctacatcaagggtcgctactgctccacccccttccccaaggcggcggaggagatggaggtggtggagatcgacgaggattacgacagcacgaggtacaagatgacggggccgataggggaggaggacttcgacccgaccaggccgacgtgctacgtcacgagcaagtggtcggaccggtgcgcctccgtgggcgacatcggcgtcgacggcaaccactccaagatctacatcaacccgctcgacaaggagtggagaaccaagcccggcggcttcgccggcaacctgtaccatgactacaccgacgtgctcgtcccgctcttcaccagcaccaaccacttcggcggcgaggtgcagttcttgctcagcgggatcaaggattggtggctcgacaagttcacgccgctgttccggcagctctcccggtacgacgtcatcgacgtcgacaacgaccagaaggtgcactgcttcccgcggatcttcatcggcgccacgttccaccgcgccatgggcatcgacccggcgcgctccccgggcggcgtcaccgtcgccgacttcaagcgcctcctccgccgcaccttccgcctggagcgcgccgtcgcgtcgcgcacgggcgcgccgcggcgcgacaagccgcgcctcctcatcatctcccgcaagagctcgcgccgcttcctcaacgagcgcgccatggcgcacgccgccgcgctcgccaggttcgacgtgcgcatcgccgagccggacaaccacaccgacatgcccaacttcgcgcgcctcgtcaactccgccgacgtgatgatgggcgtccatggcgccggcctcaccaacatggtgttcctccccagccgcgccgtgctcatccaggtggtgccattcggggggctcgaatggctcacccgtgtcaccttcaaggatccagccaaggacatggatgtcaactacatggagtacaatgtctccttcgacgagagctcgctgagagagctctacccgagagaccatttctacatccagcatccatacgatgtgcacaagaaaggctgggacgccatcaagacggtgtacctggacaagcagaatgtggagctcaacctcaccaagctcaccaacacgctggaacgggcgcgcgacttcttgccagagccctga

SEQ ID NO: 52950 - DNA, 3280 bp, Oryza sativa
  Clone ID: PAT_MRT4530_55197C.1
cccacgcgtccgcggacgcgtgggctgctgctcacgcccgatcgtttttgcttccttcagatccaaaccaaaccaccacctgcggcgcgcgccgcccgcggcgagagcccggcgccgatgaagcaccatcatgtggcgcgggggcgcgccgagccgcggcggatgggcaacgccgccatggtcatcaccatgctcctctccctctgcgtcctcacctacatcaaggctcgctactgctccacccccttccccaaggcggcggaggagatggaggtggtggagatcgacgaggattacgacagcacgaggtacaagatgacggggccgataggggaggaggacttcgacccgaccaggccgacgtgctacgtcacgagcaagcggtcggagcggtgcgccgccgtgggcgacatccgcgtcgacggcaaccactccaagatctacatcaacccgctcgacaaggagtggaggaccaagccgtacgcgcgcctccacgacgccgtcgccatggacgacgtgcgggagttcacgctcgtccccttcggcggcgccaaccacaccgccgtgccgccgctctgcacgcgcaaccactccgtcccggcgttcctcttctccagcggcggcttcgccggcaacctgtaccatgactacaccgacgtgctcgtcccgctcttcaccagcaccaaccacttcggcggcgaggtgcagttcttgctcagcgggatcaaggattggtggctcgacaagttcacgccgctgttccggcagctctcccggtacgacgtcatcgacgtcgacaacgaccaggaggtgcactgcttcccgcggatcttcatcggcgccacgttccaccgcgccatgggcatcgacccggcgcgctccccgggcggcgtcaccgtcgccgacttcaagcgcctcctccgccgcaccttccgcctggagcgcgccgtcgcgtcgcgcacgggcgcgccgcggcgcgacaagccgcgcctcctcatcatctcccgcaagagctcgcgccgcttcctcaacgagcgcgccatggcgcacgccgccgcgctcgccaggttcgacgtgcgcatcgccgagccggacaaccacaccgacatgcccaacttcgcgcgcctcgtcaactccgccgacgtgatgatgggcgtccatggcgccggcctcaccaacatggtgttcctccccagccgcgccgtgctcatccaggtggtgccattcggggggctcgaatggctcacccgtgtcaccttcaaggatccagccaaggacatggatgtcaactacatggagtacaatgtctccttcgacgagagctcgctgagagagctctacccgagagaccatttctacatccagcatccatacgatgtgcacaagaaaggctgggacgccatcaagacggtgtacctggacaagcagaatgtggagctcaacctcaccaagctcaccaacacgctggaacgggcgcgcgacttcttgccagagccctgacaccatggctggggatcttgatgatgctgatggtagataggagagctcttctgtttttgattcgctttttttctccttcttcttcttgtggtgagattcatttctttcattgttttttgataaaaaggaggagacgagtaagatcgtgtcatagacaagtgtccaaaggttaatttacacttgcacactttgtaaattggttgttgtcgataaaatgtcaacatgaaaaatgctaattatttgtttgtggggagtgatgaacaattcacttttgccaccaccaatagtgttcttccaagatcttggcagtctttaattctgacaaccttcaggccaatgtgattcttccatctgaaccctgaactctagcccgggccttttcagcctcttcattccagcttgtacgaagcagcatgacaaccagcgctaaaatttgcactgtcatggcgcatattattcccaaccaaagtcccttaccatcgatcttcagaacaaatgcaaaagtaacagctgaagggataccaattgtatagtaagcgcacaggttgataacagaacagactttttgccagccacaccctctagcagcacctgatagtgtgcattgtattccatccatgaagtcagataaagcaagaattggcatcattgctgcgacatatttcacaacttcttcttcattgctgtacaagtaaccccagatatcccgtaccaaaactgtgatgatagctacaagtatgccttcggttaggcacatgattcctgaaacaaagactgataggcgtgctgcttgcggattcctagcacctagttcgttggaaactcttatacttattgcactgctgaggccacttggaattgtataaaccatccacattgtattcaggcttattgacaaaatcgaagtttccagtttcggattaggtagaaagcctgcaaggagaaccaccatctcaaatgcccaatactccaagcaagtcataaaagtagatggaatggctagccttagatacatattaacatcctttaacttaagtgcctcccttgaccatccaggccaactccttctgccaacttcggagacttttacatatattgctagcaatatcacattgaaccagtaagataatgatattgacaaagctgcacctctgttgccaaggtcaaaacaatgaaccataacccagcacagcaaaatgtgaattaccaaggtggccccagaacaaactaccagtggatggacaatgttttgagtttgcagaaacttggtaaggcactgaagcaaaccgtatgcaaaaagaccaggaatcaaccacacggcatatagtccagcttcagatgatatctcaggattttgaccaagagcgataagaatttggccagcgaatgccaaaacaaaagccagcgggacacccataagcataagaacaaagatagccctttgcgcatgtgtcccaagcatatcatattgttttgctccatatgattgtccacagaatgtatccagcgcgcttcccattcccagcaggacgctgaagccggtgacgttggcgaaggaggaggcgacggaggcgccggagagggagagctcgccgagatgtccggcgaacatgacggagaccacctgcaagctgtactgcagaaggctacacgccaccagcggcgccgcgagccccacctgcctccgcacctccgcccccaccgccggctgagggtcgtgggggacgaggagaggggccgcctccgccgccgcctcgacctcgccgccgccgccgctcat

SEQ ID NO: 52951 - DNA, 323 bp, Oryza sativa
  Clone ID: PAT_MRT4530_55198C.1
ttttgtttttaactgtattttttctccatggtttttatttaatttgattccgatagataggatcaagcagttcaaacaccaaaacgaaagcgaactgaatgcatggttacataacctacgaagaacacctaacactgggtggatggatagagggctctgcgactggggagagcccctggagacgatatcgactagagttgatgataagaggattatgacacggctagctaaggataactggccaagatgggccccaccagtcaattcctttcagttgccgccggagtcgccgtcgtaacggacgtcggggctgccaatgcagg

SEQ ID NO: 52952 - DNA, 1011 bp, Oryza sativa
  Clone ID: PAT_MRT4530_55199C.1
aaagtcttcttttggctttgggccgaaagtcggcccaaaacccttctctctctcctcggcccagccggcccagtccgccgcccgcgcgcgcgcgcgttcggtcgctgacaggtgggtcccacctgtcggacccttcgtcttcctccggctgccaccgctcgaaaccctagtttcgcgccgccgccgtctccttccaaatccggccgttcctttccttctccggccaaattgaaagaggggaaatgatctccgggatctcctctaccttttcttctttggaagcttcggctaaaacgttttggaagttcgtggaatcgagttcgattcggatcggcctctttccttcaagccgcgagctttccttcgccgttgccgccgccgtgggccttcgccgccgcctccgagcccctttaaaaggacccccggtgtctcctctacccgccgccaccctcgcctttgcctctcgtcgtcggaagaaccctagcgccgtgtgccctagcgccgccgtcgtcgccgccgctccagccgtgcgccgccgtcgtttcagccgtcgctgtcgctcgggaagaccgccgttgtgctcgccaagtcgtcgccgtcctcgtccgccgcttcgccaccgccgaagaccgccggagcatcgccgtcaccgtcgacccgaaggttgccgccgcttcctcctcgtcgccgtcgtcgtccgttgttcttccgccgccgttttggtcaccggtgagttcgccacgtcgtcctctacatgctggtgccctccgtttgtgccgaagtgccgccgttcgccggcgagcgtgcgccgcccgagccgtccgctccgccgagccgccgccgctgtcggtgacgtcattgccgacgtcatcggggtcgtccgccgaaggtgcgctgcggtggattgtgttatgcaaggggtattgtcacaactcctttccgaggtaccgtggtggtattgaggcacatgaggaagagttctacaatgatgctgatggtgtgaaggattag

SEQ ID NO: 52953 - DNA, 133 bp, Oryza sativa
  Clone ID: PAT_MRT4530_5519C.1
cccacgcgttcgctccatccgcggatgcgttcattgggcaggcgattcctaggtggaggaaacggcgacaagcagcgacatatggaggaagacatactgcatacgctctacatggatgccgtctccacatggc

SEQ ID NO: 52954 - DNA, 491 bp, Oryza sativa
  Clone ID: PAT_MRT4530_551C.1
gaggccgcgggcgcggcggagcaggggaacggggccccggccccggtggcggatgccgccgacgtcgagggggttgacgggataaggatccggaggcgccccgtgaccgggccgccggtgcactacgtggggccgttccagttccgcctcgagaacgaggggaacacgccgcggaacatcctcgagaggatcgtgtgggacaaggaagccgaggtttcacagatgaaggagagaaggccactgtatatgctgaaggggccgctggagaatgctcctccggtgagggatttcgttggggtgttgaaggcgtcttttgatcggactggtctgcctgctctgattgcagaggtcaagaaggcttcaccgagccgcggtgtcctgagggaggacttcgagccggttcagatcgcccaaacatatgagaaaaatggagcagcatgcttaagtgttctcacagatgcaaaatactttcagggaagttttgactattt

SEQ ID NO: 52955 - DNA, 106 bp, Oryza sativa
  Clone ID: PAT_MRT4530_55200C.1
ctacatatttcaaaaagttgggtgtgaatatggacttttgatagaagagttcaagattttagtagcgcaaatcacttatgtagtgaaatctgtaaactaccgctag

SEQ ID NO: 52956 - DNA, 4193 bp, Oryza sativa
  Clone ID: PAT_MRT4530_55201C.1
atggataacactggtaacaaaggctatgggaatgatggatccgatgactcaagaacccaagccaatgggaatgagaaaagcatcaacgaaacctcgccagagctaatccaaattgtggttaaccaaaccaacatcttggcaacagcatttcaactattacagaattggtacaacccagcaggggcaaccaacgttcaagtacctacagtccagcaacagtacaagttatcagaatttctcaaaactgagcctccaacctttgccattaccgtcgatcctatggaagccagtgattggttgcgcacagtcgagaagaagctggggttgattcagtgcacagaccaggagcgggttgtcttcgcaactcatcagttggttggaccggcttcagaatggtgggatagctacaaagcatcacgaccagaaggacataccatcacctggggcgagttttcagctgtattcaagagatcacatgttcccgcaggaatgatcacactgagaaaacgagagttccgctacctgaagcaagaagatttgaccgtcacagagtacctgcacgagttccatcgtttggcttactatgcaccagaagatgtggaaacggatgaagacaaacaagagaagtttctccaggggttaaaagatgagcttgtagtgcaactactcctagaggattatgaagattttgagaaacttgtggacaaagccatgcaactcgaaagtgagcataatcggatgacgaactgcaagagaaggattgtcaacatcccagtatttccactgagccacttcagatcaccggatcttctgttgcgcatcaagagttcctaccccaagaagatggacacaatgcagacaacaacattagcaatactaatgctgatgataccaccaacaaccatggttcttgccccattcatgaccacttggatcaagagtgcaatgtcaacagcattcaccaagatatcgatgatagtatcaatgaaggcacccagaatgacaaccctagcaattttgactctgagaaagactccaatggtgatagcaactatggtttctctgaaaggcagcaggctcaagtaccacatcgtcaccagaatcatccacaactctcggagtgaagagtacttaattgacaaaggtcaaaagatgattgatagaagatatcgaaaaagatgtttattaccgggcaaagaagtaggtcgaaaggtgattgataagagaaatcgagaaagaacacatcaagtgggtaacttgtatgaggttgacaccaaggatatgaactatgagaagttctggaacggaagcatcattaaactaccgcaacctagtctgagtcagctaaaaggtgcaccctggttcaagtcaggagaagagaagattccatccgcaacaggagatcgagccaagcagtccagagtggagaagttttgctaggcaagttcgttatagaagacgcgacggaagaagtcagacaagaagagaagaccgcccaacctatcttcatgctagcctcctcgaatctcggggacgagattcttgtaaggggggtggatttgtcacgtcctgataaattcatcccgaaataaaattcattcgccacctccccaccgtcgccccctctctcccacgttgccggccggcctccagccgcctctcccgcctcgccggagcgtcttccggccgcgccgtcgcctcctccagcatcgcagccgcctcctctcccacggcctaccctccgtttcgcgcggtgaccgccggaggcgcgttcccgccgtcgtccagtggcgtcgccaccacttctccgcctctggccgcctctgccacgtccccggagcgccggccgacgtcgccaccaccttcctcggctccacgacgccgctctcatccccggcatcacctcctcctcgcccgaacttcgccggaacgccgtcgtctccgcgccggcctctccttcctcctcgtcggctcgtcgccccgctgcaccaccacccctcctcctctcagccgctgctgcctgccatcatcgtcgtctccgatcgttctcgccgtcgacgtcccgtcggtcgcccggctcgtcgtctcgcggcgccgcctccgtcatcgtcatcgtagcggcgtgttccacgccatcctcaccgccgtgcagccgctgctggctgccctcgtagcctcctcgccggccccggtcgtcgtcgtcctcgtcctctcgtcgttcccgatcgtcggggcgttcgtccctccgtcaagccgttctcgttcgtcgtcctcgcttcgtcaaggtcgctgcagcccccgtcatcgtcttcgtcctcgcctccgcgtcgtcaagcctcgcgccggccgcgtctcgcccgtgtatcggcgtcggcagtcgttcgcgtgtgcgggtggtgaccgtgtggtgtctagtggagtccgtttgtcggccactcgcttcggttgacacacggggtccgcttccgtcgacccgtggaccgtctctgtgtactcggttttctttttatgtattgttattgcttctttataggcttgtagctttgcttgtgtgcttcgcgtagctttcgtcgttccggaggttcccgaagcgtggttcgtggtcgtcgccgaaggttcggaaggccgttctctctctcttcctctttcaaaacccctaaaacctgttttcggtggggtttgggtgcatgccagttgtgggaagtagcaccccggccactataaggactaaagctcgggcctctgttgcaaagcactaccgtacttccacatgtctaatgggtaaggcttagtttgtggctcagtctagtcataaacaaaagtacacggattggagatggatgaagtcgggcgtcgatggacattccccggcttttcctgggacggggattaatacactggcgttcgggaaaaggcaattttcccggtcgcgacaagctggtatcagagccatctcgactgtaggataagccaagtggataagcaactcatcagttggttggaacggctccaccagacgcggcgacgcttggggcggcagacctctccctgggcgatcttgagctgatgcagctgcgcctccaccgcgtctaggtccttcttgagctgcaggttctcctgacgcagctccaggatcttcatgttgttctcgaccatcccgcggcgtaccatctgatggaagtcgatacgagccgcgtcgtacgcctccaccatgcgtgccaggtgcacgatggtagcgtcatcctccgagctagcatcccggaaggtggcgtagtcgcgggctcctccgcgacgaggccaacttgtcacgaccggaaataacccaacgggcattccttacgtgcgtgcatgaatccttgtcccaggaggcaaggcccagcacacacaaagacaaacgagaaacagcggaagactagggcgacgaccacaggcgcttgacggcaggcacgagctagacaccaaagccttcatcttcaaggagctcctcttctgggcttgggaaaaatttgagcaagactgagtacaaccaccgtactcaacaagacacacccacaagtgccacaagacacatcttcctcacgtgcaaccacgtgccacataccaccacggtatacggacggaagacgtgacatagttcccaacccatcctagccataaacaagagtaccgacccaatccccctacggccgggacacccgggacaggcaggcaggactgagccccctagcagcagggcaccaaccctctgccatgacatctcgactaccgggccgcagctcgtgtagccttcatttgccctggagaatgtccatcgacccccgacttcatccatctccaatccgtgtacttttgtttataaccagactgagccacaaactaagccttacccactagacatgtggaagtacggtagtgctttgcaacagaggcccgagcttaatccttatagtggccggggtgctacttcccacaactggcatgcacctaaaccccaccggaaaacagattttaggggctttgaaagaggaagagagggagaacggccttccgaacctttggagacgaccacgaaccacgcttcgggaacctccggaacgacagaagctacgcgaagcacacaagcaaagctacaagcctataaagaagcaataacaacacataaaaagaaaaccgagtacacagagacggttcca

SEQ ID NO: 52957 - DNA, 1903 bp, Oryza sativa
  Clone ID: PAT_MRT4530_55202C.1
acacaatcgcccacgtggcctggcaccctcggggggcgtcgggcccgagggtgatgtgttcgccctcctctttgtctccccgagggggtcggaccgctcccgcctcggccccgagggccgaggcgccccgaccccttacagccatgttcccacgtcgcgcctgcttccggcggaagtggagggggctcagcgtgtgttttctgagctctcgcacttttctgtgtgcgccaagtttttcttgttcagcctaatggccgggcaagcaaaggcgcacgacctctctccgagtgtgagcggcgacgacggggagccaaacccacgccgtcgagctcgtactccaccgcctcctccacaccaaagtcctaagcagggggaggcgctcgagagggtcgatagatccgcggcttcaccgatcgcgggcgatggaggagaacggcgagatggggagcgttgcctcctcgtctatggcgacggcagcacgccccagggcgcgcttcaggctgctggcgcgctcctacgtcactcgcccgtcgtccctgacccggagtctccagcccagcgatggctggacgacgtggccaacttggtcatgacggcacagcagcgcctgggtgctggtggacggtcctccaccaccaggacctccggcgccgctaccactggctccgtgtcgtcaaggcggagggcgcggcgagcggcggctgttgcacgccattcggctgctactccctcgtcggcgccttcgactcgggacgatcagcgtggagagccggatgcccgcctcgacatcgagcgccggcgtaatgaccggcgtgctccccacgcgacggagggcgcctcttcgtccagagtgtcgcctcgacatggacacgaggaccagccctccgtgcccccggctggtggtgtcggctgtagagcctttgtggcgagtcttcggaatgtccgttggcccccaaggttccgacccaccatcgctgagaagtatgacgggagcgtcaaccccaccgagtttctccaggtctatacgactgggattgaggccactgggggtgatgacagggcacatatccgcgcccaggcgaagaagcggacttgcacgcagtacagcgaggggatgatgaatcacttcgctcgtacattcagcggttttgccaagtccgcaacaccataccatgcatccctgcacacgcgctcgcggaccgagtggctcgcaaggaggaggcctggacctggaacccctccggttccggagtggcagcttctgccgcccccggatccgccgctcagacagggcagcgtgacaggaggaagaagaagaggtcggtccattccggcgacgagggtcatgtcctcgccgtcgagggcgctccgcgggccacccgaaaggggaggcctgcgagcgacaaaaagaaggaagccgacgctccctgacctcggctacttggaagagcgaaggtggcgcgcggcccttcgagccgcgcgctaccagcagagcctgcggcgctaccatcagctccacgtccgggtccgatcactctgcgtcgacgacctcgtcctacgccgcgtccaaacgcgtgctggactgagcaaactctcaccaatgtgggagggtccgtatcgagtgatcggcgtcccccggccgggctccgttcggctggccacgggcgacggcacagagctgcctaacccgtggaacatcgaacaccttcgtcgcttctacccctaaagggggaggggctcgggtcggctaaaatcgccaaacggggcccagaaccgagccgtgccccggggcgtggtgaactccgggggggaatcggcaaaaacccacaatcgggtcacccataaccctcggtcatcacgctcccggcctggccagtctcgacatgtggatctccccaggcac

SEQ ID NO: 52958 - DNA, 2179 bp, Oryza sativa
  Clone ID: PAT_MRT4530_55203C.1
aaaaaaaatggctaatataatcccccgaaatttccactcatcataagcacaaggagtccacaaccgccacaaccatcacaagcactactgccatgacaatctgcccgaggctcgccgccgcggcggcccgccggtgcgcgctcgacggcttgggtatcgtgtccgggagcgcgcactcctcgccgtcgaagtagagcctcttggggaagccttcccccttggcaatgttgacgttcggcgcgtccttccgcgagaaggagatgacggactgctgcttcccgggcacccttgggtcctccggcgtcctcccgtcggtgatcggctcgaggtaggtgagcccgggcaacccctgcatgaagatgctgttgttgaacggcgcccccatcttggtgccgttgaaggagtagacgttctcgtagccgctgtagtggtcgcgcatggtgacggcggcgaaccagtccttgaacgtgtagtcctgccagttgaagatggtgatccgcgccgcccacccggacttgtagttgttcatgatgtgccagttgacgctgaggccgcagttgtcgccgcagggcatcgggttgggcacgcggcggtgcttgatcttggcccaggcgcgccccttggccgtgcggttgtcgaacgggatgagcagcgcctcgggcggcagcggcgtggcgcgtgcgtccgcgtcgcacgtcgccgtgtcgttgccgccgccgccgccgccgccgcagccgcaggcgcaggtgttgcacggcacgacggagtcgtcgtagtaggcggagaaggagacgcagcacttggcggcgcgcctcttggggcgggtgatgttgcacgccacctgccacgacgcgacggccggggtggacgacatgagccccgtctggtcggggaacaccacggggctcaccctcaccggctgcctgcacgcgtactgcgggttcagcttcccgatgatcttccagttctgcggcgggtacagcgccgtccggttgaggtccggcggcagcttgaacacctgcatctggaacacggcccgcgacttggactcgtccatggtgggcggcagcagcgtgccgttcttgcagcagaaggggatgttcccgacgtccttgtccttctcgcgctccggcgggaggtccacgacgatgggccgcttctcgcagctgtacgccggcgtgaagtcgaagtccttgtagtagccggcggcggggctgtacacgcaggcggggccttccttgttgagcgtgtacgcgccgcgcattttgtagatgaactcgccgcgcttccactcccaggtgaggttccagttgtcgagccggccgatggggctccagttgtcgatggtcacctgcaccatgtagttgttgccgaacgcttggaggacgtcgtaggcgatggtcaggtcggccttctgccgcggcaggtagcgggtggtggtgttcaccttcttggccttgaattttgggtccttgacgcagcacacgtacatgacgctctgcttgtgtgtgggcttggggcaacggaacccggggttggacagcttgatggtcctgggcatgggcgctgtgggcggcttgacgccgaactgggtgccggtgatgtcgatctgggcctggatctgcgtcaggtcgccggcggtctcgatggagttgaggaggttggccatggggtacccggcgaaggtgacgccgccggagacgttggcggggaggtcggtgccgtcgaggagcacggcgccgccgacggtcacgaggatctccttgtgctggaacccgacgaacatctgccacgccttgaggtcctcggtcatggtgttgagcaccgtcgccgtcgccttgaacgcgaacgcctgcgccgtcgcgttcttggtccgcgggtactccttctcgcgctccgtgaacgtgtacgtcaggaacgcgccgttgcacgcctcctgcgccttgaacgacggcttctcctcctcctcctcatcctcgccgtctccgccgccgccattgttgtagtcctgcgcacgcgcgccggcggcggcgacggcaaggacgacggcgacgcctaacaaaagcgccgcccaccgccgccgaagcggcattggcacccccgtcctctgcccagctaagcgcgaacggaggagaggcaacaagcgttcgccggctcgctcgaccgatcgaccgacgaa

SEQ ID NO: 52959 - DNA, 1152 bp, Oryza sativa
  unsure (1)..(1152): unsure at all n locations
  Clone ID: PAT_MRT4530_55204C.1
acgagtagagtgtccactagttgaggttttgtttaatctagggtgaacaagccgagggagagggcgcgcggaccgggtccacgggagtggggcccacgcgtcagcctctcggtccacggtggaccgggagcacgcggctggcggcggccggcgccgtgggtcccacgcgtcagccgcacccgcgggcgcgggcggctgacggccgggcccacttggcagccgcgagggcacgcccgaatgcggtctcgcccggacaggtgtcgggtgggggaccccgcccgcgccccgatggtcaccgccggcgaccaccggcgcgttggagcggttcccgagagagaggagggaagggggaagcgaatggaacggtcttcggctcaccccggtcgacggcgacgacgggaacggcggccgaagcggaagaaggcggcggcgcggttcgggacggcgaggacgacggtgctccgccggtcggcgagcaaaccgagggcgcggacgaggtcgacgggaccgcggcgaagccgatgaaggtcacgccgagtgggaaggaagtccggagcgacggcggcggcgaaccggagcacggcggcgacggcggaganaaggtgcaacggtgcgggctcgattcccacggggagagcgagcggcgagcggcggaaacggaggaggagagcacgggagacgtttaaatagcaccgggagaaggagagcgtgcccggaaagggaggaaacgggcgcggagatctcggccgccattgattgcgccggcgaggtttgcgggatggaaatcggacgaatccgagggagagagagaggggaaagtgggggaattgggagagggaatcgcggggaatgattcccccctcattatggcgcgcggggacggcgggatgcggcggaatccgcggcggcggcggcgttagggcacgggcgagcggcggctgcggcgggaggaaggcgatgacaggtgggccccacccgtcagcgagagtggcgggcgggcccgcctgtcagcggcgcgcgcgcggggggggaggagccgatgggccggagggagaggagagagagagggagggaagtgggccgagccggcccaattaaggaagggggggaaagaagacttcttttagggtttttctttttataaaccttttc

SEQ ID NO: 52960 - DNA, 1081 bp, Oryza sativa
  Clone ID: PAT_MRT4530_55205C.1
tcactcctgcttcacagccggcttcactgcttcctccacttcactcgcagatcctgcagtcttctggaacttcggcaaacaactgacgatgtcctcttcttcactgaccgggtccacggggagtggggcccacgcgtcagccccacggtccacggtggaccgggcgcacgcggctggcggcggtcggcgccgtgggtcccgcgcgtcagccgcacccgcgggcgcgggcggctgacggccgggcccacttggcagccgcgagggcgcgcccgagggcggcctcgccggcgcggccgacgggagcgacgcgcccgcgccccgatggtcaccgccggcgaccatcggcgcggcggagcggcgcccgagagagaggagggaagggggaaggcgaacggcggtcctcggctcaccccgggacaacgacgacgacgagaacggcggccggagcggagggagacggcggcgcggctcgggatgacgatgacgacggtgctccgacggtcggcgagcgaaacggaggcgcggacgaggtcgacggcgatgcggcgatgccgagggaggtgtcgccgagtcgggaggaggagcggagcggcggcggcggctaaccgaagcacggcggcgacggcggagagaaggtgctacggcgcgagcacgattccgacggcgagagtgagcggcgagcggcggaaacgaaagagcggagctcggggagggtttaaatagcgccgggggaaggaaagagcggccggagagggaggaatcgcgcgcggaagattcggctccattgattgcgccggcgacgattacgggcttgattcgaacgaatccgagggagagagagaggggaaagagggggaaacgggggaggggaacgcggggggcacgggcgctggcggcgggcgcggcgagaggagggagatgacaggtgggtcccacctgtcagcgagagtggcgggcgggcccgcctgtcagcggcgcgcgcgcgcgcggggagccgatgggccgcggaggagaggagagagagggagggagagttgggccgagccggcccaagagaggaaggggggggaaagaagacttc

SEQ ID NO: 52961 - DNA, 429 bp, Oryza sativa
  Clone ID: PAT_MRT4530_55206C.1
atgaagatcggtggagaggaagaagcaaggctgaaagtagatctcaaagagttgcaagctgttggtatttcttgtggtcgccggaaaatccgcaagcgcacggataccgcagtagcatttcacccaagagaattcaaagggtatcgtatttatatttccgtagggaagcggtggtgtaaagttcacgatcgaaattggtacttaacgaccatcaccaacaccaccaagctaaacctttgctcatcctcgagtaaagtaatgtcggaggaggttaacttttctcaggagaatgatatttgcgcttacatttggggaaatcttaagtactcttctcaaaagttttatgccccaaactttcaggccatgcaaccacctattcatttccattggttatggaagagaaaggccacctcgaaggttaaagtttga

SEQ ID NO: 52962 - DNA, 5892 bp, Oryza sativa
  Clone ID: PAT_MRT4530_55207C.1
atggccgccggcgtcctcatgacaaaaccgttcatggctgctgcggctgctgctctagtcagcttgctcgtcatgctgcgctgcttgcctagcgtcgtcgctaccactgtatctttcaactactccagcttcagcaacgcgagcaagaacatcaccctccagggcagcgcggcgctcgccggcgccgaatggatcgagctcaccaaaggcaaagggaacaacctgtcgagcggcggcaccatgggccggatggtgtacacgccgccggtgcagctatgggacgccgccaccggcgaggttgccagcttcaccacgcgcttctccttcaacatcaccccgaaaaacaagagcaacaagggcgacgggatgaccttcttcctcgtcagctacccgtcgaggatgccgtacatgggctacggcggcgccctcggcctcactagccagaccttcgacaacgccaccgccggcgaccggttcgtcgccgtcgagttcgacacctacaacaactccttcctagaccccgacgccacctacgaccacatcggcatcgacgtcaacgccctccggtcagtgaagaccgaatccctgcctagcttcatcctcatcggcaacatgaccgccatcgtcgactacaacagcaattcgagcatcatgtcggtgaagctatgggcaaatggctcaacgacgccttacaacctcagctccaagattgatctcaagagcgccttgccggagaaggtcgccgttggcttctcggcggcgacgggttcatcctttgagcagcatcagctgcgttcttggtacttcaacttgacgttggagcagaagcagccgacaggacaacattcgcgtggcggagttgtagcgggagccaccgtcggtgcaattctgttcatcgtgctcctcttcaccatggtagcaatcctcgtacgacgacgtcagagaaagaagatgagggaggaagaggaggacgactcggaaggcgatcccatcgtggagatcgagatggggacggggccgaggcggttcccataccacatacttgtcaacgcgacaaagagctttgcggcggaggagaagcttgggcaaggcggttttggcgcggtgtaccgtggcaatctgagagagctcggcatagacgttgccataaaaaggttcgccaaagactcctccaagcaagggaggaaggagtacaagtcggagatcaaggtgataagtcggctgcgccaccgcaatctcgtgcagctcatcggttggtgccacggtcgcaatgagctcctcctcgtgtacgagctcgttcccaaccgcagccttgatgtccatctccatggcaatggtaccttcctcacatggccaatgaggatcaacattgttcttgggcttgggaatgcactgctctacctccatgaggagtgggagcaatgcgttgtgcaccgtgacatcaagccaagcaacgtcatgttggatgaatccttcaatacaaagctaggtgactttggcctcgcaaggctcattgaccatgctattggagcacaaacgatgacccacccctcaggtacaccgggctatgtcgaccctgaatgtgtgatcacaggcaaagcaagtgctgaatctgatgtgtacagttttggcattgttcttctggaagtggcatgtggaaggagaccaatgaacctactggatgaccagaataatggcctcttccgactagtcgaatgggtatgggacctttacggccagggagccgttctcaaagcggccgacgagcgcctcaacggtgactacgacgcgacagacatggagtgtgtcttggttgttgggctctgggtagccttcctcctcgaatccgtgcccggcgagatcagagatagtgctttcgtctctcctgacagcttctatgttgtggcttctatgtcgattgtgttaggtgttgatcccttcatgaactccctcgaggaacgcgccgacggcaacgtgcgccagcacgcacacctgtggcacccacctgtctcaaccacgctgcgcccgctgacgtgcctcgtacccctctggcagccgctcgccggtgttgcgcagcgcccagagaaaccgcacaccgtcgtcgacgggaaggagaaggagcaggggaaggggaaggcccccgctctagccagccgtgggtgcacgcgacaagtggctgcggcagctgctcaagtcaagcttgccctgccgccatggagctcgcacccgcccagctcgcgccgaactcgccgacgcctcacccacacacgcggccgcggtaggcgacccctcctcccaggcgtggccggcgacacctcccccgcgcgcgccaagctcaccgacgcctctagcaccaacgaccagcgggaagggagaccgatggatctggctccgtgctccgccgccgttccagacgtcgccgtcgctcgggaagaccgttgtcgtggtcgccaagtcgtcgccgtcctcgtccgccccttcgccgtcgctggagatcgtcggagcttcgtcgcggtcgacaacccgaaggtttccgccgtttcctcctcgtcgccgtcgtcgttcgttgtttttccgccgccgttttggtcaccggtgtgttcgccgcgtcgtcctctacgtgctggtgccctccgtttgcgtcctcgcgccgccgttcgccggcgagcgtgcgccgcccgagccgtccgctccgccgagccgccgccgctgtcggtgacgtcattgctgacgtcatcggggtcgtccgccatgccgcgctacaagcctgagtacctgtttggtgttgagggttttgtccaggagttgcgtacgatgtcctttgccattggatttgggactgcccctttttatgcccagattcctcatgatcgtcatgaagagaagtgccgagtcaaagtcaccttaaacagcaatagtgaagatgtcccctcagtgatgttcgaagctggaggaagaaactacatccatgcatgtcaggaagtggcaaggatcgccataggagagctccgtgatcgctacagtgatcagttggccgatactgagtatcgctaccatcctcgtcaaccccagggaagtgaccgtggcagttaccttgagactgaaggaattgagaatgatgctaccacaaggcatttggttgagatgttgtgggctatggatgaaagtcgtgcggagactgtgttagcggctcaagatcgtgaagaccggaatcgtggtaagatttgcaagttagaggacaaggtggatcgtttggagaaggaactcgccgcattgaagggagaagcaccgccgcagaaggccaggattcgtctcaccgcaaggaagagagctctatttgtccctcgctatcaattggcgccaaaggttcgtgtggtggagaaagaagttgccccagctcaagcggatcctccggtcatcatcataagtgatgaagaagaagaatccaagcgcacccgttccaagattgagtgggtagcaactcaagatgatgaagacgagccgaacgagcctacaatcgacctccgatgcttggaagaactagataccactaatcctgttgaagctagtgattggctgcatgccatagagaagaagttggatttgcttcagtgtactgatcaggagaaggtctcatttgcatcacatcagttgcatggccttgcctctgaatggtgggatcacttccgcctgaataggattactgctgaacctatcacttggcttgaattcaccgctgctttccggaagacgcatataccatcaggagtagtgtctctcaagaagaaggagttcaggtcgcttactcagggatctcgctctgttacggagtatctgcacgagttcaatcgtcttgctcgttatgctccggaagatgtgcgcaatgatgaagagcgccaggagaagtttttgggaggacttaatgatgagctttcttacccactcatggttggagattatcctgatttccagaaattagtggataaggctattcgtcaggaggacaagtacaatcgcatggagcagaagaaacgtcggattgctcaattcaagacacaacagggaaataatcagaagccgcgtcttactttaggaccccagcccatgccacatggaggttcttcgtctgttgttcgtccgcagcgtcagttcttcaacaacaatgctggcaacaacatccgtaatcaagctccacgtcctgttgcagctccagcacagcaacaacctgccaagagggagcaaggcagcaagcccgtggtgtgtttcaactgtggagatccaggacattatgctgacaagtgtccgaagccccgacgcgtgaaggttgtccctgtccagaataactctgctgtaccagcatccaaggctcgtgtaaatcatgtcgctgctgcagaagctcaagatgctccagatgtgattttggtccgggagtatcctgatgtgttcccagatgatttacctgccaatgagttggcagaagttaagaggcaagtagatgatttgctacagaaaggatacatcagaccgagttcatcaccatggggagctccggttatttttgtggaaaagaaagaccatactcagagaatgtgtgtggactatcgtgcactaaacgatgtgactatcaagaataagtatctactacccaggattgatgatttgtttgatcagctcaaaggtgccactgttttctccaagatagatcttcgatcagggtatcatcagttgagaatcaaagaggaagatatacctaagacagcttttaccactaggtatgggttgttcgaatgtactgttatgtcttttggacttaccaatgcccctgctttcttcatgaacttgatgaataaggtgtttatggaatacctagacaagttcgtggtggtctttattgatgatattcttatctactctcgaaccaaagaagagcatgaggaacatcttcgccttgcattggagaagctacgagaacatcaactgtatgctaagtttagcaagtgtgaattttggttgtctgaagtgaaattccatggtcacgtcatctcagccggaggagttgccgtcgatcctagtaacgtggaatccgtaaccaattggaagcaaccaaagacagtttcagagattcgcagtttcctaggcctcgcaggatattaccggaggtttatagagaatttttccaagattgctaagcccatgacacgactgcttcagaaagatgtaaagtacaagtggtcagaagaatccttagaagcgaagcccactctaattgatcaagttagagaagcccaaattaatgatcctgatattcaagagatcaagaagaatatgagaagaggaaaagctattggtttcttggaagatgagcaaggaactgtatggttgggtgagagaatctgtgtccccgacaacaaagatctaaaagatgcagttctgaaagaagctcatgatactttatactccattcaccctgcgccgtgtgccctagcttcgccgtcgccgccgccgctccagccgtgcgccgccgtcgtttcagccgtcgccatcgctcgggaagaccaccgtcgtgctcgccaagtcgtcgccgtcctcgtccgccccttcgccgtcgccggagatcaccggagcagcttcgccgtcgtcgacccgaaggttcccgccgcttcctcctcgtcgccgtcgccgtccgttggtcttccgccgccgtttaggtcaccgtgccgccgttcgccggcgagcgtgcgccgcccgagccgtctgctccgccgagccgccgccgctgtcggtgacgtcaccgctgacgtcatcggggtcgtccgccgtgagccggtcgtggaccgttcgatctcggccgtccgttttggatggatcgatctcggccgtccgttcgcgtga

SEQ ID NO: 52963 - DNA, 1067 bp, Oryza sativa
  Clone ID: PAT_MRT4530_55208C.1
tcggatttattgcgttagccgaggggaggggcgcgcggaccgggtccacgggagtggggcccacgcggcagcctcacggtccacggtggaccgggtgcacgcggcttacgccgggcggcgccgtgggtcccacgcgtcagccgtacccgcgggcgcgggcggctgacggccgggccccacatggcagccgcggggcgcgcccgaaggcggcctcgccggcacagccgacgcgcggcggagcggcgcccgagagaggggagggaagggggaagtgaaacggcggtccacggctcaccccgggtcgacggcgacaacggaaacggcgaccgaagcggagagaggcggcggcgcggctcgggtcaacggggacggcggcgttccggcggtcggcaggcgaaacggaggggtggacgaggtcggcgaggtcgcggcggagccgaaggaggcgacgccgaggcgggagaaagtccgaggcgacgacggcggcggaccggagctcggcggcgacggcggagagagggaacgacggcgcgagctcgattccgacggggagaaagagcggcgagtggcggaaacggtggagggaggcacggggagcgtttatatagtgttgggagggggagagaacggccggatgagggggaatcggccgcggaagatccggccgccattgatgcgccggcgaagtttgcgggagagtttccaaacgaatccgagggtagagagagagggtaaagtggggggaaagggagagggaatcacggggagtgatttccccctctttattgcgcgcgggggcgcgctggatgcggcggaatccgcggcggcggcggcgctagggcacgggcgaggcggcgggtgcggcgcgaggtaggggatgacgggtgggccccacccgtcagcgagggtggcgggcgggcccgcccgtcagcggcgcgcgcgcgggggaaggccggatgggccgcgggggagaggagagagagggagggagctgggccgagccggcccaagagggggaagggggggaaaaagacttttttagggtttttctttttataaaacctttt

SEQ ID NO: 52964 - DNA, 295 bp, Oryza sativa
  unsure (1)..(295): unsure at all n locations
  Clone ID: PAT_MRT4530_55209C.1
aaagctggagccttcccaagaaggnccccctccaggagcacgaaacccggctgctgtgaagcgtagcttcctgcatgaattctcagtggattcgtaaggatcgttaggttcttagctgctgcttcttttctttctttcttcatgaatgttgcatagaagcaagaactaatggtttacacgtctgttggtagggatgttataatgtgaggtctgcttttaggtgatcttgttagtagcattgtaggcttgccatgaaacctatgaaaatgttggttgctaaaaaaaaaaaaaaaaa

SEQ ID NO: 52965 - DNA, 312 bp, Oryza sativa
  Clone ID: PAT_MRT4530_5520C.1
atgcccttccatccatcatccttccccttccgaagctgctgtcgacaagggcgggatggccagcaacgccgccggatgagcccactgccgctgccgacgagggcatttgggtgcgcgggtgcgcggagcaacggaaccaccggcggctgcccctgtctgccgccgtcggacgacattgacgaggcggaggcggaggtgaggaactgctgctgcctctccaccgcgtccctctccgtcttcgtcgccggcgaggctcgccagcagctgctgctgcctcttcaccacgtcccccttcgcctccgtcaccggtga

SEQ ID NO: 52966 - DNA, 2372 bp, Oryza sativa
  unsure (1)..(2372): unsure at all n locations
  Clone ID: PAT_MRT4530_55210C.1
atggcggccggacctcccgcgccggtttccttcccctccggccgctctctcccccttccaaccctatttaaacccttcccgcgcctccctcgcccgtttccgccccttgccgcaccgtctccccaccagaatcgagctcgcgccctcgccctctctctcctccatcgccgatgacctctggccagccttctccgctcgccgggaccgtctcccgcctcggcgtcgcctcctccggcttcaccgcattgccgccaaccccgtccaccacctcgccgagctcgccgaccgccggagcgccgtcgtccccgtccacccgagccgcgccgctgccttcctccgctccggccacctttttcgtcgtcgccgtcgaccttgggtgagccgtggaccgccgcctcttttcccccttcccttcccctctctcggccgccgctccgccgtgcctatggccgccgccggcgaccataggggtgcgggcgccgcctcccgctggccgcgccgagtggccgccttccggcgcgccgagtagccgccgcgtggggcccggccgtcagccgcccgcgccctcgggtgcggctgacgcgtggggcccacgacgccggccggtgcgagcctgggagcgcctggtccaccgtggacctaccacgggtactataaggattaagctcgggcctctgttgcaaagcactaccatacttccacatgtctagtggggcaaatgaaggctacacgagctgcggcccggtagtcgagatgtcatggcacagggctggtgtcctgctgctagggggctcaatcctgcctgcctgtcccgggggttccggccatgtgccttttgtatcatgtttgttcggtgtaccccggcttttcctgggacggggattaatacactagcattcgggaaaagaataagtgaaacaaacaacacatcaacaagaagagttagttcctttaaggtcctgtccctagttctgatgtttaacagagaaaaaggaaagaatgtcagcgggtatgcctccagtaactcaagttttcaactcaatccaccactagcctcaagagagttaacaagggcacacccttggtccattccaagcatgctgcttagttcacagcgaccattggttggaagtcgagaccaaaatcagtatgtgtttgatcgagcatttgccacccaggtcaatgagcttccaatgccagaagagcatgtccccttttgtcatgattgtagagaacaaggacactatgcccttaattgtccatgggtatatgccaaagaagccccttcctttggtttagcagggcagacatcgctaaaccagcctcctcgcaccaagtcaagcttgcagcctagtgtacaaagaagagagcccattagagagaatccattgaatcccggaaaatgctttcctcctagcctttcgtaccacgtggggtcacgtactaagcaagccaaaggcaagaagagtaagaatcagaagagaaaagcaccgatgcgaactgaagaagaagtacgtaagatgactattaccagcaccgaatggcctccagcagggataactattcctagacgtcaaagaggaaataccttccgaggtgcacgacagttgacccagcacctcctaagccatggcggcagagtatctgatagtgaagggtcagatcaagtctcctcggattatgaagatgagtctctccgacatctcggcgaggaagagatggaatcaaaagcatgcccccgttgtggagaaattggacacgttgctagcatgtgtctcacactttgccctcattgtgaggaagaccatccaccaggtggatgtcccacccgcaaggtcacatgttttctatgcgaaggtacaaaccatgtgcccaaggattgccaactcagtgtgttgttgaccaagactgcagaaatccaacgaacaaccctacgattgtctcatcagctagtcagctccaacatcaacatcgacgatatcatccccagcaccaatgctcctcctgctgcacctgactctgcagtaaatcatagcaataataccttcaacaccaaccattctctgcaccgacggcctcagcaaagaattgtcgtcgatggaagaagttgtgtctctccccgacgagctgatctcgacgcatgacatgaagtgggtaacttgtatgaggttgactccaaagatatgaactatgcgaagttctggaactgaagccccatcttcaagtgccgcaacccagtcgaagtcagctatcttcttgctagcctcctcgaatctcggggacgagattcctgtaagggggggtggatttgtcacgtcaggggatcctctagagtcgacggcgtgcacaccaatgagatctcatnngcacgg

SEQ ID NO: 52967 - DNA, 153 bp, Oryza sativa
  Clone ID: PAT_MRT4530_55211C.1
cgcctacgtacctacacacagacacagtatctcgctcgctagctaagccgtcgacgtgacacacactcacctgacgacgtagggaaggaggggaaattatgctaactgtagcgcctagcacttgatttacttatggtgtgacgtgtctgcatt

SEQ ID NO: 52968 - DNA, 1467 bp, Oryza sativa
  Clone ID: PAT_MRT4530_55212C.1
atggacatctctaggacaaatgaaggctacacgagctgtggcccggtagtcgagatgtcatggcacagggctggtgtcctgctgctaggggctcaatcctgcctgcctgtcccagaggttccggccgtaggtggggttgggtcggtactcttgtttatggctaggatgggttgggaactatgtcacgtcttccgtccgtataccgtggtgatgtttaacagagaaaaaggaaagaatgtcagcgggtatgcctcaactaactcaagttttcaactcaatccaccactgtcctcaagagagttaacaagggcacacccttggtccattccaagcatgctgctgagttcacagctaccattggttggaagtcaagaccaaaatcagtatgtgtttgatcgagcatttgccacccaggtcaatgagcttccaatgccagaagaggatgtccccttttgtcacgattgtagagaacaaggacactatgccctgaattgtccatgggtatatgccaaagaagccccttcctttggtttaatagggcagacatcgctaaaccagcctcctcgcaccaagtcaagcttgcagcctagtgtgcaaagtagagagcccaatggagagaatccattgaatcccgggaattgctttcctcctagcccttcgtaccacgtggggtcacgtactaagcaagccaaaggcaagaagagtaagactcagaagagaaaagcaccgatgcgaactgaagaagaagtacgtaagatgactattaccagcaccgaatggcctccagcagggataactattcctagacgtcaaagaggaaataccttccgaggtgcacgacagttgacccagcacctcctaagccacggtggcagagtatctgatagtgaagggtcagatcaagtctcctcggatgatgaagatgagtctccccgacatctcggcgaggaagagatggaatcaaaggcatgcacccgttgtggagaaattggacacgttgctagcatgtgtctcacactctgcgcttattgtgaagaagaccatccaccaggggagtgtcccacctgcaaggtcacatgttttctatgcgaaggtacaaaccatgtgcccaaggattgccaactcagtgtgttgtcgaccaagaccgcagaaatccaacgaacaaccctacgattgtctcatcagctagtcagctccaacggcaatatcgacgatatcatccacagcaccaatgctcctcctgctgcacctgactctgcaataaatcatagcaataataccttcagcaccaaccattctctgcaccgacagcctcagcaaagaattgtcgttgatggaagaagttgtgtctctccccgacctactccaggccaagcaaagggcaatcaacctcaggagggcgataccaagcagaaaaccgtcatccgcttcaaacagcaatcagaaggaagcttctcctgtgaatga

SEQ ID NO: 52969 - DNA, 381 bp, Oryza sativa
  Clone ID: PAT_MRT4530_55213C.1
atgaaatgcttccaaagatccgcgcaggaagatattgagggaggaaggtgcaccagccatgaccgagcagatcctttcaatgttgccagcaattacgattgtcatctcgacgattgtctctacaattctggtcgcgaggttgtcggtgtccggcatcgtgttggtcttgttgctcccgccttcggccgttcaattggtcgcggagatcgtgagcattttgatagggaggcggttgatgagtatgtcgtcgtggcgatgcgttctcggggatgcgatgctcactgttgttggcatagggccgttggcagcgttagcgtcctcgagaacctcatcgttctggagagggtcttgagggggcggaggcccagcatcagccactaa

SEQ ID NO: 52970 - DNA, 6275 bp, Oryza sativa
  Clone ID: PAT_MRT4530_55214C.1
ggccggctcggcccatctccctccccctccctctcctctccccgacggcccatacggcctctccccgcccgtcatccccttcctcccgccgctcccgccgtctccacgtgcaataaagagggggaaatcactccccgtgatcccctctccctttccccccattttcccctctctctctcgcgttcaaacgggcggatttgcccccgcaaatctcgccggcgccattgatggcggccggacctcccgcgccggtttcctcccttccccggccaccctctctcgacccggctctatttaaaccctccccgctcctcctccttcagtttccgcctctcgccgcccttcctcctcgccggaatcaaggtcgcgccgtcgctctctccctccgccgtcgccatcgagctccggtccgccgccgtcgtcgtcccggatcacctcccacctcggcgccgcctccttcggctttgccgcatcctcgccgacctcgtccacccctccgtttcggtcgccgaccgccggaacgccgtcgaccccgtcgacccgagccgcgccgccgccttcctccgctccggccgcctttttcgtcgtcgccgtcgacctagggtgagccgtggaccgccgcttcttttcccccttcccttcccctctctcggccgccgctccgccgtgcctatggccgccgccggcgaccataggggcgcgggcgccgcctcccgccggccgcaccggccttggccgccctcgggcgcaccgagtggctgccgcgtggggcccggccgtcagccgcccgcgcccttaggtgcggctgacgcgtgggacccacggtgccggccggtgtgagcccgggtgcacccggtccaccgtggacccacctcggccatataaggaccggtcttcgggcctctgttgcaaagcactaccgtacttccacatgtctagtgggacaaatgaaggctacacgagctgcggcccggtagtcgagatgtcatggcacagggccggtgtcctgctgctaggggctcagtcctgcctacctgtcccgggggttccggccgtaggtgggattgggtcgatgtacacctctgatcagagtataatctattcgaatagccgcgccctcggttatgggcaagccgagcaatgtacccaaatggccggcagcatcaatcgtcgtggtctggacctgactggcttcgttttggagctgcggggcatgtgcgttgtcctggggtatccgcatggagtggactaccagggcaagcagctcccggagcaggagggtgacgatgcagagccccacgctgcttgggaggttactgcagtgatcctcactggctcacccgagaggacttcgttggcagtcaccgcgggtggagattccttctccgccgcttgccagaacgccgcactcctcgccatcggcactcttcaccagcgctacccggacgagttgcagcactcgccctaccgctaccaccctcgccgcggaggagcccgcgactacgccaccttccgggatgctagctcggaggatgacgctaccatcatgcacctagcgcgcatggtggaggcgtacgacgcggcccgtatggacttccatcagatggtgcgccgcgggttggtcgagaacaacatgaagatcctggagctgcgtcaggagaatctgcagctgaagaaggacctagacgtagtggaggcgcagctgtgtcagctcaagatcgcccagggagaggtctgtcgccccaagcgtcgccgcgtctgccgcagcctgaagatcaccgcccgcaagagtacctccaggcccgagcttgttcgtcagtccctggcgtggacctgcttcgtcgagacccctcgtgccgagcccgcgcccgtggttcctcaggaggatggagtctccggcgttggcagcacggaggatgcgctgctgctcaccttccatggtgacaaccaggagaagtgctgctaccggtgatggcaaccaacccgtaggcagcaaccacaacaaccatggcagcccacctccacctcctcccccgcctccaccaccaccactagacaccaacaccatcctcacccaaatcatcgcccagcgggccaacatgatggctgctttcctccaccacatccaaaatccgccacaacataatgctccaccaccacccccacaacactctaaactcgccgagttcctccgcatccgtccacctaccttctctagctccaataaccccgtggatgctttggattggttgcatgccgtggggaaaaagttagacaccgtgcagtgcaacgatgaggagaaagtcatctttgccgctcactaactgcaggggcccgcatctctatggtgggaccacttccaggctacgtagccagaggggcagcctattacttgggcccgcttcaccgcctctttccagagaacccatgtgcccgtcggagtcatggcccttaagaaaagggaattctgagagttgaagcaaggcaaccgctccatgatggagtatttgcatgagtttaacaacctggcccggtacgccccggaggatgttcgtgaagatgaggagaagcaagagaagttcttggcaggaatggaccctgagctgtccgtgcgtctggtctccggggactatccggatttccaacgtctggtggacaagagcatccgcttggaagccaagcacaaggaactggagtcgcacaagcgtcgcttggcgaatttccgcaaccaacagggggctaaccaaagggtccgctacaccaatccctatccagggggatcctcctcgcagcagcagcagcagcagcaacctcgctccacgtcccgacctcaattcgtggtgcatgtcccacagccgcagcaacagcagagtcagcaagggactcgtgcgccccgtcctcctacgccagccgtgcagcctgttcaaggccgcagggacgctcaaggtcagcagcgtctgtgcttcaactgcttcgagcctgggcactttgcggataaatgcccaaagccgaggtgccagcaaggccaagcgcctccccgctccaacaacggtggtaaggatgtcattcggggtcgtgtgaaccacgtgacggccgagaacgtgctgacaactccagacgtcatcgttggtacgttcctcattcattccatccctgctaccattttgttcgactctggagcttcccactcgtttatgtctgtgccattcgtggggagaaatcagttgggggtagaaaggcttaggaaccctctgctcatcaccacccctggaggggttatgacagcaaagtattatagccatgccgttcctatagaaattcagggaattccttttctctcggatctgattcttctagacaccaagaacttggatgtgatccttgggatgaattggttggctcaattccaaggagtagtggattgtgcaagacgcactatcactctgtaccgagggccggaacaaccggttgttttctttgcacccccaacctctgtcggcagttcagaacttcatcagataaaactgtcggaaatccccatcgtcagggagttcggagacgtgtttccggaagaactacccggtatgccgcccaagcgagagattgagttccggatagatcttgctccaggaaccgctcctctgtacaagcgaccctaccgtatggcagcaaatgaactggccgaagtcaagaaacagttggaagagttgaaagaaaaggggtatatacggccgagtatttccccctggggtgctcctgtgatttttgtggagaagaaagacaagacgaaagaggatgtgcgttgactacagagctctcaatgaagttactatcaaaaacaagtaccctcttccccggatcgatgatctgttcgatcagcttaaaggtgccacggtattctccaagattgatcttcgttccggatatcaccagttgcgcatccgtgaagaagacatcccgaagaccgcattcaccacgcgatacggactgtatgaattcacagtgatgtcgtttggtttaaccaatgctcctgccttcttcatgaacttaatgaacaaagtgttcatggaatacttggataagtttgttgtggttttcattgacgacattctggtgtactcacaattagaggaagaccatcagcaccatctccgtctggtgttgggaaagttgcgggaacatcaattgtatgccaaacttagcaagtgtgagttttggttgtccgaagtcaaattcttaggacacgtgatatctgctaaaggagttgctgtggaccccgaaacagcgaccgccgtcactgattggaagcaacccaagacagtcactcaaattcgcagttttttgggtttggcaggatactaccggaggttcatcgagaacttctccaaaatcgctcgacccatgacacagttgttgaagaaagaagagaaatttgtgtggagcccgcaatacgagaaggcattccaaactctcaaggaaaggctggtttcctcgccggttttaatcttaccggatactcgcaaggacttcatggtgtactgtgacgcttcgcgccaaggattggggtgcgtgctcatgcaggaaggtcatctggtagcctatgcctcacgccagctacggcctcatgaaggcaactaccctacccatgatttggagttagccgcggtggttcatgctctaaaaatctggcggcactatctcattgggaatcgctgtgaaatatatactgatcataagagtttgaaatacatcttcacccagtcggatctgaatcttcggcagaggagatggttagaactcatcaaggattatgatgtgggaattcactatcatcctggtaaggccaacgtggttgccgacgctctatgtcgaaaaagccattgcaacactcttaacgtccgtggcattccagccaaacttaatcaacagatggaagccctgaacctaagcatagttggtcgtggattcttggctacgctggaagccaagcctaccttgctcgatcaaatccgcgaggcccagaagaatgatccggatatgcgtggactcctcaagaatatgaaatagggtaaagccgctggtttcacagaggatgaacacggaaccctatggaacggaaatcggcgtgtcaaggcagagcaccaacgaccggccggacttctccaacctctccaagtaccagaatggaaatgggatgaaattgggatggatttcatcaccggacttccaaaaacccagggcggttatgattctatatgggtagtcgtggatcgactaaccaaggtggctcggtttattcctgtgaagaccacctatggagggaacaaactagctgagctctacttcgctaggatcgtgagtctccatggcgttcctaagaaaattgtatctgataggggaagccaattcacctctcacttttggaagaagctccaagaagagctgggtacccaattaaatttcagcaccgcgtatcacccgcagacagatggacagaccgagcgtctaaatcagatcctagaagatatgcttcgcgcatgtgtcctagatttcgggaagacctgggataagagtctcccctatgccgagttctcctacaataacagctaccaagccagcatacaaatggcaccctatgaagcgttgtatggacgcaaatgccggacaccgctattgtgggaccaagttggggaaaacaagtgttcggggctgatatcctgagagaagctgaagctaaagtcagaaccattcgggataatctaaaggtggcacagtcccggcaaaagagttatgcagataaccgacgccgtaatctggaattcgtagtggatgattttgtgtaccttcgggtcacgccattgcgaggtgtacataggtttcagacgaaagggaagctcgcacctcggtttgtgggtcctttccgtatcattgctcgacgcggggaagtcgcttaccagttggagctgcccgtttccttgggcaacgtgcatgatgtgttccatgtgtcgcaactcaagaaatgccttcgagtgccgtccgagcaggccgactcagagcagattgtagtttgcgaagacttgacctacgtgtagagactagtgaaaatcctggacaccatggagcgcaggaccaggaaccgggtaatccgtttttgcaagatccaatggagcaaccacgctgaggaagaacctacttgggagcgtgaagacgagatgaaggcagcccatcccaatctcttcgccagttcttccgaatctcggggtcgagattccgtt

SEQ ID NO: 52971 - DNA, 169 bp, Oryza sativa
  unsure (1)..(169): unsure at all n locations
  Clone ID: PAT_MRT4530_55215C.1
cttaattaacccaattacccccttcggtttgttttttgcccccctttccttggnccacaaattagaccccttgctgctgtagacgaatctgtatacctaccctgtatgtgtggcctgtgaatcgactttggttactgcaaagttttgcgtataaaaaaaaaaaaaaaaa

SEQ ID NO: 52972 - DNA, 416 bp, Oryza sativa
  Clone ID: PAT_MRT4530_55216C.1
acacaatgtcaaaaactttataactctgaattatcatatggaactcttcaactgtctccgcttcgttcaacagaggcaatggaaaggcaagcttacaacttacaagctgcgttattacaagaacactgttggtataatttttcgtcgatgcaatggagctatgcaagtctgaaaagagcctctctttttatcttccttgctcctggctccagaacgattccgcaaaggaagcagtggatcaggatccggtttcattcccttctctttcctgcctgcacggtgcaaagcacgatgcttcttccagctcaacaaatggcaatttcacaccttttacattgcctccaatttcccggcaaggagctttttgacgtacttgccgagtttgtcggcctcgaggtttaccttgttcccaacct

SEQ ID NO: 52973 - DNA, 338 bp, Oryza sativa
  Clone ID: PAT_MRT4530_55217C.1
cattacaccattcatatgggtcgggttttttttcatattgtgtcttcatctcatacattctatttatacaattataagtactaagattattaaccacattaacacatacatgttccattattgatttatctaacatgcatcacccggtcatgcacttacaaacaaaaaatctacttgaaaaagtactgtatgtcgagcacgtatagtacgaagtaggcccagatgacacctgagattcctccgaagaagaagcctccgtttaacttgtcccattcatctgacgtctgcagcttgttgaccttcttcttgcagacggtgagcttcatcgttggccccaa

SEQ ID NO: 52974 - DNA, 371 bp, Oryza sativa
  Clone ID: PAT_MRT4530_55218C.1
gacgggatactgtgtcacaccccgctgatggttcgcagtggcgaaacatcgacagaacatttaaagactttggccccaagcaacctggtaacgacatcgatgtgtacctaagaccactggtcgaagatctgaaactgttgtggaagaaagaaggtgtccccgtgtgggacgaggacaaacaggaggagtttaacctacgagcgctgctgttcgtaaccatcaacgattggcctatacttagcaacgtatccgggcagtctaataaggggtacaagacttgcactcactttataattcggggtatccttccagacaatgtccgggcaacaataacaaagcaatgtgctttcatgaacgcaatttcgcagaag

SEQ ID NO: 52975 - DNA, 1302 bp, Oryza sativa
  Clone ID: PAT_MRT4530_55219C.1
atggatggcacgaggagcgccaagaggatgaagcgtttctcgggggcttgcccttgtccactgcccgacgacatcgtcgacgagatcctctcccacctgcccgtcaaatcgctcctccgattccgatgcgtctcgcggcggttccacgccaccatcacctcgtcacacctgttccaggaagcccatttcctccagcgaaagcagcggaacaaacacccaccacggctgttcatcaggccgccgttcggtcctcgacaacctttcttcgcctggcaatggcagtggcagcatctgatccccaggcccccggtagaggagatcatgaccgctagacatctgccacatggcacgatctttccgctcgccagcaagtcctgccatggcctcgtcctcctcaagatcaccggccaccacacgcactacctctggaacccttccacccgccacatcctgcgtctcccgggcacggacaacacgccgccgccggcgacctacggcttgggctactgctcggccacgcggcggcacaaggtggtgcgcgtggtgggttgccgctgctgctcgccggcgaccgtcgtctgggaggtcttggctctcgacggcgacgagccgtcgccgtcgagcagctggaggccgcccgccgccgcgtccacgacgccgccgccgcggcattggcattacccgcgagagaattggcgacgaggagccgcgctctgcaacggcggcgacctgcacttcctccgaggagacggcgacatcgtcacattcaacgtgaccgacgaatctttcggcgtgtcgtcgttgaagcctcctcctgagctgcaatctcgcgacgactttgagctgacagagttggatggctgtctgtgtgtgtatactttcacagacgtaaagttgcagctcgtggacgaggagccggagagtcctacgtgcgaaatatgggtgacgagagaagctgcagctggaagctgggagaagctgtgttccatcgaatgggtgagcgtgttgccgcctgaccattcgtgtctaaggtggtattggatcgccccgattcatatgtttagtgatggcaacaacgaagaaaagaagaagaaaaagatcatgtttgccacaggtacaggccatgtgttggtcttcgaccctagcgtcgggaccctggagattatcttctcgccggaggacgaagccgtcggcgaatatcacgattacagcaataacgaagtctctactttgggtttgtttgaggagagcctcgcgttggtgggcaacacaagtgaaaacatcgtcttctcgcaaccatag

SEQ ID NO: 52976 - DNA, 300 bp, Oryza sativa
  Clone ID: PAT_MRT4530_5521C.1
aaatatgaaagacaactttgcacacaaggccaacatgcaacttttatacacagacataatgtgggaatatgaacttaatatgaactttaaaagcattctcctgacacaggaaattaaaacataccccgcgggattgcacacacggtcaggtctctatcagccgtcagaaataatcacgatactgaactgccctgtttatgcctcgaatttattttttttttggggtctcccagccacgatgagaccaaactaacaacacctattggtgatcctcaaactgatggccatgatccaaaggat

SEQ ID NO: 52977 - DNA, 3272 bp, Oryza sativa
  Clone ID: PAT_MRT4530_55220C.1
ggaaaagttcaggttgtaattaacgtgcacaaggcagcgctgcaatttattgatggtgtaaaacaatatcatctacctcctgaacttattgaagaaggattctgtatcagcccagatgaactagcagcaattgctaacatgcgtgaagattatacaatgctcaggatgcatggtggaatcaatggaatatctagaaaaatcaaagcatcattggaagatggtgccaaggaaacagatatagcaaccagacagatgctgtatggagctaacaggcacgctgagaagccccctagaagcttctggatgtttgtgtgggatgcattgcatgacttgacactgattattctagtggtatgtgctctggtttctatagtggtcggccttgccaccaagggatggccgatgggtatttatgatggttttggcataatactcagcattttgttggtggtactagttactgcaaccagtgattaccaacaagctcggaagtttatggaactggaccgtgagaagcaaaaaatatatatccgtgtaactagagataagaaaacaaaggaggttttagttcatgacttggttgtcggagacatcttgcatctttctataggcgatgtggttcctgcagatggtctgtttatatctggtgactgcctaatgatagatgaatcaagtttgtctggtgagagtgagccagttaatatttctgaagagaggccttttcttcatgctgggaataaagtagtagatggggcagctaagatgcttgttactgccgttggtacgcgtactgagtggggcaaaatcatgggtactctgaatggagatggtgtggatgaaactcctttgcaagttaagcttaatggtgtggctacaataattggccagattggattggtgtttgctgtgctaacatttttggtacttctagcgaggttcttggctgacaagggaatgcatgttggtttgttaaattggtctgcaaatgatgcattgacaatagtcaactacttcgctattgcagtcacaatcattgttgtcgcagtccctgagggtctaccattggctgtgactcttagtctggcatttgctatgaagaagttgatgcatgacaaagcactagttaggcatctcgccgcatgtgaaaccatgggttcagcaagttgcatttgcactgataagacagggactttgaccacgaaccacatgattgttgataaggtttggattggtgatgtcaagtttgttggggacaaaaaaaattctgagctaaaaagcacgatttcagaaagagttatggcgatccttatacaaggcatatttgtgaatactgcgtctgaagtggtgaagggagacgatggaaaaaataccatcttaggcttggctactgaaacggcattattggagtttggcttgagcttggaagaacatttatatgatgactacaataagttgactagaataaaagtagatccttttaattcagttaagaaaaagatgtctgtgacaatacaattacctaatggaggcatcaggaccttctgcaaaggtgcgtcagaaattattctggaacagtgcaataccatccacaatactgatggaaatatagtaccgctgtcagaaatgcagaagcataatgtattaaatataatcaattcgtttgcttctgaggcattgagaacactttgcatcgcatttaaggatatggatgaatttcccaatgatcaacctatatcagatgatggttacacactaatagcagtttttggtataaaggatccagtccgtcctggtgtcaaggatgcagtaaggacctgcatggctgctggtattagagtaagaatggtgacgggagacaacatcaacactgctaaagctattgccaaggaatgtggaatattaacggaggatggaatagcaatagaaggacaacagcttaacaataagagctcagatgaactgaaggaactcctaccaaaaattcaggtaatagctcgctccttgcctatggacaaatacaaattggtgacaagcctgaaaagtatgtatcaagaggttgttgcggtgactggtgatggaaccaatgatgccccagcactgcacgagtcagatattggactagcaatgggtatcactggaactgaggttgcaaaagagagcgctgatgttataataatggatgacaatttcgaaaccattgtaaatgttgctagatggggccgtgcagtttacttaaacatccagaagtttgtgcagttccagcttacagttaatattgtggctctgattgtgaattttgtctcagcgtgcatcatagggagtgcaccacttactgctgttcagttgctatgggtgaacatgattatggatacgttgggagccttggccttagccacagaaccaccaaatgacgaaatgatgaagaggccccctgttaggcgaggagataattttatcactcggattatgtggagaaatattcttggccaaggtttgtatcagctccttgtgctggctactctaatggttattggaaagaaactccttagtattgaaggtcctcaatctgataaaaccatcaatactctcatattcaactctttcgtcttttgccaggaatcagtgctttattttaatggtaattttaccatccttgagaaggtatcgggaggtaccttgaggtactttctcaaggaaggtaaaatttctcttattttaacggttttcaatgaaataaattgtagggagatggaaaagatcaatgtcctccaaggtatcttcagaaactggatctttgttggtatattgacagctactgtcatattccaagtgatcatagtagaatttcttggcacttttgcaaacactgtaccattgagcggggagctgtggctgctcagcgtcgtcattggctcaattagcatgatcatctctgttatcctcaagtgcattccagttgaatttaataagacaaatactaaaccccatggttatgagttgattcctgaaggcccagagattctatagatgtaattttgttgaatatgatcatgtgtttctgaacatgatatactgaagagttgaagtagatgttataaccagcagatatgtgatgaagtatacggaataggaccaatcatgctgcaagatcagacagcttacgggatttatggtgttgattcaagatttcaagtagatatggctgctacatgagaatgtcgcagcaaatgtggactgcttggaggcttcgttgcaaagcgtacagtctgagc

SEQ ID NO: 52978 - DNA, 121 bp, Oryza sativa
  Clone ID: PAT_MRT4530_55221C.1
tttgtgtcctctggggcaaggagacggattatgtggtgctgcataactgtcggctggggcatacaccgatcatagtatggttaatgacttgctcggcttgatgatctttcttgacgtgtct

SEQ ID NO: 52979 - DNA, 513 bp, Oryza sativa
  Clone ID: PAT_MRT4530_55222C.1
atggcggcgacggcgccctctctatggcgcgtcgacggtgacgacggcgtcggcagcgtccgtgctccttctctccctcttcttcccgtcttgccggcacgacgcagcgacggcggggtgtggcggagacagccgtccctccccctctccctctccccgtcggcctcaacggtgaaggctttggcaagcctcatcgatgcccttggatccctacagcctcttggaccctccacgtccacggccaccacttcgttgacgtccatggaaaccatccccgactgctacctcaatcagcccttcccaccgcttgagaccacctcaaccggcacgccgctgcctagatatggcagaggcttcctgggttttccccttgccaggcgcaccgtcttccaggctacatgtctccttcatgggctaaccctagcgatggcgagctctcgagacaggatcacaggggagaagagagaagtgaggaagatgagagagaaggatgtcagtattatatatgaataa

SEQ ID NO: 52980 - DNA, 455 bp, Oryza sativa
  Clone ID: PAT_MRT4530_55223C.1
ctgggccgtcgtcgtgcagagggtgcaagggttgccggctcgttcaggagggcaagttcgtgtacgaggagtacccggcggcgagcgcatgtgccgtcatgtgatgtgatcatcttcccctcgccgcaatgtcatcgttgacattctctcgatctgtctctctttctttcttccatctgcatctgatctgaagctactagtggtttgttcggtcatccaactgcagcgaagaaactcttccagctgccatgttcgcatgcacggcagtttcttttttcctcctaagttaaactatttttgctggagcatttaaccctgtaaatttttttcagtttgttctacactttattttactctgtaatagtatttctctctttcttcctcctatgtaagttgtatttttcgtagaaatttgataaagatgatagatgtattatactaaaaaaaaaaaaaaa

SEQ ID NO: 52981 - DNA, 349 bp, Oryza sativa
  Clone ID: PAT_MRT4530_55224C.1
ttcccctcctcctccccgcgacgactcccactccactggtggccgctcccgcccccggactctggccctgaccgacggccgccacttgccggactactttttggccctcctgccactttcctgacggtgtcctgtcgtttcccctttttcttttttcttttttggccactttcttgtgacggtgctttctttgggttgggttcttgactccgtcgactttcgcgcctggccctcggcgactccgttcttgcgactcccccgcaccgttgcccgcgcggactttgttgtttttttttacttacttcttttttgttgtgactttgcggcgtcgtgttcttggtgctggctg

SEQ ID NO: 52982 - DNA, 6762 bp, Oryza sativa
  Clone ID: PAT_MRT4530_55225C.1
atgatgaagccgccatccaagacggaggtggagccatccaatatgatcctggtcacattggatgacttcgaaggagaagatcgtaaagctatggaggagtacatcaacgagttcacgcaggaggcgttgatgagggcaagcactaggactcgtcaaggcgtgatcatcaagcccgggccacgtcctaagctcactcccgactcggtaagcaatgatgaggtatcacaatctatccaacaacaaattgcatctacaatagattcatctatgcttgtttttaaagatcaattagatgcaacttttgagggtaaatttgatgagtttttaagggttaaattcggccctcttttggccgatcacatggtcaaaccgaaggaacggcgcacacggccggtcagaccgcgacacagccgtcggtccgaccggccagacggccggtcagaccgggtattaccccggcggtcagaccgggactcaggccggtctgaccgcgcctctggacgccggtcagaccgggcattgggccgaacatctgatcctcctatatctactactacaagcaatccccaagttcccccacatgttcctaatgcctataatgatgttgctaggggatatcctcccgatactagacaaggccaatataatcatattgcgccacaaacacaacctattaggccaccaaatctaccgctaaatcaacaagggcctaataatatggaggatataattagtgatattatgaggaatagattcaggatcgaaactaggaatcgtgctagaacttacaaaaagccgtatcctgattattatgacattatcccatatcctcgtggttataaaattcctgaatttacaaagtttagtggtgaggatagtaggaccacatgggagcatgtagatcaatttttagcgcaatgtggtgaggctaattggaatacatgtaaattacgcttgttttctttatctttgtccggtactgcttttacatggtttacttctttaccggcaaattctatttctacttgggctcaattagaacaaaaattttatgattattttcacactaatgaaactgagcttaagttgtctgatttaacatcggttaggcataaatgcaatgaatctgttgctgattatatcaagagatttatgaatgttaaaaaccgatgttttaatttgaagataactgacaaagatttggccaacattgcatttgatggattacttgattctattaaagagaaattgaatggccagatatttcttgatgttgatcatgtgttgcatgaagttctggctcaggaaagccgagtgaatgacgatagcttacatgctagtttagatgaaagtgcaatatcatgtgaaaaaggcgaagaggtgtgggtgaggaaggaagccaaagctccggaggtcgttgctatcaaagaggagtctcaagatgttcatgtacctactggagatgcgatggaaattacgcaagcaaaggagatcgaagccgacgccgtgactgtcaacattggtggtctaaccgagatagctggccggtctaaccgccagactatggccggtctgaccaaccctcctggccggtttgaccgacggcttgtggccggtctgaccggacctagaggccggtctgaccgaggggcattagagaagagtgagaaaattgagagcaacacaggaggttccacttcgaccaaaaatatgaagaatcatcatttggctcctggaaaacaaccacagccgaagtggataccttccggcttatctcgctctcaaaacaggaggcttcagcgtcttcgggccatgggtaaaaaagaaaaggagaccaaagatgtggagaacaaaacatgtaacaatttagatcctcgaacgacatctaggcaagtgtggagacccaaagagggttacgggttaggtataccccttacccttcgatatgcaccacatatcgacatggcatacccgcgcatacacgggcattatctgcatatactaaggaaatcttccacagtgtttaagtcctactcggacaagacagggtcgtcaatatatcgtgtaggcttcgtcgacaacagcgtcaacaccaacctcaaccacgggtttcctgcttcaacaacgttggtgtggactcaagtcggcgaaatcgtcttcccggtgtacaccacgatgccgatctcagccggtccatcaatgaccggaaacgagaacgcagtggctgcaacccaaggcgactccatgtcgaaggaccctcccgccgaagcagggaatggaacatcgacaacacccgagcttgagaaggattctaatgcggccgaaccttgtctttccgacaagaaccacgagccgacgagaacagcttccgaagcgacaaggtcctggtgtcctatccacaaaaccaggaaacatactttgcaagcctgctgggtcttcctcaatgcccacgccgaaattcgcgcctgtagagagcgtggaattcagcgcgtttctccaactcgtgatgtctattgtcctattcacaagacaaagaatcacgacctctcaagctgcaaggtttttctcagcgccataaagatgtcatctcctaaggtccagccatcaagcgtatcccttagagaggaagacaagagacagggaacgacgctgacctcagatcgattcgttggtgcgattgacatcgactcccacgaaccatcagttctacatctactcaaggactatggctcgtcatcaacgagtacaccatgcgaggtattggctatcgatgggaccagcacgtcagcacgcgctaatgccgaggcggagaatcaagtagttacaccggctcagcgcatcagtacccttaacacaatactgagggaggcaccttacgatcccgttctgaacgacgatcttgcgtggtggcaggaacggctacgagaatcagtaaccaacctcagccacacgttcgaaggggctgctgctgatgcacacccggaacagccaccaactggcggcgtcgatggcgaaaaccccgaacagcgggagtcaccctaccgagcaaccccttcaccccgcggcactggcgacctcggcgatcacctgaacggccgccgagaagcacgtcgcacacaggccaacggaagccgctctcgacatcacatccctttacggcatcacgataatgaagaacgagaaggccgctcgaacgaagaccgagaccgtgatgatcgcgacaatcgtgagcggcgggcgcgggcaataccagtcgaggacgccgccataatggcgaagacgacagagatcggccccgggacaacgacggagggcgacgatgggattctcgagaacccggccgatgtcctcgtaatcctacaccagaaccaagcgattcttcgtcatcgtcatcctcttcttcatcctcatcgtcagatagacatccacgaaggacacacgatcgccgacaacccactgcccccagcgctgggtgtagagctttcgagattccgacccggaacaatagagaagtacgatgggagtactaacccagaagaatttcttcaagtctactccatagtactttacgctgccggagcagatgacaacgcattggcaaattatttgccgactgcgttaaaaggctctgcacgttcatggctgatgcatctaccgccctactcgatttcttcatgggcagacctgtggcagcaattcgtcgccaacttccaaggaacttacaagcgccatgcgatcgaagacgacctacatgcgttgacacagaactcgggtgaatccttgagggaatatgttcggcgcttcaacgagtgcagaaatacaatccccaagatcaccgacgcttctgtaatttgcgccttcaagtctggcgtcagagatcactatactacccaggagttagcgacaagacgcatcacaactactcggagattattcgagattgttgagcgatgcgcccacgtggacgatgcgctgaggcgcaagaacgataagccgaagaccgggggcgagaagaaaacagccacggacgcacctgagttaagcaagaagaaaaaccgcaagagtgcgaaaaggaaggctcaagcggaagttctcgcagcagaatacgctaacccatccaagcgcccagacccacagggtagcgacgcaaggaaagcatggtgccccatacacaagacggacagacattctttagaagattgcctcgtttttaaaaagtcgctcgagaagcacatggcattggaaaaaggcaagcgagtacgcgtggtcgagaaggacgcggaggcagctgctcaggaattggactcagcatatccagactctgacctccacggggctgcacctaatatgaagtggtctgaacagaagatagaattttcggaagaagagcatcccaagactgccgttatcccaggacgctatccgatcgtggtcgagcccactattcggaacatcaaggtcgcgcgggttctcattgacggtggcagctcaatcaaccttctcttcgccagcactttggatgcgatgggggtcccacgaagcgagttgacgcctaccaatcaacccttccatggaattactccccagtcctcgtccaaaccattgggcaaaattacgttgcctgtgactttcggccaagcaaacaacttccgaaaggagcagatcacctttgatgtcgctgaattcgatacagcgtataacgccatcatcgggagaactgcacttgcgaagttcatggccgcatctcactacgcgtatcaagtgctcaagatgccgggaccgaagggaataatcaccattcaagggaacgcaaagctggcggtacaatgcgacaagcggagcctcgatatggtcgagcaaacgcccaacccacccgccacaactgagcctcccaagaaactgtccgacatgccgggggtccccagggaggtgattgagcacaaactcatggtgcgacccgatgccaagccagtaaagcaaaaactgcggagatttgcaccagaccgaaaacaagccatacgagaagagctcgacaaacttctcaaagctggctttatcagagaagttcttcatccagagtggctagccaatccagtcatggtgcggaaggccaacgggaaatggaggatgtgcgtcgatttcatcgacctcaacaaggcgtgtcccaaggatcacttccctcttcctcgaatagatcaactggtggactcgacagccggctgtgaactgttgagctttctcgacgcttactccggctatcaccaaattagcatggtgaaagagaacgaagagaagacagcattcatcacgccgttcggggtattttgctacgttaagatgcctttcggactgataacagcagggaatactttccagcgcacggtccagggcgcacttagtgaccagctcggcaacaatgtcgaggcatacgtcgacgacattgttgtcaagaccaagacaagcgactcattgattgacgatctgcgggagacattcgacaacctacgacgatatcgcctcatgcttaatccagagaagtgcacgttcggagtaccgtcgggcaaactgctcggtttcctcgtctctggcagaggaatagaagcaaatcccgagaagatcaaagcaatcgagaacatgaagtcgccacaagactcaaagaaacaaccaaatcgacaacgaaacgtggacaatggcgttcgatggtgcactcaacagccaaggagcaggggcaggattcatcttgacatctccttctggagatcaattcaagcacgcaatccacctcaacttcagggcaaccaacaacacggccgagtaagaaggactactcgccaggataagagccgcaaccgcatttggggtcaaacgactgatcgtgaaaggggactccgaactagtcgcgaaccagaagttaggaagcaggagaaaaggttcgatgggatcaaggtccgacacgtataccgcaaagaaaacgtcgagccagacgagctagcacgacgcacgtccagacgagaaccactcgaacccggcacttttctggacatcctggcaaagccatcggtaaaagaggtcagcggcgaagttaacccagacacccccgacatcagctcggaggccacagaggcagaacgcgccgttgccgatatcaaaaccacagacgactggcgcaccccactgatcaaattcatcaacagcgacgagttgctcgaggacgatgcagaggccaagaaaataacccgtaaagcaaaaatctatggcacgatcggcaatgatctatacaagaaagcgccaaacgggggcggctataggttcctattcgtggcgatagacaaattcacaaaatggatcgaggcgatgcccacgggagaaatcaaggccgacaacgccatcaaatttatcaaagggatattttgcagatacggactaccacatcgcatcatcactgacaacggctcccagttcatcagcgccgatttccaagattattacatcaggctgggagtcaagatatgcttcgcttcagtctctcatcctcaaagcaacgggcaagtcgagagggcaaatggcatagtgctacaagggatcaagacccgtgtctacgacaggctcatgtcacacgacaagaaatgggtcgaagaactcccatcagtactatgggccgtacgcaccacaccgacaacgtctaacaaggaaacacccttcttcctcatgtacggctctgaggccatgctccccagtgagctacgacatcaaagtacatga

SEQ ID NO: 52983 - DNA, 212 bp, Oryza sativa
  unsure (1)..(212): unsure at all n locations
  Clone ID: PAT_MRT4530_55226C.1
cgggccccttctggggccaaaaccttgctgcaaaaaaacagggggaggcccggaacgagcccaccccctgatgngaccgaaaacggggggatggcctaacggggcggcacccaaggaaggattcaaccaaaaaggggggggcccccccaccggggggacgacccctgaaatccggaacaaaaccggcccgccgcccagccccggggatcccg

SEQ ID NO: 52984 - DNA, 3435 bp, Oryza sativa
  Clone ID: PAT_MRT4530_55227C.1
aattgtaatacgactcactatagggcgaattgggtaccgggccccccctcgagttttttttttttttttttatgctcaattttaggccgatttattccaactcaatttcgtcaatttttattcagatgagctattaataatgctcgaattctaaggcttaattaataggtcatcacgaccttgagatcgaactcctgcccgacgaccagcgtcagcccgctgacgtgcgcgacgcccagcgctcccttctccgggctcccggcggcgccgccgaccgccgtgctcgcgttcacctggacgccgttggcataaacggcgaaccccttgggcggcgccgccgaccggagccccatgagcaccaccttgccgatggccatcgtccggctcggcgcgtacgagtcgtgcaccacatgcgacctcactctgaccacgccgccgccgctctcggtcgcgccgctgaatttgatctggctccacctgctccgtggcccggccatctccggcgactcgccgtcgtccaggaagagatccccggtggccgtgccgtcgtcggcgagcgcgaccaggaggtggaccacgctctggcgcacgcgcgacgacgtcagcgcgggctgctgcagcgtcaggatgttcccgccggcgacgtgcacgttcaccgtgtccgccggcgcgggcagcgtcacgcgcttgccggtcttcgtggcgacggcgagggagaagtcgtagaggctgaaccaccgtccggccgggaagtaggcggtgacggtggtcgcgcccggctcgagcaccggcgacacgagcacgccgcgcccgagcaggaactgcctgtcgatgccgtacgtctcgacgtcgccggggtaggagaagaagagcggccgcgcgatgggcgcgccggtggtgtgcgcctcgtacatgagcgtgtacaagtaggggagcagccggtagcgcaggccgagcgccttcctcgccgacctcgccaccgactcccacaggtacagctctcgccggacggtgccgatcgccgagtgatccctcgagaacgggtagaacgcgccaagctgaatccagcggctgcagagctcctcggtggtgttgccgccgaagccgcagatgtcggcgccgatcatggggatgccgaagaggccgaagctgagcatggtgttgatggagtagtggaggtcctcccacgtcgcggcgttgtcgccggtccagtgagcggtgtacctgccggagccgacgaacgtggagcggctgagcacgaacggccggcggccggtgtcacggagcagcgcgtcgtgcgtggcccgcgcctcgaggaagccgaagaggttgtgcgcgtcgtactcggccacgccgccgtagtgcacggcggaggccggcaccgtcttgttgttgatggggcggcgcacgccggagttgttgatgcggtacggcgggtcgtcgatcgcgttgagcggcggcgggtcgacgaagttggagatctcgttcatgtcgacccacagcccgtcgacggggagggtccgccggaacgcggcgatctcgcgcgcccagaactcggcggcgcgcgggttgaggaagtccgggaagtagacgttccccggccacaccacgccgaggtagttgctcccgttccacttcaagaagatgtcctgcttcattccccggacgaacgtcccgtacgtcgtgttcacgttgatccctgggtcaatgatgacgacgaacttctggccgttgcggtggaggcggtcgacgaacggccgcatccggtcggccgggaagttcaccggatcaagcgtgaagtccttgtaggcgtccatgtaatcgatgtccgtccacatcacctccagtgggatcctcgccttggcgtagccggcgacgacgccctcaagatcagccacgttcttgtacccgtacctgcactggtggaaccctgcaacgacgaacgcgacaatgtcggcggcggcgagatcaagcaagaagaactgaagaagcagagcaaaacagagagctagcttaccgaatgaccagtacggcatgggggcaggtcggccgatgagctgggtgtactggtcgacgacggcgagaggggacgggccggcgaagaagtagaaatccagcacgccgccgatcaccttgtaggtgacgtaggatccgccatagatgacgtccatgccgttgctgttaaggaggagcacgccgtgcgccgcgccgccgccgccgccgccgccggagcgcacgtccatgtagaaggggtgggagccgtacaggttgaggtcgacgttgccggcggcgatgtcggagttccagagcgtgaaggtgtcattccgctggagccggaacgtgcgcttggtctgctcgccgaggccgtacagcgacgcgcggccgggcggcggcagcgaggaggtgagctcgaggtagcgatccttgaagacgaggtttggggtggtgtcgaagaggacgtcaccggtggagcggcgggtgacggtgaagcggaacggggaggtgtggatggcgaaggtgaggtcggaggtcgccgtggagaggacgcggccgccgcctgggcgtgtggcggcgaggaaggagtccggcgaggggcgcgggatgacgtcctggggcacctcccatcgagggtggtcggcgtcggtgatgcggacgtgtagccggctgtccgtctccaggctttcttccactcgagaatccaaatacttccttagagcaggtataatagtaggcggtaagactttaaatattatatcagtgctcttcaagacatctccaactgagaagaacttcaactcggaaagaggccgtgacatgacccttcgcataaccctctctaaccgatcgcaccacaccttagggttcgcccccgtccccagcaggcaacgggcaacccccctttcgtgccgcggtgaatccggaagccgatcaaccggacaccccggccgacccaactccatcacgcccaccctcgcctgggtacgtcggctagagaaaagctacactacaagcccagccgttgcccacgctggcttgtgggctgacgtcatcaaggcggggcgcggcgccggcaagcgggccccaccggttagcggctcgggagagggaggaaggggcgccggcaagcgggacccgcatggcagtgactcggggagggcggtccatggcggatcgggtccacggaccggggaggagcggcgcaccacgcggcggccacgcgacggccgaaccgatggccccgatctacccaagggtagatcggacggcggcgggagctcgcggccggtgcgcgcgggcacggcgcaaaccggcccggcggccatggcgcgcgacggcgcggcgcgtatgcggcagcggcgcaagacggcggccggcggcgaccgaccggcggcggagagcggcggcgtcgcggcgaagcggcagctacgcggctaa

SEQ ID NO: 52985 - DNA, 2979 bp, Oryza sativa
  Clone ID: PAT_MRT4530_55228C.1
atggggggaaagggggaggggatcccggggaataattccaataacttgggtacattgctaggcttgcccataaccgagggcgcggctattcgaataggttatactctgatcagaggtgtacatcgacccaaccccacctacggccggaaccttcgggacaggtaggcaggaccgagcccctagcagcaggacaccggccctgtgccatgacatctcgactaccgggccgcagctcgtgtagccttcatttgccccactagacatgtggaagtacggtagtgctttgcaacagaggcccgaagactggtccttttatggccgaggtgggtccacggtggaccaggtgcacccgggctcacaccggccggcgtcgtgggtaacacgcatcagccgcacccgagggcgcgggcggctgatgaccgggccccacgcggcagccactcggcccgcccgaaggcggccactcggcgcggccggcgggaggcggtgcccgcgcccctattgtcaccgacggcggccataggcacggcggagcggcggccgagagaggggaagggaagggggaaaagaggcggcggtccacggctcaccctaggtcgacggcgacgacgaaaaaggcggccggagcggaggaaggcggcggcgcggctcgggtcgacggggtcgacgacgttccggcggtcggcgaactcggcaagggggtggacggggtcgacggcggtgcggcgaagccggaggaggcgacgccggggcgggagacggtcccggcgagcggagaaggccggccgaaggtcgttggcaatagaggagagagagagcgacggcgcgagctcgattgccggcgaggaggaagggcggcgagaggcggaaacggacagaggaggtgcggggagggtttaaatagggttggaagggggagaggagcacctcagcagaagccttgggcagatatgatagccaatgtgatgagggaacaattcgggcacaagcctaaggatagtgagaacttgtatcggcatccatacccagaatattttgagagagtaccattatcgaacaggtataaggtcccagatttctcgaagttctcaggacaggacaatgtgacaacatatgaacatgtcagctgattcttagtccagtgcagggagtcatcagctaccgatgctttaagggtcagattgtttcctctgtctctgtcaagattggccttcacgtggttttcatcattgccatataattttgtacaaagttgggccgatctggagaaacagttccataagtacttttatagcagttccataagtacttttatagcgggattcattagatgaagttgtccgatttaacgtcaatcaaacagaagcatgacaaatcggttcaagattatatccagagattcagagatatgaggaacaggtgctttagtttggctttaacagattcccagcttgccgatctcgctttccaaggcctactggtgccaatcaaggagaagttctcagcccaggaattcgagagtctagctcacctagctcagaaggtgaacaatgttagcacatatgtctctgaaaccgaagaggatgaggaccctgaggtagcaatagctgaatgggcaaggaacaaatgagtggtcacgtgccaatgggtcaaggactctggaaaggaggaaaaaattgatttcgacatcaccaaagacgataggatcttcgatttattgcttcgggagaaacaaatccaccttcctgctggtcatgtaattccatctgctacagagctagggaagagaaaatactgcaagtggcataacacaaggtctcacaacaccaatgagtgcacagtcttcaggcagcagatccaatccgccattgagcagggaagaatcaagttcgacgacccaaagaaatccatggagatcgacggcaatccttttcctgtcaacatgaacgaagggatgaggttaccctcgaaggaaggttgcccgtgatgcagtgatgccgacgaaaaccacgtcggtagttcaagccaatttcgtcccggaaaggaaaatcggtcggtgcagaagaagctgcctgttgatcagagattgggaccgttatctttagtcccggttcaaatacccgggactaaagatcgatctttagtcccggttggtgttaccaaccgggactaaagatcaaaatttttataaccgggactaattgggatcgtcggtacgagagtatatgcgagaaagtacaatatttgggataacctatctagttgtcgtcgacttgtcggcatggataaccaactcgtagtcgacgacagggtagtcttcctcctgaagtacgaacacgtcgagatcagagatggcacttgatccctcttgtcggcttccgtaggcaccggatgggatatgtctaggcttatctctgatgtcgatctctggcggcgtattggcttgtgtattgtgggtttctttttcctctcctcctagggggtcttgtattcatacccatagatgtccccttgtccaagtagaactagggagataaatatggatacaatccgagtagtccttatcgtttccaacttgaactctatttgtcctaccttatccggaactccttctatatacgaggtacgattccatataagatttggtatatggtgggcctttattccgtaatccttgtcgaactccaccaaccattctcgagtaatcgagtagttataaagtccgcgacaaagccctgaagtctgacttgattgttctgatgtctgatcttcctgaaatcaaagtaatcgagtaggcggagagtccgcgacaaagtcttgaaatctgacttgattgttctgatgtctgatcttcctcgaccacttgaagggaatccagagtaatagatggacgacattctcgtgacttgcgagaactgcctcctcatcctcgggccctctagaagtctggggatctcgagtttcgtcgtcgtcgtgtga

SEQ ID NO: 52986 - DNA, 2304 bp, Oryza sativa
  Clone ID: PAT_MRT4530_55229C.1
ccggccgggcccaaacccctcctcacccgcagcgccccaacccaaccctccccgaggtcgcagccttatcctctcctctcccctccgcgaggtcaggaaatcatggcttcaacattcggtgccacttctacggttggcctcatggctgcgccaaccggaattgtatcagacaagaagccatcttctctatcttcggtgtcatctgtttctgttgccagccgaccacgcaatgcacgccttcagaggaagtgcaacttcagggtaaaagctgccaaggagttgtacttcaacaaggatggctcggctatcaagaagcttcagactggagtaaacaagcttgctgaccttgttggagttacactgggaccaaagggaaggaatgttgttttggagagcaagtatgggtcccctaggattgtcaatgatggtgttacagttgcaagagaggttgaactggaggatcctgttgaaaatattggagctaagttggttaggcaagcagcagcaaagaccaatgatttagctggagatggcacaactacttctgttgtgcttgctcaggggctgattgctgagggtgttaaggtcgttgcagctggtgccaatcctgtgcaaattacacgtggtatcgagaaaactgcgaaagcactagttgaagagctaaagaaattgtcaaaggaggttgaagacagtgagcttgcggatgttgctgcagtcagtgctggcaacaattatgaaatcggtaatatgatagcagaggctatgagcaaggttggcaggaagggtgtggttacccttgaagaagggagaagttctgagaataatctctatgttgtggagggaatgcagtttgaacgtggttatatctccccgtattttgtaactgacagcgagaaaatgtctgcagaatatgagaactgcaagcttcttttggtggacaaaaaaatcaccaacgcaagggatcttatcaatgttttggaggaggccataagaggtgcatacccaattctgataattgctgaggatattgagcaggaggctcttgctactcttgttgtcaacaagcttagagggtcattgaaaattgccgctatcaaagcccctggttttggtgagcgcaagacccagtacttggatgatattgccattctaactggagcaactgtaatcagggatgaagttgggctgtcacttgacaaggcagacaaatcagttttaggaacggctgcaaaggtggtccttaacaaagagtcaacaacaattgttggtgatggcagtacacaggaagaagtgactaagagggttgcacaaataaaaaatctcatcgaggctgccgaacaagaatacgagaaggaaaagctcaatgagaggattgcaaagcttgctggtggtgttgcagtcattcaggtgggagcacaaacagagaccgaactaaaagagaagaagttgagagttgaggatgccctaaatgctaccaaggctgctgttgaggaaggtattgttgttggtggagggtgcactcttctgagactggcagctagagttgacgccatcaaggacaacctggagaatgatgagcagaaggttggagctgaaattgtaaggagagcgctgagctacccgcttaaattgattgctaagaatgctggtgttaatggaagcgttgttaccgagaaggttctctctaacgataacttcaagtttggttacaatgctgcaactggacagtacgaggatttgatggctgctggtatcattgaccccactaaggtggtgagatgttgtcttgagcatgctgcgtcggtggccaagacattcctcacatcggatgtcgtcgtcgtcgagatcaaggagcctgagcctgcgcccgtcaccaacccgatggacaactccggctacgggtactgatgactaagttacagttacttgttctccgggaaggtcactggccgtcaatttttgggtagtaggcttgaatctgaattttggtgagatttgagtagtttcgagacaatttgatttgttcccatgggaagtgaaataaacagggtcactatagcaaaatttgtggtgtaactggaacggctgtcaaattacgaaggaagatatttgaaagatttcatgctctctggggtttaccgttgacattcatcaaaaaaaaaaaaaattagaaaggaagatgctttgaatgcaatggaagtgttatggttggatgcagtggagaaagctattgctgttgctggtgtctatactcttttgaggctggcatctaaagttgacttcatcatagaatctcgagaatga

SEQ ID NO: 52987 - DNA, 1143 bp, Oryza sativa
  Clone ID: PAT_MRT4530_5522C.1
atggcggcggaggcgtggagggcgcgcttccgggagcgtgtggtggaggcggcgggacgctgggagcgcgtgcgcgagggcctcgccacggcgctggcgcacgtgacgtcgccgatgctcgcggccgacgaggaggcggcggccgccgcgcgcaccaggatccagctcgcgatgggacagctcgaggacgcgtccagagatctcgcctccgcgatgtccctcatgaaggcggccgatctcctcgcgctccacggcgacagcgtcaacccgtcgacgtttctcggcgggatcggccaccttggcgcccagtacctcgcggagcggatcgctgtgaccaagctccgtgaagcctgggaggacgcccgggacgcgtacaccaatgttgaatggtgccgcagccacctggatgcgatcctcctcatgctggaccatccgcatctccccagcgtcgacggcttgatcgaggaggatcgcgccgccgccgatggtttcctccaggccgcgatagggagagcggagttgggcaacgagagggccgtcgacgcccggcaggaccgagcgagcgagagcgacatggcggcggaggcgtggagatcgcggttccgggagcgtgtggtggaggcggcggagcgctgggagagcgtgggcgagagcctcgccacggcgctgacgcacctgaagtcgccgatgcacgcgggcgacgaggaggaggcggccgccgcgcgcaccaggatccagctcgcgatgggagagctcgtggacgcgtccagaaatctcgcctccgcgatgtccctcatgaaggtggccgagctcctcgcgctccacggcggcagcgtcaacccgtcgacgcatctgggcgagatcagcctccttggcgaccagtacctcgcggagcggaacgctggaatcaagctccttgaagccggcaaggacgcccgaaaagcgtacatcagtgttgacgggtgccgcggcaacctggatgcgatcctcctcctgctggaccatcctcgtgtcccttgcgtcgacgacttcatcgaggaggagctcttcgtcgccggcgataacctccagggcgcgatcgggaatgcgaagttgggcaccgagagggccgtcggcgcccggcaggatgtatccggcgccaac

SEQ ID NO: 52988 - DNA, 5173 bp, Oryza sativa
  unsure (1)..(5173): unsure at all n locations
  Clone ID: PAT_MRT4530_55230C.1
atgtctttcgtgattagtctcacacttctcaccataataaatgatctgtacagccgggtatggttgttcagaatggttgggcctatacaacaggatgccgcgctacaagcctgagtacttgtttggtgttgagggatttgtccaggagttgcgtacgatgtcctttgccataggatttgggactgctcctttttatgctcagattcctcatgatcgtcatgaagagaagtgccgagtcaaagtcaccttgaacagtaatagtgaagatgtcccctcagtgatgttcgaagctagaggaagaaactacaccatgcatgtcaggaggtggcaaggatcgccataggagagctccgcgatcgctatagtgatcagttggccgacactgagtatcgctaccatcctcgccaaccccagggaagtgaccgtggcagctacctagagactgaaggaattgagaatgatgctaccacaaggcatttggttgagatgctgtgggctgtggatgaaacccgtgcggagactgtattagcagctcaagatcgtgaagaccggaatcgtggaaagatttgcaagctagaggacaaggtggatcgtttggagaaggaattagccgcattgaagggagaagcaccaccgcagaaggccaggattcgtcttaccgcaaggaagagagctctttttgtccctcgctaccaattggcgccaaagttttccccggtttctcttcttgtgtcctgcccatgccagatggtgctcactcacagcaatgggaatggcccccaacaacaataacaacaacaacaacaatggagagaatcccacacttgcccaagtcctggctcaacagacacaacttatgaacatgatgatgcagcaactccagaaccagcagaaccaggggaataaccatgcacctccccagaacaagttagcagaatttcttcgtgtgaggccgcctattttctctagtaccactaatcctgttgaagctggtgattggctgcatgccatagagaagaagttggatttgcttcagtgcaccgatcaggagaaggtctcatttgcatcacaccagttgcatggccctgcctctgaatggtgggatcactttcgccttaacaggactattgctgaacctatcacttggcttgaattcaccgctgctttccggaagacgcatatagcatcgggagttgtgtctctcaagaagaaggaattcaggtcgctcactcaggggtctcgctctgttacggagtatctgcacgagttcaatcgtctggctcgttatgctccggaagatgtgcgcaatgatgaagagcgctaggagaagttcttggaaggacttaatgatgagctttcttactcactcatgactggggattatcttgatttccagaagttagtggataaggctattcgtcaggaggacaagtacaatcgcatggaacagaagaaacgccggattgctcaattcaagacacaacaggggaataatcaaagaccgggttttactttaggacccccatccatgccacaaggaggttttttgtctgttgtttgtccgcagggtcagtttttcaacaacaatgctggcaacaacatccggtaatcaagctccacgccctgttgcagcttcgacacagcaacaacctgccaagaaggagcaaggcagcaagcccgtggtgtgtttcaactgtggagacccaggacattacgctgacaagtgtccgaagccccgacgcgtgaaggttgtccctgcccagagcaactctaccgcaccagcgccaaaggcccgtgtcaatcatgttgctgctgcagaagctcaaggtgctccagatgtgattttgggtacgttccttgttaacttagttcctgcaacagtgcttttcgattctggtgctacacattcattcttatctatgagttttgcgggaaatcatgggatggaagtagaagatcttagacgtcctttgatggttagtacccaagtaatcaagcactctctttgcaacgtagcccctctgtcagaatagaaattaaaggagtaccatttctggccaatcttatcctgttagaatccaaagaccttgatgtcatcctaaggatggactggttagccagacataaaggtgtgatagactgtgccaatagaaaagtaactctcaccagcaatgatggtcgagttgtaactgttcatgcattgtcttctgagtttttaaggtcgagactgaaccaaatanctttggaagagattcctatagtccgggagtatcccgatgtgttcccagatgatttacctggtatgccgcctaaaagggatatagagttcagaatagatttggtaaccaggaacaactccgatccataagagaccttatagaatggcagccaatgagttggcagaagtcaagaggcaagtagacgatttgcttcagaaaggatacatcagaccgagttcatctccatggggagctccagttatttttgtggaaaagaaagatcatacccagaggatgtgtgtggactatcgtgcactaaatgatgtgactatcaagaataagtatccgttgcccagaattgatgatttgtttgatcagcttaaaggtgccaccgttttctccaagatagatcttcgatcaggatatcaccagttgagaatcaaagaggaagatatacctaagacagcttttaccactaggtatgggttgttcgaatgtactgttatgtcttttggactcaccaatgcccctgctttcttcatgaacttgatgaataaggtgtttatggaatacctagacaagttcgtggtggtctttattgatgatattcttatctactcccgaaccaaagaagagcatgaagaacatcttcgccttgcactagagaagctacgaggacatcaactgtatgctaagtttagcaagtgtgaattttggttgtctgaagtgaagtttcttggtcacgtcatctcagccggaggagttgccgttgatcccagtaatgtggaatccgtaaccaactggaaacaaccaaagacagtttcagagatccgcagtttcctaggcctcacaggttattatcggaggtttatagagaatttttccaagattgctaagcccatgacacggttgcttcagaaagatgtgaagtacaagtggtcagaagaatgtgagcagagttttcaagagttgaagaatcgcttgatatcagctcctattttgattttacctgatccaaagaagggtttctaagtgtactgcgatgcatccaaacttgggttaggttgtgttctgatgcaagatgggaaggtggttgcctatgcatctcgtcagttacgtccgcatgagaagaactaccctactcatgatcttgagttagctgcagtggttcatgcgttgaagatttggcgtcattatcttttcggtactcgtacagaggtatataccgatcacaagagtttaaagtatatctttactcagccggatctgaacatgagacaacggagatggttggaattaattaaggattatgacatgggaattcattatcatccgggaaaggctaatgttgtagcagacgctcttagtaggaaaggctattgcaaagctacggaaggatgacagttgccattggaattatgccaggaagttgaaagattgaatttgggaattgtccgaaggggtttcgttgcagccttagaagcgaagcccactctaattgatcaagttagagaagcccaaattaatgatcctgatattcaagaaatcaagaagaatatgagaggaggaaaagctattggtttcttggaagatgagcaaggaactgtatggttgggtgagagaatctgcgtccccgacaacaaagatttaaaagatgcaattctgaaagaagctcatgatactttatactccattcaccctggtagtaccaaaatgtaccaggatctcaaggaaagattttggtgggcaagtatgaagcgtgaaatcgcagaatacgtagcagtatgtgatgtttgtcagcgagtcaaggcagaacatcagaaacccgccggtttgttgcagcctttgaagattcctgaatggaaatgggaagaaatcggtatggattttatcactggtttacccagaacgtcaacaggccatgactctatttgggtgatagtcgacagatttatcaaagtggctcatttcattccagtaaagacaacctattccggaagtcagttagcggaattgtatatggcaaggattgtgtgtttgcatggcgtccctaagaaaatagtgtctgatcgaggcagtcagtttacttcaaatttttggaagaagcttcaggaagagatgggttctaagctgaactttagtactgcttatcatccggagacagacggacaaaccgaaagggtgaatcagattttggaagacatgttaagagcttgtgctttagacttcggtggaagttgggataagaatctaccttatgcagaatttttgtacaacaacagttatcaagctagtcttcagatggctccttacgaagcactgtatggtcggaagtgccgcactccgcttttgtgggatcaaacgggagaacgtcaggttttcgggatggatatcctaagggaagcagaagaaaaggtaaagatcattcaagaaggattgcgagtggctcagtctcgtcataagagttatgccgacaatcgccgcagagatttgagttttgaagaaggagattatgtgtatcttcgtgtcacgcctcttcgaggagttcatcgtttccacaccaaaggaaattggcaccgcgttttgtgggaccttataagattgtcagtagaagcggagaggttgcttatcagttggagttacctcaatctttggcaggagtccataatgtgttccatgtgtcgcaattgaaaaagtgtttaagggtacctaccgaagaagctaatcttgaacagatagaagtccaagaggatctgacctatgttgagaaaccaatccgtatcttggaaatagatgagagaagaaccagaaatcgagttatccgcttttgcaaagtccaatggagtaatcactcggaagaagaatcaacttgggaacgagaagatgaattgaagtcagctcatccgcatttgttcgccagttcttccgaatctcgaggacgagattctgtttaa

SEQ ID NO: 52989 - DNA, 1280 bp, Oryza sativa
  unsure (1)..(1280): unsure at all n locations
  Clone ID: PAT_MRT4530_55231C.1
aaaagagtgaggagacgacgcgccgccacccacccactcgaccgttgccaccgctgcttcccttcccctttccannggccctncngccnntggtccnnccccatttnaantncnccccccccacacacacccccttccaccgccgccaccgccgccgaatctagggttcatcggggattcgggatcgatggagaagtacgagaagctggagaaggtgggggaagggacgtacgggaaggtgtacaaggcgcaggacagggcgacggggcagctggtggcgctgaagaagacgaggctggagatggacgaggaggggatcccgcccaccgcgctgcgcgagatctccatcctcaggctgctctcccagtcgctctacgtcgtccgcctcctctccgtcgagcaggccaccaagaacggcaagcccgtcctctacctcgtcttcgagttcctcgacaccgacctcaagaagttcgtcgacgcctaccgcaagggccccaaccctcgccccctccccaccaacgtcatcaagagcttcttgtatcagttatgcaaaggagtcgcacattgccatggccatggtgtccttcaccgtgatttaaagccacaaaacctgttggtcgacaaggaaaaggggatattgaaaattgctgatcttgggctaggtagggcgttcactgttcctatgaaaagctacacacatgagattgtgactctttggtacagagctcctgaagttttgcttggatcaacacattactcaaccggtgttgacatttggttgttgggaactcctactgaggagcagtggcctggagtaactgatttgagggactggcatgagtttccacagtggaagccacagattttagaacgtcaagtcccatcattggagcctgaaggagttgaccttttatcgaaaatgctccagtataacccagcaaatcggatctcagcaaaggctgctatggaacacccctacttcgacagcctcgacaagtcccagttctagtttgtaccatgtgattgacgaagtccatgttctgttgtgtcatttgattataaacgtgttgctgttagcagcaaggaaattcgttttgcctacttagcaccctactttgtgatccaacaaggaaatccgtttgccatctaggcaacttgaatgcagtttgaatgtaaaatgggtttgtttctatgctgtatggcatatgtattatggacaagaaggttgcaatatatttgcctgtttctttgacgaaaaaaaaaaaaaaaaaaaaaaaaaa

SEQ ID NO: 52990 - DNA, 2668 bp, Oryza sativa
  Clone ID: PAT_MRT4530_55232C.1
atggcggccgacctcccacgccggtttccttcccctccggccgctctctcccccttccaaccctatttaaaccctccccgcacctcctccatccgtttccgcctctcgccacccttcctcctcgccggattcgagctcacgacgtcgctctctccctccgccgtcgtcgcagagctccggtctgccgccgtcgtcgccccggaccgcctcccacctcggtgccacctccttcggcttcgccgcatccttgccgacctcgtccacctctccgtttcggtcgccgaccgctggagcgccgccgaccccgtcgacccgagccgcaccaccgcctccctccgcttcgaccgcctcctccgtcgccgccgtcgccccggggtgagccatggaccgtcgcctcctttccccctttcctcccctctctcggccgccgctccgccgcgccggtggtcgccggcggcgaccatcggggcgcgggggcgccgactcccgccgactgcgccggcttggccgccctcgggcgcgtcgagtggctgccgcgtggggcccggccgtcagccgcccgcgccctcgggtgcggctgacgcgtggggcccacggcgccggccgatgcgagcccgggtgcgcccgctccactcccacatgcagctcaactggggtataagccaaacgtcttctccttccggatcctttatcttcaactgagccgcctctcccgcctcgccggagcgtcgtccggccgcgccgtcgcctcctccagcgtcgccgccacctcctccaccccggcttgccctccgtttcgcgaggtgacccccggagctgcctccccgccgtcgcccttctcgtttctccgcgccggccgcctccagtcgcctctcccgcctcgcccgtgcgccgtccggtcacgccgtcttctccctcggcctcgcagccacctcctctccctcggtcagccctctgtttcgcggggaaaacaccggagacgcgtcctcgccggcgtccagtggcgtcgccaccacttctccgcctccggccgcctctgccgcgtccccggtgcgccggccgacgtcgccaccacctctcccggcaccggagtgccgtcctctctcccggccaggccacggcgtcgcccgaatttcgccggaacgccgtcatctccgcgccggcctctccttcctcctcgtcggctcgtcgccccgctgcaccaccaccttcaccaacatcgcagcggcgtgttccacgccatcccctcctccgctcagccgctgctgcctgccatcatcgtcatcgtcgtctccgttcgtcctcgccgatcgacgtcccatcggttgcccggctcgtcgtctcgcggcgccgcctccgtcatcgtcatcgtagcggcgtgttccacgtcgtcctcgtccccgtgcagctgctgctggctgcccctcgtcgccccctcgccggtcccggtcgtcgtcgtcgtcgtcgtcctctcgtcgttcccggtcgtcgtggcccccgtcctcgtctccgtgctcggctccgcgtcgtcaagcctcgtgccggccgcgtctcgcctttgtccaaggatcgccgccgaagtcgttccctcgccgttcgcctccgtcgtccccgagctgtcctcgccggtcccgttcgtcgttgtcgttcccacgcctcgtcgcgtggtggtaaggatccgtcctctcgcttccccgccctcgtccttccggtgtcgccccgtacccgttgtgcggtcgtcgaccccggtacccgtgtaccggtgtcggtagtcgttcacgtgtgcgggtggtgaccgggtagtgtccgtgttagtgtgcccgctcggtagccgcgtggtttccacgggtgcaggccgtgtggtgtctagtggagtccgtttgtcggccactcgcctcggttgacacacgggttccgcttccgtcgacccgtggaccgtctctgtgtactcggttttgtttttatgtattgttattgcttctttataggcttgtagctttgcttgtgtgcttcgcgtagcttctgtcgttccggaggttcccgaagcgtggttcgcggtcgtcgccgaaggatcggaagtccgttctctctctctttctctttcaaaacccctaaaacctgttttcggtggggtttgggtgcatgccagttatgggaagtagcaccccggccactataaggattaagctcgggcctctgttgcaaagcactaccgtacttccacatgtctaatgggtaaggcttagtttgtggctcagtctagtcataaacaaaagtacacggattggagatggatgaagtcgggcgtcgatggacattctccagggcaaatgaaggctacacgagctgcggcccggtagtcgagatgccatatggcagagggttggtgccctgctgctaggggctcagttctgcctgcctgtcccgggaatcccggccgtaggcaggattgggtcggtactcttgtctatggctaggatgggttggaaactatgtcacgtcttccgtccgtataccgtggtggtatgtggcgcgtggtaacacgtgaggaagatgtgtcttgtggcatctgccggtgtggcttgctgagtactgttgtactcattcttgctcaatccttcccctcttcagtaagagaagctttggagaagatgtcttaggtggagtc

SEQ ID NO: 52991 - DNA, 301 bp, Oryza sativa
  Clone ID: PAT_MRT4530_55233C.1
gcgccttttgttgctacttaggcttcttaactctgggtgcccgccgaggaacaggagcaagactaacttccgggctgccgcccgaatacctacctagcggcctgaggagctctactccggaacccaaagccagcccactgccccctattcctacgagcaccggccacttcgatggcgcctatgccaaagagcacctgcgcctcaaaaactccccctactaatgtgggcattttcaacaaaaacaacgaatactaagctgctcctctcccatcctaacagtgcacctgttgtggttgttcct

SEQ ID NO: 52992 - DNA, 1119 bp, Oryza sativa
  Clone ID: PAT_MRT4530_55234C.1
ttgcgaatttcttcatttaaattttaatttgaaatggatttattgcgtcagccgaggggaggggcgcgcggaccgggtccacgggggtggggcccacgcggcagccccacggtccacggtggaccgggcgcacccgggctcacaccggccggcgccgtgggtcccacgcgtcagccacacccgaggacgcgggcggctgacagccgggccccacgcggcagccgcacggtgcgcccgaaggcggccacgccggcgcagcggcgggaggcggcgcgcccgcgcccctatggtcgccggcggcggccataggcacggcggagcggcggccgagagaggggaagggaagggggaaaagaagcggcggtccacggctcaccccgggtcgacggcgacgacggaaacggcgaccggagcggaggaaggcggcggcgcggctcgggtggacggggtcgacggtgctccggcggtcggcgagcgaaacggaggggtggacgaggtcgccggggatgcggtgaagccgaaggtggcgacgccgaggcgggaggtggtccggggcgacgacggcggcggaccggagctcggcggtgacggcggagagagagagcgacggcgcgagctcgattccgacggggagagagggcggcgagtggcggaaacggtggagggaggcacggggaaggtttatataggattgggagggggagggagctgccggacgagggggaaacgggcgcggaagatccggtcgccattgatggcgccggcgaggttaggggagaggtttccaaacgaatccgagggagagagggagggaaaaatggggggaaagagggagggaatcacggggaatatttccccccactttattgcgcgcgtggacggcgggaggcggcgggattcgcggcggcggcggcgctagggcacgggcgaggcggcgggagcggcgggaggaaggggatgacgggtgggccccacccgtcagcgagggtggcgggcgggcccgcccgtcagcggcacgcgcgcggggaggaggccgaatgggccgcgggggagaggagagagagggagagagatgggccgagccggcccaagagggggaggagggggaaaaggactttt

SEQ ID NO: 52993 - DNA, 206 bp, Oryza sativa
  Clone ID: PAT_MRT4530_55235C.1
atgaaccaggcgaaaagggcaacaatgaagcagatggtgatccctcagtggaacgccggtggcgagtggctgccgacgacgggcgacggccagcggccctcggcgacgggcaacgaccagcgacagccggcgacgagcccccgcccccacgaggccccgacggccagcaacggctggcgacgggcggccggcgacgacgagcgacg

SEQ ID NO: 52994 - DNA, 4176 bp, Oryza sativa
  Clone ID: PAT_MRT4530_55236C.1
gggctgtcttcctcctccagccgtcgcccggccgaaccctagccgagctgcgccgccgccgctgcccttccaaattccgtcgcccctctctatttccggtcaaattgattgagggcaaatgatctttgagatctcctcttccttttctcttttggaaacatcggctaattttctttggaaaccggtggatttgagttggattcggattcatctatctcctctaaccctagactttcctcctcgccgccggtcgccgtgggcctccgtcgccgcctcctagcctctataaaagcatccctgggacctcctctatccgccgccacctttgccttagcccgccgtcgcgtctagcgccgcctccgcgtagccctagccgtcgccgtcgttgccgtcggttcagccgcgccgcgccgccgttgcagccgccgtcgtcggtcgccgtcgccaccatcgggatcgcgaggtcgtcgccgtccccgtccaccgcttcgccgccgccgaagaccgccggagcaccgccgtcaccgtcgacccgaagaccgccgccgcttcttcctcatggccggcgccgtccgttgctcttccgccgtggttttggtcaccgcgccctagcgccgagtagcctcgagccgccgtcgccgccgtcgctccagccgtgcgccgccgccgttccggtcatcgccgtcgctcgggaagaccaccgtcgtggtcgccaagtcgccgccgtcctcgtccgccccttcgccgtcgccgaagaccgccggagcaccgtcgccgtcgtcaagccgaagagctccgccgtttcaacctcgtcgccgtcgccgtccgttggtcttccgccgctcctttggtcatcggcgagcatgcgcgtccgagccgccgagccgccgccgccggtggtgcgccaaggtgaagagaagcccggccgcacctcctccttcgtcgccggccgccgtagctcgccgttgccggtcaagccgagccgccgccgccgttcatctcgtcgccggccgtcgtcgttcgtcgtttggctcaagggtgagtaccgttgggttcgtctcgtcgttctccacgtgtacatgtcctccaaatttgcagccgaccatccaatctccggcgaggtcgccaacccgggccggccattgatgatccgcgccgagcagccgtctccgccgtcgccgccgcttgccgccaccgccattagcaccactaatcctgttgaagctggtgattggctccatgccatagagaagaagttggatttgcttcaatgcactgatcaggagaaggtctcatttgcatcccatcagttgcatggccctgcctctgaatggtgggatcacttccgtctgaataggactactgctgaacctatcacttggcttgaattcaccgctgctttccggaagacgcatataccatcgggagtggtgtctctcaagaagaaggaattcaggtcgctcactcagggatctcgctctgttacggagtatctgcacgagttcaatcgtcttgctcgttatgctccggaagataagttagtggataaggctattcgccaggaggacaagtacaatcgcatcgagcagaagaaacgtcggattgctcaattcaagacacaacaggggaatagtcagaggccgcgtcttactttaggaccccagtccatgccacagggaggttcttcgtctgttgttcgtccgcagcgtcagttcttcaacaacaatgctggcaacaacatccgcaatcaagctctacgccctgttgcagcctcgacacagcaacaacctgccaagagggagcaaggcagaaagcccgtggtgtgtttcaactgtggagacccaggacattacgctgacaagtgtccgaagccccgacgcgtgaaggttgtccctgctcagagcaactctaccgcaccagcgccaaaggcccgtgttaatcatgtcgctgctgcagaagctcaagatgctccagatgtgattttggaaaggatacatcagaccgagttcatctccatggggagctccggttatttttgtggaaaagaaagaccatacccagaggatgtgtgtggactatcatgcactaaatgatgtgactatcaagaataagtacccgctgcccagaattgatgatttgtttgatcagcttaaaggtgccaccgttttctccaagatagatctccgatcagggtatcaccagttgagaatcaaagaggaagatatacctaagacggcttttaccactaggtatgggttgtttgaatgtactgttatgtcttttggacttaccaatgcccccgctttcttcatgaacttgatgaataagaaacaaccaaagacaatctcagagattcgcagtttcctgggtcttgtaggttattaccggaggtttatagagaatttctccaagattgctaagcccattacacggctgcttcagaaagatgtgaagtacaagtggtcagaagaatgtgagcagagttttcaagagttgaaaagtcgcttaatatcagcacccattttgattttgcctgatccaaagaagggtttccaagtgtattgcgatgcatctaagcttggcttaggttgtgttctgatgcaagatgggaaagtggttgcctatgcatctcgtcagttacatccgcatgagaagaactaccctactcatgatcttgagttagctgcagtggttcatgcgttgaagatttggcgtcattatcttttcggtactcgtacagaggtgtacaccgatcataagagtttaaagtatatctttactcagccggatctgaacatgagacaacggagatggttggaattaattaaggattataacatgggaattcattatcaccagggaaaggctaatgttgtagcagatgctcttagcaggaaaggctattgcaatgctacggaaggacgacagttgccattggagttatgcaaggaatttgaaagattaaatttgggaattgtcagtagtggtttcgttgcagccttagaagcaaagcccactctaattgatcaagttagagaagctcaaattaacgaccctgatgttcaagaaattaagaagaatatgagaagaggaaaagctatcggtttcttggaagacgagcaaggaactgtatggttgggtgagaggatctgtgtccccgacaacaaagatttaaaagatgcaattctggaagaagctcatgatactttatactccattcaccctggtagtaccaagatgtaccaagatctcaaggaaggattttggtgggcaagtatgaagcgtgagatagcagaatatgtagcacctttgaagataccagaatggaagtgggaggaaatcggtatggatttcatcactggcctacccagaacgtcgtcaggccatgactctatttgggtaatagtcgacagacttaccaaagtggctcatttcatcccagtaaagacaacatattccggaagtcggttggcagaattgtatatggcaaggattgtgtgtttgcatggcgttcctaagaaaatagtgtccgatcgaggtagtcagtttacttcaaagttttggaagaaacttcaagaagagatgggttataagctgaacttcagtactgcttatcatccgcagacagacggacaaaccgaaagggtaaatcagattttggaagacatgttgagagcttgtgctttagacttcggtggaagttgggataagaatctaccttatgcggaattctcgtacaacaacagttatcaaactagtcttcagatggctccttacgaagcactgtatggtcggaagtgccgtactccgcttttgtgggatcaaacgggagaacgtcaggttttcgggactgatatcctaagggaagcagaagagaagtctcgccataagagttatgctgacaatcgccgcagagatttgagttttgaagaaggagattatgtgtaccttcgtgtcacgcctcttcgaggggttcatcgttttcacaccaaaggaaaattggcaccgcgtttcatgggaccttacaagattgtcagtagaagaggagaggtcgcttatcagttggagttacctcaatctttggcaggagtccatgatgtgttccatgtgtcacagttgaaaacgtgtttaagggtacccaccgaggaagctagtcttgaacagatagaaatctaa

SEQ ID NO: 52995 - DNA, 996 bp, Oryza sativa
  Clone ID: PAT_MRT4530_55237C.1
atggaagaaaatctagctatcagtattgtaactctatgcctgacatatcttgttctagtaggaggagtgaagatacatattgatcgagatgggataattggttcaaccatacctagtaaagatctaaacatgacaattcaggaactaattgttcaaaagacaggagatggtgatgtttacgattgtgttgacatatacaaacaacctgctatgaaccatccattattgaaaaaccatataatccagatggaaccaagctcttatccattagatcttgatatacaatctattctgtcatccaatatctcagaatcaaatttccccgacatcaagtgcccaaccggaacaattccgatactgcgtcacaatagctcagaagcacatatgcctaatggtggttcacaagaagaggtatggccaagttttagtggggacaactttgtcaggtttcacattcgttgggtagacagttcaaataagccatgctatgattttaattgtcctggttttgtgcaagttagccaacttgctggtattggagggaaaataacaccggtttctatctacaatgggcctcagtatataattaccgtcatgctgtttcaggaccgaaagactaaagattggtggctagcacgcctagacaagagcagtgccattggatatcgaccacttggatattggccgagtaagctctttgacaccctacaagagaaggctacatatgcattttggggtggatgggttcgtggaccaactgtttcattagatcctccaccaatggggagcggccatttcgccaaagaggggtataggaaagccgcacttgtgaagggtatcaggatagccaacaaggacaacaactttgtcaatccaaacgttggtaaggccactacagtgaccactaggggattgtgctacactgttgatggttttggtgttctcaagatgggtatgcatgtgttcttcggtggaccgggccaatgtcccaattga

SEQ ID NO: 52996 - DNA, 372 bp, Oryza sativa
  Clone ID: PAT_MRT4530_55238C.1
gggaggcaaaaacttcattctgccttgaaaatcgacagggttatacaaaaggcaggggtaccaactgctccagggttccagggcaagctctaaaaaatcttttcttttttgggcgggaacaatgggggcagcaataaatcgtaaacgtagaacacgttttcttatttggggccatttaaacaagtttaaaaattggaaaagggattaaaaatatctggcaaactttccgggcacctggactcggtgagtaaagggcaacccaagaaaaatgccctaattggccggcaggctccccccatttgaaattttaaagcccaagggtttccaaaaaaaaggctagatgaactacttgcccggattgacaaaccgggg

SEQ ID NO: 52997 - DNA, 2316 bp, Oryza sativa
  Clone ID: PAT_MRT4530_55239C.1
tcagctgtacacgagaaagaagggtgtctccttgttggacgttgtcggtgtggtgcgcacggcccagagtaccgaggggagttcttcgacccacttcttgtcatgtgacatgagcctgtcgtagacacgggtcttgatcccttgtagtactatgccgtttgtcctctcgaactgtccgttgctctgagggtgagaaaccgaggcgaagcagatcttgacttccagtccgatgcagtaatcttggaaatcggcgctaatgaactgggagccgttatccgttatgatgcggtgaggcaatccatatctacaaaatatccttttaatgaatttgatggcattgtcggccttgatttcccccgtgggtattgcctcaatccatttggtgaatttgtcgatcgccacgaacaggaatttgtagccggcctgtcctcgtgggaatggaccaagtatgttgagccccagcacgagaacggccaagtgagagggatggtttgcagtgcttgcgctggaagctttgtgtgtttgagtagatttttgcttgactccattgttgacgctattgttgacgaagcttgatgtcataatagtagaaccttgagcaccaaggccccctacctggcgcgccactgtcgacggtgggtacccgtagaccggatatagagggtattgaggtacgttggtacgatgatcacaaaagaagaattctttttctcttgatgagcggtgccttgacttctctttgtcagagtatcctgaacttctgtccttagaatggtgtctccgctgcctatccctgtctgcttctctatcacgctccctctcccgatcggagtccctgcccttgctatcacgatcagagtcccggcccctgctatcacggtcccgccctcttgatctatctctttctctttcccgagagcgatcaacattggattctgacttctcactcttcaaattcactgcagggccttctttaccattgggttcagaaggtaacgtcttcccatcatcgtcacctttttctttcaccttatctgaccctgccttaatcagtgcatccttttcctggctagaacttgacggtacaggggtacccttatcgcttgcaacagtcgttgcaggactttcctttgaagcatttgtatcagaagtcctcctatgcgtgaaggaatcattgtccttatacacttgtatatattgtgacttggggaggctgtagagatgagcaagaactctgcaaacttcctgaattcctgcctcatcagcatcaaacacattccaccagggaggatcttcagggaggggcacgccatgcctccttgctgcagcatacacaactccacatgctacaacttcactcttgaatcttacacatagagttgtccgcaagctatcgttggcaaggttccatgcctcttgcgtcagttcgggggcttcaagtgttgcaaggtagttagatatgaacttatgaggatgctctacatggcaaataaaccccatctctttcagcagatggcgttctgtccttaccagatcatgcttcaagtctgagtatttctttgaaaacacatctaagtgttctattggtacgttctctctcctacattccattctatggaagacaatgattatatgctttgatctccttggactctcctccaacttccctgccagccaaacacagcttgcagcaactctcttaacgctaaaccgaacaaatgatttcttgcagtaaaaacgatgaaacaatacttgtgctgtggccatcactgcttgtggtagcttgaggaggatgccgctctcctggatgaggtcgcagccgtagacgcggagggcggtctcggtggcctcgtcgatcccatccttcctcgacggcgagtcccgcagctgctcgtccgtcaggtagaacgtgtctatcgccgtgtagatcatctccccgccacgcgcgaccccttacttcccccgccaggtcgcccgcctctacccgagcccgatccccccgcgggcggcccgcgccgcgccgcgctcggccaggggcaacggtccgcgcagaggagcgaggcgccgccggagaagcgcgagggaggaggtcaggaggagcgtggtgtgaggagtggaggcgcggcgagggggcgagcggtggaggtggaggcggcggcggcggagaggaggatttgcgccggagattttttattttttatttttgaactggaaacgccggagaatttgacgaagcgagagctatagggattggggagaaagaagagagacggtgaggtcggagcaatctggtcctcgtgccgatcctgcagcccg

SEQ ID NO: 52998 - DNA, 345 bp, Oryza sativa
  Clone ID: PAT_MRT4530_5523C.1
gcgatagctaaattatcttgtagtgaaacggattcacctagataggccagataacctgaacatgatcccatatttttcttcgtcagataagcagtgggaagcagttggaggaatttctggattacaaggactcgattgaattcatcttttatgagtagatagagtagtccttgagcatgagcctggctatttttacattatttgcacacgattaaaaaaagatggataaagaatatgaggtcccaataatttctacacagtttgatctgaaattcggaatattcatatcctgagactcagagaaccatcaagcatgtctacatggaggatggttttctttggtgc

SEQ ID NO: 52999 - DNA, 1524 bp, Oryza sativa
  Clone ID: PAT_MRT4530_55240C.1
atgatgaagccgccatccaagacggaggtggagccatccaatatgataccggtcacattggatgatttcgtaggagaagaccgcaaagctatggaggagtacatcaatgaactcacacgggagacgttgatgagggcaagcaccaggactcgtcaaggtgtgatcatcaagcccgggccacgtcctaagctcgcccccgatttgactgagccacaaactaagccttacccactagacatgtggaagtacggtagtgctttgcaacagaggcacgagcttaatccttatagtacccaaggggagagcgcgcgcggaccgggtccacgggggtggggcccacgcggcagcctcacggtccacggtggactgggtgcacccgggctcacaccggccggagccgtgggccccacgcgtcagcctcactcgagggcacgggcggctgacggccgggccccacgcggcggccactcggcgcgcccgaaggcggccacgacggcgcggtcggcggcaggcggcacccgcgcccctatggtcgccggcagcggccataggcacggcggagcagcggtcgagagaggggaagggaagggggaaaagaggcggtggtccacggctcaccctaggtcgacggcgacgacgaaaaaggcggccagagcggaggaaggcggcggcgcggctcgggtcgacggggtcggcggcgttccggcggtcagcgagctcggcgtgggggtggacggggtcgacggcggtgcggctaagccggaggaggcgacgccggggcgggagacggtcctggcgagcggagaaggccggccggaggtcgtcggcgacggaggagagagagggcaacgacgcgagctcgattccggcgaggagaaggcgcggcaaagggtggaaacgggcgaaggaggtgcggggagggtttaaatagggttggaagggggagagggcggccgggagaggaaggaaaccggccgggaggtccggctcctcccgcttcggcatcgcctccttcggcttcgccgcgtcctcgtcgacctcgtccaccccttcgtttcgcccgccgaccgccggaacgccgccgtcctcgtcgacccgagccgcgccgccgcctctctccgcttcggtcgccgttcccgtcgtcgccgtcgacccggggtgagccatggaccgccctttcgtttcccccttccctcccctctctcgggcgccgctccgtcgcgccggaggtcgccgccggcgaccatcggggcgcgggcgcgtcgcctcccgtcggctgtgccggcgaggccgccttcgggcgcgccccgcggctgccatgtgggacccggccatcagccgcccgcgccctcgggtgcggctgacgcgtgggacccacggcgccggccgacgtaagccgcgtgcacccggtccaccgtggaccgtgaggctgccgcgtgggccccactcccgtggacccggtccgcgcgcccctcccctcggcgtccaagtctctaatttttccttaagaagccaagaacccat

SEQ ID NO: 53000 - DNA, 1182 bp, Oryza sativa
  Clone ID: PAT_MRT4530_55241C.1
atgacggtggcgaactacgtcggcaagatgcgggcgctggcagacgagctcgtggtctccggcaagttcgtcgacaacgacgaactcatcagctacatcatcgccagtctcgaagaggattatgaacatgtgatccaatctatcgtcgggcgtccagatcaagtcaccgtcagtgaggccttttttcagcttctaagctttgagcacaggctactgctgtgtcgtggagaagaaggacaagcctcagccaaccgaggacagtcacacaacacaattggtggcggcagcaacaaccgtacccgcggcggcagcaacaacgtcggcaacggcaaccgcggcggaagaggtcgtgggaaccctagcggtgcccgcggcaatccaggaggtgtcgacaataggcccaagtgccaactctgctacaagagaggacatacagtaaaggattgttggttccgttatgatgaaaactttgttctagatgaaaggtttgcaagttctgctatttcatacggtgtagataccaattggtacctcgacaccggtgcaacggatcacgccactggcgagttggagaagctaacagtgcatgacaagtaccatggcaatgaccaaattcacacagcaagcgaagcagggaatgggggaggcagcgccgtggggcgaggagaagcgaacgcagctgagctggcgggcccgctgatggcatgcgcagccgatgggggaggagaagcgagcgctttgcctggaggtcccacggaggtgaagcgcgagcagcggcaggaggagaagcgagtggattggttcacaacaacatgcgggaacggcgaccgaatctgcctcgtctgccgtgatgctgtcctcgggatcggtgtcgttgcattcgcctacttcttccgtgccgtcagctccgacttcaccgcccgagcaatcgcatgctgccacgtcttcacccacacgttcttcagcgtcctcgggaccccagtctggcgttggcgcattcatgtcatcgtctcactctgctgcggtagattccacgtcaggatcttctggtcacacgagctgatgagcaccacagaagatccatcatcagctcagaataatgatgatgatgatgatgatgatgatggtcctcctcgtcctcgcacaagtgtgtggaatcagaaaggagaaggtctacactga

SEQ ID NO: 53001 - DNA, 986 bp, Oryza sativa
  Clone ID: PAT_MRT4530_55242C.1
tgtataaactacaagcagctcacctcgcaaattaactgtcggccatggcggctgctggtgaagaagcttcaggaggcagggacaagtaccggtcgttcatgtacggcgagggggagaaggacaccgtgtggaggcttggatcccctccaaactacgacgtcgtcaacaagctcttcgaggaagagagaaccaaggaatggccagaggggtctctggaggagaaggtccagaggttgctgaagacctgggagatggagctcatccacaaggtgcgacccgaggaccagaagagcgtccactcgcagaaattctgcgcgagcaccaacgggatgagatttctgagccggaaggaggtgatggctatcggcggctacaacgcgttcctgcagacgaaactgccgccggagcaccgcatctatgacccggacaatgagacgctggagtccggcatggccacgttcttgacggcgttcccgcgtggcttcgccatcgaggtgctcgacgtctacagtggcccaccacggatcgtcttcaagtttcggcactgggggcacatggagggccccttcatggagcacccgccccatggcgagcgggttgagtttttcggcatttgcattttccatgatgaagcctggcatatatcgatcggggctaacgtgtcatctctaagagataacacgcttaactccggcttgagacgagtgcctagaggctttcgtcttgacgggatggggcaaggcgtgcgccagaccgccagtcgccacctaacccgtgatatgaccgacttcctaaagggggtcggggtgccccggccctcggggccagggcaagcgcagcccgaccccccctcgggggaaatcaggaggagggcggacacctcaccctcgggcccgacgtccccgaaggtgccaggccacgtgggcgattgtgtctgcctcaagcctctagtcatgatactcccggtcccatatcaccgacagtag

SEQ ID NO: 53002 - DNA, 192 bp, Oryza sativa
  Clone ID: PAT_MRT4530_55243C.1
atggcgaagccggcgtgcgcgctgatggcgagggaggccgagaatggcatccatgatccaatgaaaggggggagagaggcggcatcagaagacgcgatggtttccgttgctagaatcgccgtgaggcgagaagaggtgtggggcatgaccaaccgtcgtgtcccagaattggttgctgctctatccatatag

SEQ ID NO: 53003 - DNA, 202 bp, Oryza sativa
  Clone ID: PAT_MRT4530_55244C.1
gctactagtattgtagtatgtaaaacatgacctgaaaaatcctcctttaaaaactggttatcttccatactatcttcttgcatctgttcatgtgatctaccaaaatgcatgtctattcaagtgtttcgcacgtcctttagcatatcttttttaaaaactattttatgtctttagtgcagcttttcttctaataaatttgttt

SEQ ID NO: 53004 - DNA, 540 bp, Oryza sativa
  Clone ID: PAT_MRT4530_55245C.1
ggccgcaaattttttttttttttttttccagatcatttaatcctaatatttaaaaaggcaactaaatttatttgttcattacactcctttaaaaataaataagcagccttgcaacgcaaacaacagaactgtgcttgcgccggaatcatctcagggtaaccaggtgcgccacagttatgctgcccagggacgtcgccccaacgctgaactgcaggaggagctactgacctcctgacagggtaaaccacagctccatgatcgtcatccaggacctgaggatttcaccgcgccaccgcttttgccggtgcttgtgtcggacagatgcgacgcgccgtgccaccggccgcgacgccgcctgccgggaggactagctgccggccgcgccgccgcctgccggtgcctgcctctgacctgatgccacgcgtggtaggaagacgacggaggaggcaaggacgctgaaggggaggagacgccaacggtgccggaggtggagagggcgggggcgacggacggcgacggagagggcagggaaaacgtcgg

SEQ ID NO: 53005 - DNA, 250 bp, Oryza sativa
  Clone ID: PAT_MRT4530_55246C.1
aggaggagctcgcggtggggggatgggagtggcaccgccggtagggagaggcgccgttggtgggggtagggggaggggaagcggcggagagggatcgacaaaaggggagaagcggccaacgggcccaccacacaaagagaggaggagcaaggggagcgtacttagacttctttgggccgacgggtgcttttgggctgaggcggagagaagtggaatgggaggaaagcgggccggctcggttgcgggctga

SEQ ID NO: 53006 - DNA, 1678 bp, Oryza sativa
  Clone ID: PAT_MRT4530_55247C.1
aaataagccacgactaggagtcgggcgtgcatagaacggcagatgcccccatccttcaatcacaaactcagaacacgccaaaaacgtcaggggagccaaagccacttgggcacttggcttgacaatatccataacttacaaacattgctcgaattcctggcaaagaaatcgaatcaatgcttggtgttcatattgcctatacaaaatcagatcagggcaaaagcactagtgcacggaatctgcctatctggagacaagtagttcacccttggggagtttctcttggtggatgtacaaaattggcagcagctgattgggttgacacagcttcacgctgccgggatctgatgggtgcagcggtctatttcttcgctggggccttgtgaagcttatcaaagatgggatgtctcaggacttctttcgcagatggccgcctcactggatcaggatccatcatggactttattaaactctgaaattgcattgggcatcctggaagcaacgcaatttttccctcccggagacttgtgaactgaggtccagaatcaggaagctgggtacctcttataagttcatagatagctgccccaagagaaaagatatccaccttgtcaagatgctcatacttgtcgttcagcatctctggaggcatataacgtgaatctccatcttcaattgccaaactccgatcaataagtgtagcacaaccaaaatcaccaagcttataaacaccatttctgacatatatgttatctggcttcacatcaaggtgtgcaataccacgttcatgaatgaagtccaagcctttgcagatctggtacagcagttccagggcttccccacatttcagcggctgatttctatccatggacaggcagcggtcacacagttccatttgaataaaaagctgtttgttctcaaaccaagaagtgaaatatccaacaatgttctcatggcaccctaaggctgccaaagcttgaacttccttcactgcttgcctcctttccctgtcattatgcagttgcctgatactccgttttactgcatataagcagccatctatcctcttcagaactttgaacacaacactgaagtttccacgtccaatttgctgaaaatcaagtgtgctcataagcaaaaccaacataaaatggaagtgtataacctcaatctcatggaaatcagttcgatagcgtgaaaggccatcaccatcaacagaaggagaaaaccctgatgatttgcattgtctcccaccaaaaacattatcatctatttgatgatctgtattgaggtatggattcctgatgcatggtggaggcatcacccggcagcgaagagccactgccgattgggagacataactacctctcttgtgcgaactagattccttcagctgttcctcctctgaatcatctagaccttcaaactgaactggagcaatccactggctatcaaaaatgtcattggagccaaggcctttgggggaacaatctctcttgtatctcttgctcctacagactgatttctctggagaattggggcaagggatattctccttattggcgtcgaagccgctcccgagctgcggcgcatctggcgtgatgtaatccggggtacagaagaaatcctggctgaggatgccactatccttctcctccacgacctcgtcggcgtccat

SEQ ID NO: 53007 - DNA, 513 bp, Oryza sativa
  Clone ID: PAT_MRT4530_55248C.1
atggggccccacatgtcatcctcactatcccctactctctatcccccctctctctcccctcttctctctatccccctctctctccaaccagcggagcggggtaggcggctgccgaagcgggcgacgggtgggatggagtggtcgggcggtggagggggcaacaacggcggaggtggccggaggaggagctcaagcagttgctggaaaactttaagggcatctccttttgagctatcaagaatggcgtcccaaaagcccgaaaagaaaggtccccctgagggggaagaaaaaccaaatgaggtcacaatgtgcaagattgtcgataaatacaatggttccgttgatatctgtgcccattgctggggtggaatcaggcatccaaaggacggtggatttgttggctacgtaggagcattgcctgaggggctgaccattaatcacgctaacatgctgatgcttgaggacaaggttgttggtgatccaactggaattattcgtgcaatttcacgttga

SEQ ID NO: 53008 - DNA, 1141 bp, Oryza sativa
  unsure (1)..(1141): unsure at all n locations
  Clone ID: PAT_MRT4530_55249C.1
tttttttttttggccgcgggttttttttttttttttttgtccaacgacacattgcaacacttcttttaataagttttgagagtagcgggactgaccgatcatatgtgactgaccgatcggcctactaataaacaatggaataacgactgcctcataggggagtaattgcagatgcaggtgtgacaacaacaacaaaagaacaaccgtaacagcattccagaatgaacaagtagtcaacaacataaagaagacgctagctagctaatcttccaatcgtcgtggagcattccaagccatgcattcagttgacacttgatacttgatagattcttcccccacatacagcagcgtcacctctcctccagtcgtcagcaattctcgtctttcaagtctctctcttctttccggacctcaagcatcagcatgttagcgtgattaatggtcagcccctcaggcaatgctcctacgtagccaacaaatccaccgtcctttggatgcctgattccaccccagcaatgggcacagatatcaacggaaccagtgtatttatcgacaatcttgcacattgtgacctcatttggtttttcttccccccttaattcagcaaaaaggggtgttgaacagccagcaacagtggctctaaagtacacgtgccagaaacattgtttgtcagcaagcctcaagataaacatgtggctatccttggctactcccttggttgctttattggctggattttccaagttgtagtagtgcattgctagacgggtgcaaacacgtgtctggtgacattgacttgtatttttatgttcttgccaattcaatggtcccggcagcttgctgcggtcccttgaaattgcatccggctgtagcatgcggtgatgaaaaaattcttcagcagcatcagggggacctttcttttcgggcttttgggacgccattcttgatagctcaaaaggagatgcccttaaagttttccagatgtatagggtggcgggcgagaatgattgagccgacggcgcgtgggaatggggtacgggacgacacgggaaagggtttagccggcggcgaagaaacgcaaaggcgtggccgcgtgagtgagcccggccggcgaggcttgagctgagagcctnagagtggt

SEQ ID NO: 53009 - DNA, 367 bp, Oryza sativa
  Clone ID: PAT_MRT4530_5524C.1
tctctgttgatacgtcgcccgctctaccatcaccctaatgcttggtcttggggccaaaggcccaataccctctcgtgagaaattttaaatcctcaaataggtcttaactgtgtcaaatgggaacccgttatccgttccccacatcacacaaccttctagcctgaagcataaagcgtgaggcctgtggtgactaatcagtgacccatctaccgtgatgtgcttaccgcacactgtccgctccccaaaccggaaacgccatctgccttgtgcattcggaaatcgcccaaggaaaggagaaaggcggtttgcgccctgtgcacaattccctttcatcgcttacttactctctgagcttaggctgacgaaa

SEQ ID NO: 53010 - DNA, 450 bp, Oryza sativa
  Clone ID: PAT_MRT4530_55250C.1
aatgctcaacaagatagtacaccacaaatgcaataattggtcttacattgttcaaacaaacatgacgaatttccaacagaattccggcaatagagatgacaaaaagggttctctaatacaaaaaagaaaacaataattaaccggcttatctccatgcactactttattggacaaaagggctagtcgcataagagaacatctgatagtgccaagaatctgctttagcgtctggcaaataccaaatacagaattcatttgaattctgacatttcacaggcgtgtggcatgttgctccacgaggaagaattgaacatgataccgtcgccaagaacaggtctgcaatcgatactcaagtcattgcccagaagcattgctatggcattgttgaaaactgatggatcagctgtattcccagaaaacaatgcatctggcctgaagtttttaggatga

SEQ ID NO: 53011 - DNA, 573 bp, Oryza sativa
  Clone ID: PAT_MRT4530_55251C.1
atggaggtggcggagccctgcgcgaccggcggaagcgacggagccgcgtgcgccggcgtgggaccgtgcggagccacgaacgagcggtggaggcgcgtgcgccggcggggccgcgccgagctatgtgcgggcggcggagccccgcgcaaccgcggaggcgctcgtgggcgacggagccgcgacggccggagccccgcggcgctcgtggaggcgacgatgccggctggccgaggcggcgacagatgcacggagttcccttgccgcgccgggcgcgagcaggaggcggagtaccccggcgcgcgcgttgcatggcgcgtggtcgtcaagtttgacgtggttgtgggttccatcctgaccatgctggcaccgcgccgttgttcagcggcggcgcacaaggacgaagcctccgcgaagcagtctaagcacgacacggaagcggcgtcgtggggcctgacgctgtttcgccatggccgaagcatggaacagcggcggcgcgacgaggccgagtccacgcggagcattgtcggcgcctcaaggcccaccacgcgaggccgaagcgcggcgcggcgctag

SEQ ID NO: 53012 - DNA, 224 bp, Oryza sativa
  Clone ID: PAT_MRT4530_55253C.1
acgacacaatatttatcacaactgggaacacatttaaaaacacgtgtataactccccaaataatatcctctgcacaacaaatgtcaaacattatctcccctttgttcccttaaacatcttataactgcattttagaagctcctaagactcaaaaaaaaacacttcctcaacacctctagatttttctaccactaatatttccactttatttatatctaatgcat

SEQ ID NO: 53013 - DNA, 455 bp, Oryza sativa
  unsure (1)..(455): unsure at all n locations
  Clone ID: PAT_MRT4530_55254C.1
aaaaaaaaaaaaaaaatcaaaaaaaaatganaaaaaattttcgaaaaaaaaaaaaataaaaaaaaaaaaaaaaaaaaggggaaaaaaaaaaaaaaaaagggggcggccgttttagaggtcccaggtttccttccccgtgcttgcaacgtattactttttttttggggtcccctaatttcatttcattggccgcttttttccaccgtggtgactggaaaacccttgggtttccccaatttaatcgctttgcagcacttccccttttccccagttggcgtattagcgaaaaggcccgccccgatcgccttttccaacatttgcccaaccctattggcaaatgggaccccccttttagcggccctttaagcccgggggttgtgggggttacccccagggtgaccgttacatttgccagccccttagcccccgctcctttcggttttttcccttccttt

SEQ ID NO: 53014 - DNA, 557 bp, Oryza sativa
  Clone ID: PAT_MRT4530_55255C.1
gatttaccctcttgttcttacccactcttctgttatcatttacttcgaggattgattggccggttggtacacctatcttttccttgttagtggcaatgatttcttccttgttgccttctggatttagactacatgctacagaaggattaaggatagttagttcttgatttgcaatagaacaaaaccgttgacttgctacggtcttgtaccattctgtgtttgatcgatcccgttgtagtagtactatagtatttctcaaggtaggtttcctggaaatctcatttgggagtttgattttgttgcatcagttgtgcgaacaagcatactgtgaagctggcacgccaagcattgcatgccaaatcctggctgaagttactgaaaataaaattgtagtatcctgagtatttcaattcataacaacgacccaaaaaaaaactctagttctttttttctttttaacttgcgtgcagtaattaccaagtgtatgattacgaaatggcactataatgtccaaacgagatatttgagtagctttaatggaactcattaaataaaaa

SEQ ID NO: 53015 - DNA, 650 bp, Oryza sativa
  unsure (1)..(650): unsure at all n locations
  Clone ID: PAT_MRT4530_55256C.1
agtgagagcaccagcaccagtcactgcaaatcgccttagctttagtttctttactgaagaatttcttaaggcactaagcatgggttcgtcgtggacactcgatcagaacaaggtctttgagctggcgctggcgacatacggaaaggacacgccggaccgctgggaaaatgtggcgcgggcggtgggcggtggtaagacagaggatgatgcgaagaggtactataagaagctggaaaatgacatcgtgncgtattgacttaacaggtggaagaagnagtaantttaatgggcgtagcagaagtgaggggaagaggtgttgtaagtgtcagggatggtaggtgtttatttagggttaggataaagtancagtcagttttgctatatattattcgaagaaattttccgcaaaaatttatcagatgtattatcagnacaatcggantgtaattgcactgtaactatagtgtaacttatatgtaactttcaaaaatctctccgtaacatattatttnngtaaaatgggggncgnnggaacaatttatttcatatatngngngtgctatgattttggtttcttgctcaccanaacaaatcttgggatanatctaacgantttaaattattgtgaacctacatataagctacactgt

SEQ ID NO: 53016 - DNA, 2861 bp, Oryza sativa
  Clone ID: PAT_MRT4530_55257C.1
ccgctgatactgatagcctcccaccgatcaattccaaccctaaccctccgcctccgcctcgcctcgccggcgccgaagccctcgcccgctcgtcggcgacccctcggcacctcatcctccccgtacgcgcgcgcctccgctcgccggggcgagagggattcgtcggccacggtccgcagccgcaatggagcaagatcagggcgttgctgccgcggcggcgtcggagaatccaagcgccggccagggcgctcacgattccggtagcgcgggggctggcgccgcagcctcttccattgcgtctttcgattcggccactgcaaaccctgacgcaaacgtttacagtcagaatccgagctccgtcccgcaagccgatggcgctcagggagcggatgcctccgtgtaccccgccgaccacgcgccgctaaacgggacatcgggccaggtggtagattaccagtctgcgggggctgcagagaacggcgccgccacaaacgagatgggtgagccggttcccgagcagtcctatgcggatgctgtgctttcagcagaagaagcaaggttgtggaatgccgttacagcgaattgcttagacttcaatgcttggactgcgcttattgatgagacagagaaaactgctgagagcaatatcttgaaactaagaaaagtgtatgatgcattccttgcggagttccctctctgctttggatactggaagaaatatgcagatcatgaagcacgtcttgatggtgtcacaaaagttatagaggtttatgaacgtgcagttcttgctgttacttattccgtggacatttggtataactattgtcagtttgcaatttctacatatgaagacccagatatcatcagaagactgttcgaacggggtttggcatatgttggaacagactatcgttccaatattttgtgggatgagtacattaagtacgaagaatcactgcaggcatggagtcatctagccatcatatatacgagaatattggagcatcctataacacagcttgatcggtatttccattgcctaaaggagttggccgcaacacgaagtttatcagaaatacttacctcagaggaagctgccatgtattctgttactgccgagaacactgctcagacgcttgatggagagacacaacctggtgatgtagatatgtctgctcaacccgaaatttcaggttcaacagaggcagataacctggcaaaatacgtttctgttagagaagaaatgtataacaaggctaaagagtatgagtctaagattattggttttgagctagcaattagaagaccatattttcatgtcaagccccttgacaatccagagcttgaaaattggcacaactatcttgatcttattgagaaagaagaagacataaataagttgtttgaatttttaatctcatatatgcaggttatcaagctgtatgaaagatgtgttattgcatgtgctagttattcagagttttggatccgttatgtgctatgcatggaagctagaggaagcatagaactagcaaacaatgctctggctcgtgccactcatgtttttgtcaagaagcaggcagagatccatctgttcagtgcaagattcaaggagcttagtggagatgtctctggagcacgtgtagaataccagcatctttattctgatctgtaccctggccttttagaagccattgttaagcattctaatatggagcaccgattgggagataaagaatctgcttgctcaatttatgagaaggccattgccgctgaaaaggaaaaggatcggagccagattttgcctactttgctgattcagtactcacgattcttatctttggccatcggtgacatcgagaaggcaaaggagacgctaactggttttctcgaacaatgcgatttgacaaaatcaattattgaggctatcatgcaactagagtcgatccttccatctgaaaagcgtattgaatttttagattcactggtcgagaagtttcttacagctgaaccaaccgaaggggaagtcacaagtctagctgacaaggaagacatatcttccatatttttagagtttttggatctatttggggatgcacaagcgatcaagaaggctaccaatcggcatcttactcatttttcgcggaagagaagcatgctgtcatcaaagaagcgaagagctgatgatgttatcatgtcagacagagataaattggctaggattggggatggtactcagccagttgtgggaactgatccaaatgctcataatcctccagtttggccagcgacatctgaagcatcggggcaacaatggggagctgcttatgcaccacaggccacttatcctgcgtatggaacttacgactacagccatcaaatgcctcaatctgctcctcaagcagctgcttacggcgcctatcctccaacataccccgctcaggcctacacacaacaaacctatgcacaaccttcagcaatggcggtggcggcaccagcacccgcagtggcaccggcggcagcttaccctcagcaacctgttgcagctcagcaaccatattatggaacaggaacatactactgatctgtagactgattcaagagggtgctacgaaagtctgtttatttgttctcgcgcttgtatcgctgcagcctaaattagcatattttactgatgatactgtaggtcgaagccatggcaggaccctttgtattagtactactagcgttaccagaagactagttaagcacatgatttgtatagcacctcgtgacattttcctgctagcataatggtccattgttttcatctctaaaaaaaaaaaaaaaaaaaaaaaaaaaaaaaaaaaaaaaaaaaaaaa

SEQ ID NO: 53017 - DNA, 229 bp, Oryza sativa
  unsure (1)..(229): unsure at all n locations
  Clone ID: PAT_MRT4530_55258C.1
atggatgtgccaatgattgcgtgtgtcgttgcggtgcaatgggtgcactgaaaagggagcctgtgcgtggtgatgactgtgatgcccatgatgctgtgtgtgtgtgtgtgtgcctgtgtgtggtgtgtgaccaaaatgttgtgcggctgtggagggtgtgtgcgatggaaggatgacgacatnatgatgatggcacccctgctggcccnatgtggtgaaatgacccaan

SEQ ID NO: 53018 - DNA, 1218 bp, Oryza sativa
  unsure (1)..(1218): unsure at all n locations
  Clone ID: PAT_MRT4530_55259C.1
caccggtgccaagtcaaagcctagccaagccacgcgagacgagtgcgtgcgtgcggagagagagagagagagagagagagagagagagagagagagagagagagagagagagagagcatcgcggggatggcggcggagagggacatcgacgacctgccgcgggggggcgccaactacacggcgctcacgccgctctggttcctggagcgcgccgcgctggcgcacccggcgcgggcatccgtcgtgcacggccccgtgcgctacacctgggccgacacctaccgccgatgccgccgcctcgcctccgccctcgagcgccggtccgtcggccacgggagcacggtagctgtaatagctccaaatatcccagcagtatatgaggcccattttggagttccaatggctggagcagtggtgaactgcgtcaacattcgattaaatgctcctactgttgcatttctcttggagcactcatcagcggaagttgtgatggttgaccaggaatttttctccctancagaggattctctgaggattattgcggagcaaaagaaaggagctttcaaacagccacttctaattgttattggtgatcaaacttgtgatcccgtgtccctcaanagtgctctgagtaaaggagccattgagtgcgtccggtttctggaaactggcgatcctgaatttgcctggaaaccaccacaggatgaatggaagagtattgccttaggttatacttccgggacaacttccaacccaaagggcgtggtactgcatcacaggggtgcttacctaatgtcactgagtggtgctctggtatggggaatgaatgaaggcgctgtttatttgtggactttgccgatgttccactgtaatggctggtgctatacatggacacttgctgctctttgtggaacaagcatttgtcttcgtcaggttacagcaaaggccatcttctcggcgatagccaaccaaggcgtgacccacttctgtggtgcaccggttgtcctcaacaccatcgtcaacgctccgccggctgacgccatcctccccctgccgcgtgtcgtcaacgtcatgaccgccggcgccgcgccgccgccgnnggtgctcgcgtncatgtngaagctcggttttcgcatcacccacacctaccggctgtccgagacgtacgggccgtccacggtgngcgcgtgggaacccggagtgggacgagcttgccgg

SEQ ID NO: 53019 - DNA, 2291 bp, Oryza sativa
  Clone ID: PAT_MRT4530_5525C.1
atggttaactttgggaagaaattgatggctgatcaaattccggaatggaaagggtactacataaactacaagttgatgaagaagaaagtaaaacagtacgggcagcaggttcaacagggtgagaaagatcgtcgccgggttcttaaggatttctcgaagatgcttgatgatcagattgagaagattgtcctatttctgttggagcaacaaggagcgttggcaagcaggatagagaaattaggaaagcaaagggcaatattagcagaacagccagatatatctgccattgctgagttgcgagaagcttacagggaagttggcctggatcttatcaaacttctcaaatttgttgatctcaatgcgactggcattcggaaaattttgaagaagtttgacaagcgtttcggctacagatttactgattactatgtgacaagtagatcgaatcacccatattctcagctacagcaggtcttcaagcatgtgggtgttggagctgttgttggagcgttgtcacgtaaccttgctgaccttcaagagcggcagggaagttacttgtcaatttacgatcagccatctactgctcttaaggacccaatcattgatatgataaattcatcagtggataagctaacacgctcaacaaattttcttagatttttggggcaacatgccctaattgttggtgaggagtctcctagtactgcagaggaagaagaaatagaagatcaaaaataccatttcatgtcccttatgctgaacttggtgaacacattcctttacatggtcaacacatatatcattgtcccgactgcagatgactactcagtgagccttggggctgcttccactgtttgtggtgttgttattggttcgatggctgttgcgcaaatattttcctcagtttacttcagcgcatggtccaacaagtcatatttcagaccacttattttcagcagtattgttcttttcttgggtaatgtctgctacgcaatggcatatgatatgaagtccctaacagtcctcattattggccgtctactctgtggaatgggttctgcaagagctgtcaatcgccgatacatcagtgattgtgtccctgcaaggatacgcatgcaggcttcagcaggatttgtcagtgcaagcgcacttggcatggcttgtgggcctgcattagctggcttacttcagtggaaatttaagatttacatggttactttcaaccaatcaactctacctggttgggtgatggctgttgcatggcttctgtacttagtttggctatggatctcgttcaaggaaccaaatcgtgccactgaggtgaatggtacccagcaaaatcctgcttctgtacaaagggcagatatcgagcaactagaaaatggacttgcacaaccattactaagagattcaagcaaaaaagatgaagatgatgacgaagaagtcgatgatagcgaagaaggcacacatgattctcgcaaacccgcgacttcgattggttcagcatacagattgcttacaccttcagtaaaggtccaattgctgatatatttcatgctcaaatacgcgatggagattttactttctgagtcaagtgttattaccaatcactatttcaattggaatacaagtgcagtggcgatatttctagcaattcttggcctaacagttcttcctgttaatgctgttgttgggacatatatcagcaacatgttcgaggacaggcaactcctgatggtgtctcaaatcacactgctggtcggcattattttcagcttcaaaatcacgagcacatactcggttgtccagtatgtcgtctcagcactggtcacatttgtgtctgctgaagttcttgaaggagtgaacctctccctcctatcaagcgtgatgtcgtcccgtctctcccgtggcacctacaatggcgggctcctctcgacggaggctgggaccttggcccgggtggtcgccgactgcacaatcactgcagcagggtacctgggaatcggaaagctcctcaatgtgaccttgctgccgtctctggtgatctgcgctgcttcgatcgcgtcaaccttcctgacgtacaactccctcttctgatggcatcaacctgttccatgatgattttagaactgtcgttgcccgaagggacaacagtatgtagttatctcaatcgattcgatttggctgtaatatcgcagctgaagcgtgcatggcatgctctgtaaaattttgatcagttttgatctatgatcgatgcctctccattctgtcatgaaaaaaaaaaaaaaaaa

SEQ ID NO: 53020 - DNA, 1150 bp, Oryza sativa
  Clone ID: PAT_MRT4530_55260C.1
atggcggccgacctcccgcgccggtttcctcccttccccggccaccctctctcgccccggctctatttaaaccctccccgcacctcctccgtctggttccgcctctcgccgcccttcctcctcgccggatttgagctcgcgacgtcgctctctctctccgccgtcgccgccgagctccggcccgccgccgtcgtcaccccggaccgtctcccacctcggcgccgcctccttcggcttcgccgcatcctcgccgacctcgtccacccctccgtttcggtcgccgaccgccggaactccgtcgaccccgtccacccgagccgcgccgccgccttccttcgctccggtcgccgtttccgtcgtcgccgtcgacccggggtgagccgaggaccgccgcttctcttcccccttcccttcccctctctcggccgccgctccgccgtgcctatggccgccgccggcgaccataggggcgcgggcgcgccgcctcccgtcggctgtgccggcgaggccgccttcgggcgcgccccgcggctgccatgtggggcccggccgtcagccgcccgcgccctcggggccatggcgaaggtggcgttggcggtggcggcgatggcggtgctgctgctgctcgcggcggcggcggcgccgggggcggaggcggcgtgcgacgcgctgcagctgtcgccgtgcgcgagcgcgatcatcgggaacgcgtcgccgtcggcgtcgtgctgcagccggatgaaggagcagcagccgtgcctgtgccagtacgcgcgcgacccaaacctgcagcgctacgtcaactcccccaacggcaagaaggtcttggccgcctgccacgtccccgtcccctcctgctaaaaccaaaccataatactccagttctgcgtgccgtttatacgtgtgtgagtgcgcctgtcgcatggcccacctgccatagacgccgtctatatatggacgtacgtacgtgtctcgcttacttgatttcgtgtctgcttcgacgagttcgatcgtgccgtgtattgcgtacggttatcctgctctgtattgggtatgtatgtatgtatgaataaataaagccagaaatgcagttgtacgaggttaaaaaaaaaaaaaaagacaaaataatttataaccctttttttataaa

SEQ ID NO: 53021 - DNA, 177 bp, Oryza sativa
  Clone ID: PAT_MRT4530_55261C.1
atgtcgttgtacaggttaagtaaaacaacagcaattattagtgagatatgcaggtatagtctagtggtgggagccgatgccgacgacgacaacgactgccgcgatgacaacggcgccgacacctgggtcccgccgcctgctgcaacgacgacgccgcctagatccaccgccggctag

SEQ ID NO: 53022 - DNA, 1092 bp, Oryza sativa
  Clone ID: PAT_MRT4530_55262C.1
atggactccccagcgacccccgtgggcttatctccgccacttctcagtctggtgccccgcaatgaaccatgctatacaaaaggaaaaggggatttattgcgtcagcgggctagggtttggtggaccgggcgcacgggcgggcggttcacgcgaacggacggccgagatttaaccgatccaagatggacggccgagatcgatcgggtccacggcggctcacggcggacgaccccgatgacgtcagcggtgacgtcaccgacagcggcggcggctcggcggaggagacggctcgaacggcgcacgctcgccggcgaacggcggcgctaggacgcaaacggagggcaccaagacggagaggacaacgcggcgaactcaccggtgacctaaacggtggcggaagaccaacggacggcgacggcgacgaggaggaagcggcgggaaccttcgggttgacgacggcgatgctgctccggtgatctccggcgacggcgaagaggcggacgaggacggcgacgacttggcgagcacgacggtggtcttcccgagcgacggcgacggctgaaacgacggcggcgcacggctggagcggcggcggcgacggcaaagctagggcacacggcgctagagcgattccgacgacgagaggcgaaggcgagggtggcgacgggtagaggagacaccgggggtccttttaaaggggctcggaggcgacggcaaaggcccacggcggccggcggcgaggaaggaaagatcgggaagaacgaatccgagacaaactcgaatccaacgctttccaaaacgatttagccaaagattccaaaggagaaaaggtagaggagatcccggagatcatttcccctctatcaattcggccggagaaggaaagggacggccggattggaaagcggcggcggcggcgcgaaactagggtttcggcccgaggaagacgacgggcctgacaggtgggacccacctgtcagcgacagcgagggcgcgcgcgcgcggcagctgcggactgggccggactgggccgaggagagagagagcggttttgggccgactttcggcccaaagccaaaagagactttttaa

SEQ ID NO: 53023 - DNA, 284 bp, Oryza sativa
  Clone ID: PAT_MRT4530_55263C.1
aaataaaagggcagagccctccatttccattaaaaaaacccatgagtttttacaaaaaaggagttttggaaaacccgagaggaaaaacccccaggggctcacaaaaaaaacagagacaaaatgaaatccagctagcacaggccttaaagttttatgcaggccttaaagttttatgctatctttccataactcaactaatttttctccaaataaccattgggtcctcaactaccagtttatcaacagcctcaataaagcagccaagggtgacccctataaaacta

SEQ ID NO: 53024 - DNA, 2800 bp, Oryza sativa
  Clone ID: PAT_MRT4530_55264C.1
ttagggggttttaatccccattgattcctcttcaatcccgcccaatttcccccttgaatggcgcccccaatcgtcgggaatggacgcgtctttcccggccgccttccatggccgccggccgtgtttcccgtcgccgttccgccctctcccgtgcccggctccctcccccatcttataaaatggaaccacctcggtacgttctccagttttagccccctcccgcgctctctcgtggccgccccgcctctccccgccgtcgtcctctctctcccgtgccgccggccgcctccagccgcctctccctcctcgccggagcgtcgtccggtcgcgccgtcgccgccagcagcgtcgcagctgcttcccctccaccggcgtcgcctccgtttcatgcggagaccaccggagacggtgcccccgccggcaaccagtggcattggtgccactgtactccctccagccggctgctgccacgtccccggagcgtcggccgacgtcgccatctccttcgtcgacgccgtggcaacgtctccttccccggccacacctcggtttcgccggaacaccgccgtgtcgccaccaacccctccacccgcctcgccggagtcctccggccgcccgttcctcctcgcttgtttaccagtcagccgcggcaccaccatcttcggcatcgcagccgcgacgtcgtcctcggcctcgcctcccctccgaccgaacaccgccgcggtccatcgtcgttgtctccgttcgttctcgtcgtcgacgtcccgtcggtcgcccggctcgtcgtctcgcggcgccgcctccgtcatcgtcatcatagcggcgtgttccacgtcatcctcgtccccgtgcagccgctgccggctgtcctcgtcgcctcctcgccggccccggtcgtcgtcgccctcgtcctctcgtcgttcccgatcgtcgtggcgttcgtccctccgtcaagccgttctcgtccgtcgtccgcgttcgtcaagcgagtcgctgcagccccgtcctcgtgttcgtcctcggctccgcgtcgtcaagcctcgtgccggccgcgtctcgccttcgcccaaggatcgccgccgaagccgtcccctcgccgttcgtctccgttgtgcccgtctgtctccgccgcgcccgttcgtcgttgtcgttcccacgcctcgtcgcgtggtggtcagtagaggacatcgtcagttgtttgccgaagctccagaagactgcaggatctgctagtgaagtggaggaagcagtgaagccagctgggaagcaggacaaaagacttagatctgttaaggtcctatccttagtttctaatctgtctctcccctttgttttccctctctccctctccaaacctttgcaacagatggctgacaatgagaaaggcaataaggtcagaagtcaggacattggtacctcaaactcccgagtgaatgaagcaccagacaccagttgtgtggcagtggtccaacacctgattaaccagaacaaattgcttatagagatactacagcagcatcggatgccaattttgaacccgagtcagatgcaacctcaagtgcagttggaggcagtccaagcactcacaccacaagtcagcgcaccgccaacatcccagaaggcccctcatgccatgccacatgttgacccaaaagaagcaagtatcatctgttttatgtgtgatgagcaagggcactacgcaaggaactgtcctcagcagaaaagaaaagcaccaatgcgaaccgaagatgaagtccgtaagatgatcattaccagcacagaatggcctccaccaggaatgacaaaacatcagagaagaaattccttccgaggtgcacaacagttgacagagcatcttttagctaatggaggtagagtgtctgatagtgaagattcagatcaagtctcctcagatgatgaaggtgcgaagcctccccaaggttttaaccagaataaaatagaacttaaggcatgctctcgttgtggagaaatcggtcatgttgccagctcgtgtgcctctatatgcgttcattgtgaggaagaccatccacccgacaggtgtccaacgagcaggatcacttgtttcttttgtgaaggaactgatcatgtaccaaaagattgtcgattcagttttctgctgacgaagaagatggccaaccaacccgccagttccaacggagagaagcatcaaggaaacacaaatcctcgccaagattccagtttcagcctaactccagtgccaggacagaggaatcaaaatgagaaaagaaaatgccgagtccgggaagatatctgttgcttcaattgtcaaggaatgggtcatttcgccgacaagtgcccaaaaccgagaaacgtagctgccagcacgtcagtccacgcaaacccccgcaatcagaagcttgctcctcaacgaattgtcatccatgcatcccgaagcagtccgatagcccgcgttgcaacagctccaactccaatgagtgcactaccacaaggtgtcaatgctcaatttcagccccagccaccagctgacaagacagaggccagtatctgcgttgtacctttggaagttccaatacagcagctgagaaatcaagtacaagatgaagaacccgagtgtaagaaagttattgtttgttacaactgcaatgaagaagggcattactccaaaaactgtccccaaccaaggcaaaatcgacctccacattaccgccaatttacacgaagcagacattccaatcgtattgtggtcactggagcaaacgctgtacccgtgaggcctcgtgttaatcagaacccatag

SEQ ID NO: 53025 - DNA, 1146 bp, Oryza sativa
  Clone ID: PAT_MRT4530_55265C.1
atgagtagagtgtccactagttggggttttgtttattctagggtgaacaaggccgaggggaggggcgcgcggaccgggtccacgggagtggggcccacgcggcagcctcacggtccacggtggaccgggtgcacgcggcttgcgccggccggcgccgtgggtcccacgcgtcagccgcacccgagggcgcgggcggctgacggccgggccccacatggcagccgcggggcgcgcccgaaggcggcctcgccggcacggccgacgggaggcggcgcgcccgcgccccgatggtcgccggcggcgacctccggcgcgacggagcggcgcccgagagaggggagggaagggggaagcgaaatggcggtcctcggctcaccccgggtcgacggcgacgacgggaacggcgaccgaagcggagagaggcggcggcgcggctcgggtcgacgaggacggcggcgttccggcggtcggcgggcgaaacgaaggggtggacgaggtcgacgaggacgcggcgaagccgaaggaggcgatgccgaagcgggaggaggtccggggcgacgacggcggcgaaccgaagctcggcggcgacggcggagagagaggacgacggcgcgagctcgattccgacggggagagaaagcggcaagggtcggaaacggaggagggaggcacggggagtgcttaaatagtgttgggagtgagagagggcggccggaggggaaggaaaccggcgcggcgatctcggctccatcaatgacgccggcgaagtttgcgggaggatttccaaacgaatccgagagagagagagagggaaaagtggggggaaagagggagggaatcacggggagtgatttcccccctctttattgcgcgcgggggcggcgggatgcggcggaatccgcggcggcggcggcgctagggcacgggcgaggcggcgggcgcggcgcgaggtaggggatgacgggtgggccccacccgtcagcgagggtggcgggcgggcccgcccgtcagcgacgcgcgcgcgggggaaggccgatgggccgcgggggagaggagagagagagagagggagctgggccgagccggcccaagagaggaaggggggaaaaaggacttttagggatttttctttttataaaaccactt

SEQ ID NO: 53026 - DNA, 1662 bp, Oryza sativa
  Clone ID: PAT_MRT4530_55266C.1
atggcggggccccgcgccctcgccgtggcggcggcggtggtggtcgccgcgtgggccgtcgccgccgccggggacccgccgctgtcgcccaaggggctcaactacgaagtggcggcgctgatggcggtgaagagcaggatgcgggacgagaagggggtgatgggagggtgggacatcaactccgtcgacccgtgcacctggtccatggtcgcctgctcccccgacggattcgtcgtctcgctgcagatggcgaacaacggattggccgggacgctgtcgccgagcatcgggaacctcagccacctgcagacaatgttactacagaataacatgatatcaggtggcattcctccagagattgggaagttgaccaatctgaaagctcttgatctttctggtaaccagtttgttggtgaaatcccaagttctctagggcggctgactgaattaaactatctgcgcctagataagaacaacttgtctggacagatccctgaagatgtcgcaaagcttccaggtctcacattccttgatttatcatccaataatttgagcggcccggttccaaaaatctatgcacatgactacagatggcgcttgccttttgcttctgctgaccaagatcttgaaattgaattgggccatctaaagcacttctcatttcacgagcttcagagtgcaactgacaatttcaactcaaagaacatattaggtcaaggtggctttggtgttgtttataaaggctgtctgagaaatggagctttggtggctgtaaagagactaaaagatcctgatattactggtgaagttcaatttcagacagaagtggagttgattggtctagctgtgcacaggaaccttttgcggttatatggattctgcatgacctcaaaagaaaggttgcttgtatatccatatatgccaaatggcagtgttgctgatcgcttgagagattaccatcatggaaaaccatctcttgattggagcaagcgtatgcggattgctgttggggcagccaggggactgctgtatcttcacgaacaatgcaatcctaaaatcattcacagggatgttaaagcagctaacattttgcttgatgaaagttttgaagcaattgttggggattttggattggcaaaacttcttgaccgacaagaatcacatgttactactgcagttaggggcactattggacatattgctccagagtatttatcaacaggacagtcttcagaaaagaccgatgtttatgggtttggtattctcttgttggaactgatcactgggcctaaaaccttgagcaatgggcacgcgcaatctcagaagggaatgattctagattgggttagagaagtcaaggaagaaaataaactggataaactggttgacagggatctgaaatattcatttgatttcgccgagttggagtgttctgttgacgtaattctgcaatgcactcagaccaatcccattttgcgtcccaagatgtcggaagtccttaatgcccttgaagctaatgtcaccctgccagagaacggcatcgacttgaatagagaagtgcctccctatggaggatcttgcagtttctcagtaaggcatgaggatcctcatgattcatcatccttcataatagagccaattgagctatctggtcccagatga

SEQ ID NO: 53027 - DNA, 2178 bp, Oryza sativa
  Clone ID: PAT_MRT4530_55267C.1
atggcgagcggcggcggcatgcggtcaccggcgacggcaaccggcggtgcggtaggtggcagcgggcggcgcgaaaagcggcggcggcggccgaaggcgacggcgcatggccgaagcggtggctcggcccggctcggcgctaggagggagaggaaggggaaaagaggggaggagtgcctcaccgtgagttggctggtgtgggggaaaacgacagcgaacgacgacggtatgagtggcgctcaaaatcagcgataccaacaaggtaagaataatcgcgtgcccaatgatccttatgctaaggttggtttgcaagaaggggagtgttgtggttttttgactacaaaggtttcaggatccaaccatatggccatcaagaaatgttcctcaccggatcttatgatagataaagataagttcaatacgctccatgacaagctgaaaccgaggacggtttccaatcaagaaggggaggatgatgaggacacaactagctcggatataaccatgactacctagccgctgattcttatggagtctactttcatatgattttggtcccacatcaaaattcctaccgagctgccgtgaatcggaaagagcccatgacaggaccctttgcataactccctctaaccaagcacaccacacctcaggtttcacccccactcctcgcaaggcagcgggcagtcccctctcgtgcctaggtgaatccggaagccgcatagaccgtcgcagggcccatccaaactccatcacgcccacccttgcctggaaaagacggttgctgacgttagcaaaggggagaggcagcgccggcaagcgggccccaccggtcagcgacacaagggcgccggtccaccgtggaccgggaccaccgaggcggtccaccgccggtccacgggaaccgacggcccggatcggcgcggctggggcacggcacggctcaggccggcccagccgagcgatggcgcgcggcagcgcggccatcggcgacgacggccggcgacggcgcggggaggagaggagggatgctcaccaagggcggcgacggcgagactacaacggggaagccggcggcgggctcctcggggaggcaacggtggtccggcggcgtaccacgggcgcgagcggcgtacggtgaccgggacgaccgggggggtggagagggcgatttcagtggttcccggagacgacgaagcagtggccggggtgcggctcggggttggctatcggagggaggaaacggcgccggtcccggcatcaaccggggaaggcgggggcgacacagatggagacggcaaacacggcggcgatctcgggttggtggtgaagttggtgctcgggcagcgagaggcaacaaccgagcgcggggccgagcttgactttgaggcggcgaaggtactggcagtggtggcgcactggggcgacggctaggcggcggcggcggcgcggctgtagtcggtgaaaggggcggcggcctcgggtgtgcggtgggagtggtgctcgaggggtggagagggggaaataagaggcggccggacttccccttgcagtggcgaagctggcggtggcggcggctcggcgtggcgacggctgtggcggcgggaaacggcgaccggaattcgccggagtgtggcagcgcgtgggtgcggcgtggggagagcgagggagagtatgccgggctcgggaaaaatggggaaatggacgaggggagcacggggatgctttttataggctagggaaggcgggatcgagcccgggagaggcggcaaccggcgacggagtggggcggcatcgtggcgggtgtggcggctcggcgtggcgtcgattcccgcggggagagagggggagtggggcgggatgtggtcgcgaggtggaaggggactcgggtccacgccggttgggacgaggggaggcgtgggatcggcggagggagtgggcggcgtggccaacggttggagctggccggaggttggggatgacaggttgttggggaagaagatgacaggtgggtccttgggtcccacctgtcggggagagagaggggaaaacgggcgagggaggtaaagcagacttgagggagagagagagccgagcgggccgagggagaagaaggaagacttgggccgaaaatggcccaaagagaggaagggggattttaattgttttctttttatt

SEQ ID NO: 53028 - DNA, 480 bp, Oryza sativa
  Clone ID: PAT_MRT4530_55268C.1
atggcagcctggatcgaggcaaagacagtggtgatggctctactggctttccagacaggcggcgataggggcggcagtggtatctctgcagatggagccctacgtatagggcgaccggcgagcagaaggtcgtggatgcggcgcttatattggttaggcttggccgagcgcggtggcaccctggtggcagcggtgatgggaagggcgaaaggaggaagatggcagaccgcgaaggcttttatagccgcagcaagtagatgcaggagctgcaatggcttcgggacgaagggaggaggcatggtggcaaaagggaatagggacagtagcagtgtgcccgctggggtgggtggcaatagtgagacgggtgggagcaggcgcagcgcggtggttaggagcagcggcggattcaagccggcggtcgtccctgtgctcctggtggcggcgcccctcccccacagggaagaggataggggtgtctag

SEQ ID NO: 53029 - DNA, 3540 bp, Oryza sativa
  Clone ID: PAT_MRT4530_55269C.1
tcaccacccgcacacgtgaacgactaccgacaccggtacacgggtaccggggtcgacgaccgcacaacggatacggggcgacaccgaaaggacgaggacggggcagcgagaggagagatccttaccaccacgcgacgaggcgagggaacgacaacgacgaacgggcgcggcggagacggacggcgagggaacgacttcggcggcgatcctaggacgaaggcgagacacggccggcacgaggcttgacgacgcggagccgaggacgaagacgaggacggggcgggaacgacgagaggacgacgacgacgacgacgaccgggaccggcgaggaggcgacgaggacagccggcagcggctgcacggggacgaggacggcgtggaacacgccgcagcgatgacgatgacggaggcggcgccgcgagacgacgagccgggcgaccgacgggacgtcgatcggcgaggacgaacggtgacgtggaaacgatgatggcaggcagcagcggctgagcggaggaggggacggagtggaacgcgctgctgcgatgttggagaaggtggtggtgcagcggggcgacgagccgacgaggaggaatgggtggttggcgcggcggcggcgttccggcgaacttcgggcgaggaggaggtgatgccggggatgagggtggcgtcgcggagccgagggaggtggtggcgacgtcggccggcgcacgggaaacgcgacagtggcggccggaggtggaacagtggcggcaacgccactgttttgccggcgaggacgcgtctccggtgcttcccccgcgaaacggagggctgaccgagggagaggaggtggctgcgaggccgagggagaagacggcgcggccggacggcgctccggcgaggagggagaggcggctggaggcggccggcgcggaggaaaaagaaggacgacggcgggaacgcgcctccggcggtcaccgcgcgaaacggagggcaggccggggtggaggaggtggcggcgacgctggaggaggcgacggcgcggccggccggtgcgcgggcgaggcggcacaggcggtcggcctggcgcgtgggccccacgcggtcaggcggcggcgtcagcgcgcaccggcaacgggcggggaggccgccgtcggcttgggccgggcgcggcacggaggagaggagggggaggcggccttctggctgaaagacatatacttcttcctcaagatcaccattaaggaatgccgacttgacgtcaaggtgatgcacctgccaccttcgatcagctgcaactgcaagtatagctcgcaccgtgtccaaccttgcaaccggcgcatacacttcatcaaaatccacaccttgccgctggacgtaccccttcgccaccagccgcgccttgtgtttgatcacctcaccggcagtgtttttctttagcttgaacacccacttgagccctattgccttgcgaccggctggcagcatgcacagcgaccacgtcctgttcttctcaatagcctccagttccttgttcattgcgttcacccacgccgtctcgccggctgcttcacggtaggatgtcggctcctccatctctgcgagcagcgcttctgcgtcatcatcatcctccaccaggtccacccgaggtgcttcaagcatgatctccaccaagcttctataccgcaccggcccgtcgtcactgccgggcgtgcgcggtgacgcctgcacctcggcagagtgcgttgaggatgagccgagtgtaggcgtgctaggcaaggttggtgagaacctcgccgggcttgccggaggcgttccccgctgttctgccacttctggctccttgccggctcgccttcctgccggcggcgctcggtaccacggtaccgaggctgcctgctctgcgccgacgggttcttctacctcgaactcagtggaagtcacctctcctgcagcagcactccactgccaaggtgtgttttcatcaaaaacaacgtcacgacttacaatgatttgccgacgacgcggatcaaacagccgatgggccttgctcccttcttcaacgcccaggtacacgaatggattgctccggtcatccagcttcatcaagtgcggtgcagtcaccttcgtgtgcgccgtacacccgaacacccacaggtggcccaggtgaggtttcttccccatccatgcctcgaacgaagtgcgatttcccatcgccttggtcggcagccgatttaggaggaatacggcgtgacgaactgcctcgccccacatcctgccgggcacggacatccccttgaggagagaccgcgccattgccatcaccgtcctattgcgatgctccacgacgccattctgctgcggtgaatacggtgccgtcaggtggcgctcgatgccggctgcatcgcagacacgcgcgaactcgccggacaagaactcgctgccgcggtctgtccggagtgtcttgattgttcgtcctgccgtgttctccgccaacggcttgaacttctcggaggccgcgagcgcttggtccttcgacttgatcacaaacacccacatccaacgagaaaaatcatcaacgatcaacataaagtatcgattaccggcgaacgtcgatggagtgatcggcccacacagatccatgtggagcagctcgagcggtgcctctgctcgatagtttgccattcctgggaacgactgccggacttgtttcgccaccagacatgcttgacacagctggtttgggtggtggactgcgggcactcctgccaccatctccttgtccaccaatagcggtgacgccagctgcagctcgatgcggtacagccgatttgaggttcgccgcaccttcatcaccaatcgccaaggatttttgtcgaacacctcgaggtcatctccatccatcacgacacggtggccagtttcagttagctgccccaaactcaccatgttgcagcagaggctggggatgtagtagacgtcgtcgagcaaccactggtcaccgttcttgcatgagaaaaggatggatccctgccccattatctgcactgacgaggcgtcgccgaacctgacctgccctgtcacagtctcgtccagttcccggaatttccgacgatctcctgacatatgattgctggcaccattgtccaggtaccacagatcaccagcagctgctcccttctctgccagcatcaggcgaggccacacacgctcctcgtgcacgaccagcccgcagagcgcgtcctggcacggcgcgttctgcaccgcctctgtcacagcgagcaacaaagctgggccagcatcctcagtttgcgcaagatgagcttcagccttcttcttcttggggtgtggacactgcgtggagtagtggccaaactcctcacagttgaaacattttatgtggctcttgtcgcggccacagagggcttgttcctctgtggcgacgaggtttctcccccgcctttcttgaagcgcgcctcccactcggcgagagatgtggcgagctgcaggagtagacgaccgcgtcaggcgtgcgttgtgggcgtgagttttgcacggcat

SEQ ID NO: 53030 - DNA, 515 bp, Oryza sativa
  unsure (1)..(515): unsure at all n locations
  Clone ID: PAT_MRT4530_5526C.1
cctcagcttcatcggcgcggctcttccggccatgatcgacgacgacttctccccctccgcctccggcgacatgcatgatcgatcgacggcgaccgtcggttacttgctaatcncacacttgattattcctctcccattcttctctcattttctagtctatgtgtgattagactatttttctttcttaattaccaactttagaggatttgcttgcgttggaatttttgtaaataacttgctaggattagtctcaaagaggaggagatgatacgcaacacaagagagatgtttgattgcactggtaacaagaaccagattagttcagcctgagctcaacttaatatttcttgattttttttctctctctgttttttttgagtgatgagctcatgattgatccaataatgtccaaggatatgagaacanccaaccatgtgaagaagtaggagaagaaaaggttaaaatgattgggganaaataaagagaaacgatttaatttctaaaaaaaaaaaaaa

SEQ ID NO: 53031 - DNA, 846 bp, Oryza sativa
  Clone ID: PAT_MRT4530_55270C.1
gtgacgtcaccgacagcggcggcggctcggcggaggagacggctcgaacggcgcacacttgccggcgaacggcggcaccaggacgcaaacggagggcaccaagacgtagaggacaacacggcgaactcaccggtgacctaaacggcggcggaagaccaacagacggcgacggcgacgaggaggaagcggcgggaaccttcgggtcgacgacggcgaagctgctccggtgatctccggcgacggcgaagggtcggacgaggacggcgacgacttggcgagcacgacggtggtcttcccgagcgacggcgacggctgaaacgacggcggcgcacggctggagcggcggcggcgacggcgaagctagggcacacggcgctagagcgattccgacgactagaggcgaaggcaagggtggcgacgggtagaggagacaccgggggtccttttaaaggggctcggaggcggcggcgaaggcccacggcgacggcaacggcgaaggaaagctcgggaagaacaaatccgagacgaactcgaatccaactctttccaaaacgatttagccaaagattccaaaggagaaaaggtagaggagatcccgaggatcatttcccctctttcaattcggccggagaaggaaaggaacggccggatttggaaaggaaacggcggcggcgcgaaactagggtttcggcggcggcggccgaaggtagacgacgactgacaggtgggccccacctgtcagcgagcgagggcgcgcgcgcgggcggcggactgggccggcttgggccgaggagagagaagagaggttttgggccgactttcggcccaaagccaaaagaagacttt

SEQ ID NO: 53032 - DNA, 7708 bp, Oryza sativa
  Clone ID: PAT_MRT4530_55271C.1
agtcgttttgggacgcgacactgcttcagaaagatgtgaagtacaagtggtcggaagaatgtgagcagagtttccaagagttgaagaatcacttaatattagctcctattttgattttgcctgatccaaagaagggtttccaagtgtattgcgatgcatccaaacttgggttaggttgtgttctgatgcaagatgggaaggtggttgcctatgcatctcgtcagttacgtccgcatgagaagaactaccctactcatgatcttgagttagctgcagtaattcatgcgttgaaaatttggcgtcattatcttttcggtactcgtacagaggtgtataccgatcacaagagtttaaagtatatctttactcagccggatctgaacatgagacaaaggagatggttggaattaattaaggattatgacatgggaattcattatcacccgggaaaggctaatgttgtagcagacgctcttagcaggaaaggttattgcaatgctacagaaggacgacagttgccattggaattatgcaaggaatttgaaagattaaatttgggaattgtcagtagaggtttcgttgccgccttagaagcgaagcccactctaattgatcaagttagagaagcccaaattaatgatcctgatattcaagagatcaagaagaatatgagaagaggaaaagctatcggtttcttgaaggatgagcaaggaactgtatggttgggcgagagaatctgtgtccccgacaacaaagatttaaaagatgcaattctgaaaaaagctcatgataccttatactctattcaccctggtagtacaaaaatgtaccaggatctcaaggaaagattttggtgtgcaagtatgaagcgtgaaatcgcagaatacgtagcagtatgtgatgtttgtcagcgagtcaaggcagaacatcagaaacccgccggtttgttgcagcctttgaagattcctgaatggaagtgggaagaaatcggtatggattttatcactggtttacccagaacgtcatcaggccatgactctatttgggtgatagtcgatagacttacaaaagtagctcatttcattccggtaaagacaacctattccggaagtcggttagcggaattgtatatggcaaggatcgtgtgtttgcatggcgtccctaagaaaatagtgtctgatcgaggcagtcagtttacttcaaatttttggaagaaacttcaggaagagatgggttctaagctgaactttagtactgcttatcatccgcaaacagatggacaaactgaaagggtgaatcagattttggaagacatgttgagagcttgtgctttagatttcggtggaagttgggataagaatctaccctatgcagaattttcgtacaacaacagttatcaagctagtcttcagatggctccttacgaagcactgtatggtcagaagtgttgcactccgcttttgtgggatcaaacgggagaacgtcaggttttcgggacggatatcctaagggaagcagaagaaaaggtaaagatcattcaagaaagattgcgtgtagcccagtcgcgtcataagagttatgtcgacaatcgccgtagagatttgagttttgaagaaggagattatgtgtatcttcgtgtcacgcctcttcgaggggttcatcgttttcacaccaaaggaaaattggcaccgcgttttgtgggaccttataagattgtcagtagaagaggagaggtcgcttatcagttggagttacctcaatctttggcaggagtccataatgtgttccatgtgtcgcaattgaaaaagtgtttaagggtacctaccgaagaagctaatcttgaacagataggagtccaagaggatctgacatatgttgagaaaccaatccgtatcttggaaacagatgagagaagaaccaggaatagagttatccgtttttgcaaggttcaatggagtaatcacttagaggaagaatctacttgggaacgagaagatgaattaaactgtggattcgatctcgaatcggattcgtctctctccccgaaccctagactttccttcacaccgccggtcgtcgtgggcctccgccgccacccctagccgctataaaaggaccccggtgtctcctctacccgccgccaccctcgctttcgtctctcgccgccggtagagctctagcgccccgtgcgccgccgtcgctccggtcgtcgtcatcgctcgggaaagccgccgtcgtgatcatcaagtcgtcgccgacctcgtccgccccttcgtcgtcgctgtagatcgccgaagccccgccgtcgtcgtcaagccgaaggtcgccgccgcttcttcctcatcgtcgtcgccatccgatgaccttctgccgttgttttggtcaccgaggtgtccttcatttgcgtcgccacgccgtcgttcaccggcgagcacgcgaggccgagccgccgttggtgatgacgtcatcgctgacgtcatcgacgccgtccgtcattccgacgttccgggagagtccgaatttgcaggagaagactttgaagagttccaaggccagcaaggcaactcctggtttggaatggtatattcctggtttggagatagaactttacagccgagattggttgttcagaatggttgggcctatgcaacacgatgccacgcttcaagcctgagtacttgttcggtactgagggatttgtcctggagttgcgtacgatgtctttcctcataggattcgggactgcccctttgtatgcccagattcctcatgatcgtgatgaagagaagtgtcgggtcaaggtcaccttgaacagtaatcgtgaagatatcccatcagtgatgttcgaggctggagggggaaactgtattcatgcttgtcaggaggtggcaaggattaccataggagagctccgcgaacgctacaatgatcagttggccgacaccgagtatcgctaccatccttgtcaaccccagggaagtggtcgtggcagctaccttgaacttgcaggaattgagaatgatgctaccacaaggcatttggttgagatgctgtgggccatggatgagacccgcgctgagattgtgttagcagcccaagatcacgaagaccggaatcgtggtaagatttgcaagctggaggacaaggtggatcgtttggagaaggaattagccgcattgaagggagaagcaccaccgcagaaggccagggttcgtcttaccgcaaggaagagagctctttttgtccctcgctaccagttggcacctaagatggtgcttactcgcagcaatgggaatggtcccaacaacaacaacaacaacaacaacaacaacaatggagagaatcccacgcttgcccaagtcctggctcaacaggcacagctcatgaatatgatgatgcaccaactacagaaccagcagaaccagggaaacaatcatgcacctccccagaacaagttagcataatttcttcgtgtgaggccgcctactttttctagcactaccaatccagtcgaggctggtgattggctgcatgccatagaaaagaagttggacctgcttcagtgcacagatcaggaaaaagtctccttcgcttcgcatcagcttcatggccctgcctctgagtggtgggatcatttccgtctcaacagaactactgccgaaccaatcacttggcttgagttcactgctgctttccggaaaactcacataccctcgggagtggtgtctcttaagaagaaggagtttagggcgctcactcagggatctcgctctgtcaccgaatatctgcatgaatttaatcgtctggctcgctatgctccgaaagatgtgtgcactgatgatgggcgtcaagagaagttcctggaaggactgaatgatgagttttcttacccattaatgactggggattatcatgatttccagaagttggtggataaggctatacgccaggaggacaagtacaaccatatggagcagaagaaacgtaggattgctcacttcaaagctctacaggggaatagtcagaggccgcgtcttgctatgggacctcaggcagtgttgcagggagggtcttcgtctgttgttcgtccgcaacgtcagttcttcaacaacaatgctggcaacaacaaccgcaaccaagctccacgtcccgttgcaactccagtccagcatcagcctgccaagagggagcaaggcagcaagcctggggtgtgcttcaactgtggtgaacaaggacattactccgataagtgtccgaagccccgccgcgtgaaggttgtccctgcctagagcaactccaccgcaccagcgacaaaggctcgtgtcaaccatgttgctgctgtagaagcccaaggtgctctagatgtgattttgggtacgttccctgttaactcaattcctgcaacagtacttttcgattctggtgctacgcattcttttttgtctatgagttttgcgggaaatcatgggatgcaggtagaagatcttagacgtcctttgatggttagtactccgagtaagcaagcactcacatcacaacgtagcccctctgtcagaatagagattcaaggagtaccatttctagccaaccttattctgttagaatccaaagatcttgatgtcatcctagggatggactggttagccagatataaaggtgtgatagactgcgccaatagaaaagtaactctcaccagcaatgatggtcaagttgtaactgttcatgcattgccttctgagcctttatggtcaagtctgaaccaaataactttggaagagattcccatagtacgggagtacccggacgtgttcctggatgatttacctggtatgccgcctaaaagagatatagaattcagaatagatctggtaccaggaacaaccaatccataagagaccttatagaatggcagccaatgaattagcagaggacaagaggcaagtagatgatttgcttcagaaaggatacatcagaccaagttcgtctccatggagagctccagtcatctttgtggaaaagaaagatcatacccagaggatgtgtgtggactatcgtgcactaaatgatgtgactatcaagaataagtacccattgcccagaattgatgatttgtttgatcagcttaaaggtgccaccgttttctccaagatcgatcttcgatcaggttatcaccagttgaggatcaaagaggaacatatacctaagacggtttttaccactcggtatgggttgtttgaatgtacagttatgtcttttggacttaccaatgccctcgctttcttcatgaacttgatgaataaggtgtttatagaatacctagacaagttcgtggtagtctttattaatgacattcttatctactcccgaaccaaagaagagcatgaagaatatcttcgccatgcactagagaagctacgagaacatcaactgtatgccaagtttagcaagtgtgaattttggttgtctgaaataaaattccttggtcacatcatctcagccggaggagttgccgttgatcctagtaatgtggaatccgtaacgaactggaaacaaccgaagacagtttcagagattcgtagtttcatgggtctcgcaggttattactggaggtttatagagaatttctccaagattgctaagcccatgacacgactgcttcagaaaaatgtgaagtacaagaggtcagaagaatgtgagcagagctttcaagagttgaaaagtcgcttaatatcagcacccattttgattttgcctgatccaaagaagggtttccaagtgtactgcgacgcatctaagcttgggttaggttgtgttctgatgcaagatgggaaggtggttgcctatgcaggttgcctatgcatctcgtcagttacgtccgcatgagaagaactaccctactcttgatcttgagttagccgcagtggttcatgcgttgaagatttggcgtcactatctctttggtactcgtacggaggtgtacacggatcacaagagtttgaagtatatctttacccagccggatctaaacatgaggcagcggagatggttggaattgattaaggattatgacatgggaattcattaccaccccggaaaggccaatgttgtagcagatgctctcagcaggaaaggttattgcaatgctacggaaggacgacagttgccgttggagttatgcaaggaatttgaaaggctgaatttgggaattgtcagtagaggtttcgttgcagctttagaagcaacgcctactctcattgatcaagttagagaagctcaagtcaatgatcctgatattcaagagatcaagaagaatataagaagaggaaaagctatcagtttcttggaagatgagcaaggaactgtatggttgggcgagagaatctatgtcccagagaacaaggagttgaaagatgtaattctgaaagaagctcatgacactttatactctattcaccctggtagtaccaagatgtaccaagatctcaaggagaaattttggtgggcaagtatgaagcatgagatagcagagtatgtagctgtgtgtgatgtttgtcagcgagtcaaggcagaacatcagaaacctacaggtctgctgcaacctttaaaattaccagaatggaagtgggaggaaataggaatggatttcatcactggtctacccagaacgtcatcgggccatgactctattttagtgatagtcgacaggcttaccaaagtggctcatttcatcccagtgtggacaacatattccggaagccgtttggcggaattgtatatggcaaggattgtgtgtttgcatggcgttcctaagaaaatagtatccgatcgaggtaaccagtttacttcaaagttttggaagaagcttcaggaagagatgggttccaagctgaacttcagtaccgcttatcatccgcagacagacggacaaaccgaaagggtaaatcagattttggaagacatgttgagagcttatgctttagacttcggtggaagttgggataagaatctgccttacgcagaattctcgtacaacaacagttatcaagccagtcttcaaatggctccttatgaagcgttgtatggtcggaagtgccgcactccgctattctgggatcagacgggtgaacgtcaggttttcaggactgatattctgagggaagtagaagagaaagtaaagatcattcaaaaaagattgcgtatagctcagtctcgtcataagagctatgctgataatcgccgtagggatctgagttttgaggaaggagatcatgtgtaccttcgtgtcacgcctcttcgaggggttcatcgttttcacaccaaaggaaaattggcaccgtgttttgcgggaccttacatgattgtcagtagaagaggagaggttgcttatcagttggagttacctcaatcattggcaggtgtttataatgtgttccatgtgtcacaattgaaaaagtgtttaagggtacccactgaagaagctaatcttgagcaaatagaaatccaaaaggatctgacatatgttgagaaaccaatccgtatcctggagacagatgagataaggaccaagaatcgggttattcgtttctgcaaggtccaatggagtaatcacacagaggaagaagctacctgggagcgagaagatgaattaaagtcagctcatccgcatcttttcgacagttcttccgaatctcgaggacgagattctgtt

SEQ ID NO: 53033 - DNA, 4315 bp, Oryza sativa
  Clone ID: PAT_MRT4530_55272C.1
atgacagcaagaacttgtgcagctggggaaatgaacaatgttgtcacggcggttgtcatggaaaacaaccagagaagagcttctatctccgagctggcctacaaccgacgcggcagcggaaaggctcctcacgatggtggaggagatagagcggtggtggaggaggcggaacagcggcgaacggactcctcgcagcgagccgtaatggctacatcttcaaataattcagattttgtccatgttgagggaaagggtgtgcggtgctcaccaaggttgaataagttcaagcaatctgatattggactgttgaagaagacatgttcatcactgccgaagaagtcatgtgcatcgaccagtggaaacaagaaaaggaagagagcggaaaatggaaaagagggttgcagtttccccaaggacatgacattgtggcttttgaaccatgtcaatactgagcttggtaccttggagttcgatggattatcaatccccataagaccactcattaagaaggtgattggaattcctgaaggacatatgcgtttgaagttgacagaagatactgaccataggttgaaggagaagttcatagaaggtggcagaggccaatctttaaataaagccatttctcggatgttactggaacataatgaggatgaatttattgtgtccttcatgatggttgctttgggtgtctatcttgtcccaggtagcaacttgacagttcatagggaatatctaacagctattagtgatgtgaagaacatcaagaacctgaattgttgcaaccatgttgctgattatcttttcgaggccatccatgatttcagaataaacacaagcataaatctaaatgtccgaggttgtgttcatatacttaatgttatcttcctggattttgttgcaggtatcaatgttccacaaggcacaccgcgcatagcgcatataaccactgcccatatagatgaagtaaaaactattgctaccagcagatccaagcatgctgactatgattctatccagataaaagatatagaatccactgtttatcgcgatggagaatctccactgcacgaatctccacagcacatgctctccattggatatagacaggatgtggaggaaggagtacatgatgatgctacttgcgttgatgaaggacaacacacacctgatccccagggacatatcgctgctggtgttgacgaagaacatatgaacataggacaacatacgccagacccccagggagctcctgctgctgctggtgacgaagaacaaatgaatatgcaagatggccaagttggtcaagacccaaaatcaacagggtgtgatgcaaatccaaataatgcatgtgatgagccacctgtaatcagcgagttgttaatgaagatgaaagagaaactcaaaattaggcgcactgaaatcatctccacatgcatggaacagcttgaatttatattggacaaatcagacaacgacatactttctgagtttagcacaaaattaaagaagttggcaagggtgaaaggcatggcaagtacttctgaagcatacagagctgaaactagaagcaattacaaggctgaggaaattgggcggcacagtggcaatgtagatgcaactgattttgcagaagtcattgcaattggggctgttgctgctcatgaggtatctcaatttgatgttcagaatgtgagggataacaatatggatggcaaagttcacccaccggctgctcataaaggtgctatggatgagggggctcaaacagaggaagacgatggcaaacaagatgaagacgatgaagacaaaggtgatgaaaaagtggaggacagtgttgatgatgagtatggtgaagatggtgcgggtggaagtcacagtgcgggttcccaaggtggtgctgatgagaacaatgacactgacgacagcagcggtgattcaaaacaaggacaacaaccaattccaagcgaagagcaatacccaggagcttccatgatggattctgtgacggatgatacctcacttggcacaccagtctatcatgatgttgttgtaattgaggattcatcacaggagtctctacgcgccaacactatggtccctgaactgactgaaccaattgcaagcggtgagcgattcccagatggtggttctgtgcctccaataaacaagcagagagctaaaaggtgcaagacaaaccatcaaagtgtagaagccatagcaacacttaggaaagggattcatttggatcattttgtcaacgatacctatgagaagcatgttgtagacaattttgatggtgatggtggtgcaactaaggtcaatagagcttggatcacagaacaagatttccgctccacacttaggagaaaaggtgaagtcagcaacaatttcatgtggctgtgttgctctgcaataatgaaagattgggattcaaaatcaaaagtaattttggaccttgccacagtggatcagctggtatcacccctggaaaaatgttgtgatgccaaggttaggcgcacattttcaaagattgatttgaaactaattgagcggttgtatttaccagtcctaaaggaacatcactggttccttatcgccatcaacttgcgcagccgcattgtgcagatatacgactcaatccggaatcaaaacaacctccaagttgctcttgacacgggaacgaatagtagcccatttggatttggtgacttatccacagtcgagtaccctgaaaccccttaccaagtagaactatatgccaccctgatacagtgtctgatgcctatcagtgtttggcagcaacccaggtaccaggcctgtaaccccaagtaccaggcaccagtatcagccctcacaaatactggtaccagtgtctggtgcctgacagcaacccaggtaccaggtaccaagtctgttacctggcagtacatggtactaggtaccagacatccaggtatcaggtctaaacccaggtaccaggactggtacctggcagtccctactgggtaccggacctggtacctcacataaaacctaggtatcagacctaaacctaggcaccagacatggtacctcccagtatagggggtatcagccctcacaaatattggtaccagtgtctggtgccttgcagcaacccaggtaccaggcatggtacctaggcaccagacatggtacctcccagtatagggggtatcagccctcacaaatattggtaccagtgtctggtgcctagtagcaacccaagtaccaggcctggtacctggcagtaaccccaggtaccaggtatcaggtctaaacccaggtaccaggcctggtacctggcagtcccaggcctggtacctagcagtaaccccaggtaccaggtaccaagtatgtactcctggtactaggtaccagacctggtcccaggcctggtacctggcaggttttgcagcttgttcttccattgggtagccggaccacatatcggggtctgtttggacagtgaggtagcgctgttggtcatccctgtcgagacaagattgggcaagtttctcatactggacgatgaagtttctgattgaatccaccgggtgaacaaaatctttgaacaaattgttcatgctctcacttctttgagagctgcacatgaaggggaagaagcaatccatgaaaaaacatgtggcccacttcttcctgttctcatataggtgctgcatgtatttgttcccctcgcctgcgccattaatggcagccgggtctcccgtgcccatttccccctcctccggccgccctctctcactcccaaccctatataaaccctccccgagctccccaccactgtttccgccactcgccgccttctctccccgccggaatcgagctcgcgccgtcactatctctctccaccgtcgccgccgagctccggtccgccgccgttgtcgccccggaccacctcccacctcggcgccgcctccttcggcttcgccgcatcctcgccgacctcgtccacctctccgtttcggtcgccgaccgccggagcaccgtcgaccccatccaccctagcttcgccgccgccttcctctgctccggtcgccgttttcgtcatcgccgtcgacccggggtgagccgtggaccgccgcttcgtttccccctttccctcccctttctcgggcgccgctccgccgtgcctatggccaccgccggcgaccataggggcgcgggcgtgccgcctcccgccggccgcaccggcgtggccgccttcgggcgcgcagagtggccgccgcgtgggggccggctgtcagccgcccgcgccctcgggtgcggctga

SEQ ID NO: 53034 - DNA, 373 bp, Oryza sativa
  Clone ID: PAT_MRT4530_55273C.1
acgttagatccacccacctgcaaaaatattttcagcgaacaaaaaaaatccgccgccaccacccctacctgccggcgctggcgccggcgctagcctccccatctggcccttccccctccgaccgatggctctcctcctccgtccgccgctgctgccggctggctcgcctcttccgtccagatctaggaggggatggggcgacgctctctgcggtggccgccgccgtcggctcctcccccgccactgtcgcctccaccgctggaggagtcattgtcatcgtcgtagctggcggcgagaccaaggtgtccgcgtcgtcgtcgtcgtcgcagccagtggtgaacctccttggagccgccgacgctcctcagccgat

SEQ ID NO: 53035 - DNA, 331 bp, Oryza sativa
  Clone ID: PAT_MRT4530_55274C.1
ctcaagtgcatgagctagctcaaacaatcgatcgatggcgatgaaggcggtgatcaagggcggcgatggctgatgcgggtgcatggtggtggtggcccacgtgctagcggtggcggcgacgcgccatggtgttggcgtggtgcgttcacttccgaggcggactcgctctgcgctcccacaacacgcagctcatcttcaacacctacccggtgctcatgttgcttggcctcgtagctctctgagccgagggcatcctgtcctatcgctccctgtccatcatcgtgctgtgcagcgaccccagaaagaaggtgcacatgcggctgcacgccgt

SEQ ID NO: 53036 - DNA, 1360 bp, Oryza sativa
  Clone ID: PAT_MRT4530_55275C.1
taaaaagaaaaaccctaaaaagtccttttccccccccttcccctcttgggccggctcggcccacctccctccctctctctcctctcccccgcggcccaatcagcctcctccccgcgcgcgtgccgctgacgggcgggcccgcccgccaccctcactgacgggtggggccgccgtcatcccctacctcgcgccgctcccgccgcctcgctcgtgccctagcgccgccgccgccgcgaatcccgccgcctcccgccgtccccgcgcgcaataaagagggggaaatcattccccgtgattccctccctctttccccccacttttctctctctctctccctcggatttgttcggaaacgtttccccctaaacctcgccggcgcatcaatggcggccggatcttccgcggccgattccccctcatccggcctctctctccccctcccgaccctatataaacgctccccgtgcctccctccaccgtttccgccactcgccgctctctctccccgtcggaatcgagctcgcgccgtcgcccctctctctccgccgtcgccgccgagctccggtccgccgccgtcgtcgccccggaccttctcccgcttcggcgtcgccttcttcgggttcgccgcaacctcgccgacctcgtccacctctccgtttcggtcgccgaccgccggaacgccgccgtcctcgtctacccgagccgcgccgctgccttcctccgctccggtcgccgtttccgccgtcgccgtcgaaccggggtgagccgtggaccgcccatttagtttccccctcccctcccctctctcggccgccgctccgccgtgcctatggcccgccgccggcgaccataggggcgcgggcgcgccgcctcccgtcggctgtgccggcgaggccgccttcgggcgcgccccgcggctgccatgtggggcccggccgtcagccgcccgagccctcgggtgcggctgacgcgtgggacccacggcgccggccggtgtgagccgcgtgcacccggtccaccgtggacccacctcggccatataaggaccggtcttcgggcctctgttgcaaagcactaccgtacttccacatgtctaatgggacaaatgaaggctacacgagctgcggcccggtagtcgagatgtcatggcacagggccggtgtcctgctgctaggggctcagtcctgcctgcctgtcccgggggttccggccgtaggtgggattgggtcgatgtacacctctgatcagagtataatctattcgaatagcccgcgccctcggttatgggcaagccgagcaatgtacccaagttagtgggagcatagatgcagcccctctttggctcacacactatctcata

SEQ ID NO: 53037 - DNA, 870 bp, Oryza sativa
  Clone ID: PAT_MRT4530_55276C.1
gactccccaacacaaataccaccaccacctcccacacccacaccaagcgcagagctccagagagagagaagggatccatcgacgcgcgagcgctttgcttagattccttcgtcgccggcgaatccgtccccttcgcgccgcccgcaatggcgaatgcagcatctgggatggctgtggacgatgagtgcaagctcaagttcctggagctgaaggcaaagaggacctaccgcttcatcatttacaagatagacgagaagaagaagatggttgtcgtggagaaggttggcgagcccgtactgaactacgacgattttgccgctagcctccctgccaacgaatgcagatacgccatattcgactacgatttcgtgaccgaggagaactgccagaagagcaagatattcttcattgcatggtctcctgatacatcgcgcgtgagaagcaagatgatctacgcgagctccaaggacaggttcaagagggagctcgacggcattcaggtggagctccaggcgaccgatccaactgaggttggcctcgacgtgatcagaggccgtgcaaactgagcattgttttgatgctgctacctataaaagtatgagcttcagatgagaatttagagagctcccctgaggcaatgggttatgactttgttatcatcttagtactactcctatctaagggacggtgtaaggctgtaatctatgtgcggtgcaatgataaggctatcctttctgcgtttgatcatgaaaaaaaaaaaaaaaaaaattctttctaaatggcgacaatgatgcaattcttctgtaagattcacctataccgaaaaatctctagtatcaaaatttaacaaaaagcgtcgttttcagattc

SEQ ID NO: 53038 - DNA, 459 bp, Oryza sativa
  Clone ID: PAT_MRT4530_55277C.1
atgccgcactgccccgattcactgaccctccgacgaggcgacgagccgacgaccgagcaccccggagctacctcaccgacgggcgcagccaaccacctccaccatcagcactgggcgccggcgccgcagagccgccccggctcctcgcccgacgccgccaccaccaagcatgccggtggcattcgtcagccgccagcctcaccgtcggccagccgcgtcgtcacccgcatctcccgcgccacctgccgccgccacacgcgccagacgtcgccgtcacgcgccgcaccgccgctcggccttcccagcgcgccgtgtcacctcctcgtgccggagacaggctgtcgccggggttgtggccccgccgctgccatcccggcgggccgcgcagtttccggcggcgcgctccggcggcggcgaggcgggggagaggaggagagggtggcggcggccgagtgttag

SEQ ID NO: 53039 - DNA, 336 bp, Oryza sativa
  Clone ID: PAT_MRT4530_55278C.1
acggcctccatcagcctgctgccgagctccagtcatccaagtacgaaggggataaagggactcatcactccacccagctggagagaaaaaaaactctcagctaggcaagatcgttccagattgaattcgttcggtggagggcgatatattttttttcggcaaggatcgccattctcaccggtcgttcaaattcttctcctgcgttaagtggctgtgtgtgctctgttcgtcatcttcctctgctactcaattgcattggttggttggttaagacatgaatccattgcgcgtcatcgtgaaagaggaggagctcgacttcccccccgcgcgcgcgcg

SEQ ID NO: 53040 - DNA, 611 bp, Oryza sativa
  Clone ID: PAT_MRT4530_55279C.1
aattcatctattccctacagcacaatatttttttacttcatgcaactagtgaatagcaaatttacaactagtacaacaattagcaaattcaataatttatacaataaggagaggcctacttctattgctgctaggtaaggtgactactgcctagcaaaatcgttcgattagaccatgcacatacaacaatatgtcaaagaatatgaacttcagctattcacacatcaatgctctacattcttcagaaatttcttccaccaccaaatgttggaggaggatgagctgcgccataagctgaatattcctgtggtgcacactgaggcacagaatgaatattcgtatgcccctgaatctgacttgttgaaacaccagcagaaggaaacccctggtagaagaaaggtctaccgatagatgagtttgttgccatatcttctgttgcaaaatattgattttgatttggtggatcaactaaaactgtgtcagctgtctgagatgaaactgcttgtttaacatttcttgagcttttttcttgcttggctgattttttcttccgcttttcaaccttacttccatctttctctcttccagaggcatggcattcaatctcttga

SEQ ID NO: 53041 - DNA, 2271 bp, Oryza sativa
  Clone ID: PAT_MRT4530_5527C.1
atggccagccgcccgccgcttcttctgcagtactcgtcgctgctgctgctctgccttgccgtctcggcgccgccggccgcagccggcaacgtgccggcgccggtggcggccgtctcgaagccgggctgcccgaccaagtgcggcgccgtggacatcccgttcccgttcggcatcggcgagcactgcgggctcgaggcgccttacacaaactacccgttcaagttcgactgcaagcccgttgacggcaccagcaagcctttcttcaggggtatggaggtgaccaagatctccatggaagacggcaaggcctggatgaagatgaacatatccaagaactgctacaaccagtcgacgggcaccagggaggacaacaccaacacaacatctgtgagcttcagccgctcgcctttctggatatcggacagggataacaagatcatcgtcatcgggtgcgaaacgttttcgtatatgcagatcaataatgtatccaaaacaacacttacttgtgaattggaggttttaacaggttgtgtgccctcatgcagaaacgaccccaaggacggtatatgttccggtgaagcgggttgctgcaaacttgatttccccaatggcacatggtactatagtacttatttcagtaaaagaaataataacagcagtccttgcagcttcataacagtgatggaaaccacaaccttcaacttcaacaaaaattatttcaactccactacattctatgacacatacaatgggttagctaaggtttccctagattggatcataacaatggattcatgtgatcgagtcaaaagaaacactacttcatatgcatgcattagtggaaaaagtcgttgtgttgatgatccaaagggaggttaccgctgcaagtgctctgatggatatgaaggcaatccatacgtcaaggatggatgcaaagatattaatgagtgcctcgacaatgctacttacccttgtccgggaatatgtaagaatacgttggggaatttcacctgctcatgctaccctggaaactatatgatgaatggaatttgcattccaaatcagaagtctggttttcctaaaaatcttgtaataggagcaagtgttggggccgtattactagtgattatagtaacttatgcatgcttcatcagagagaagagaaagctacagtatgtcaaaaggcggtacttccgccaacatggtggtatgttgctattcgaagagataaaatctcaacaaggcatttcattcaaaatcttctcagaagaagaattgcaacaagcaacaaacaagtttgacaaacaacaagtccttggccaaggaggcaatgcaactgtttacaagggacttctcaagggaaacacggaaatagccgtcaaaagatgcatcacaattgatatgaaacaaaagaaagaattcggcaaggaaatgctaatcttgtcccaaaccaaccataggaacgttgtcaaattattgggttgctgcctcgaagtagaagttccgatgcttgtctatgagttcattccaaatggcacattgttctctctcatccacgggaaccacaatcaacacatctccttggatactcgcttacgtattgcacatgaatctgcagaggctcttgcctatttacactcatgggcatcaccaccgatcctccatggcgatgtcaagtcctcaaatatcctcttagacaaagattatgtagcaaaagtttctgacttcggtgcttccatcctagcaccaactgatgagtcgcagttcgtcactctcgttcaaggaacttgtggatacctcgatccagagtacatgcaaacatgccagttaacagataaaagtgatgtatatagctttggagttgttattctagaattgctcacaagaaagaaagcattcaaccttgaaagccctgaagatgagaggagcctagccatgaggtttctatcagccatgaaggaaaaaagactttctgatattttagatgatcaaatcatgacgggagataatttggagtttcttgaagagattgcagagttagcaaagcaatgcttggaaatgtctggtgagaatagaccgttgatgaaggaagttgcagacaagctcgataggttgaggaaggtaatgcaacatccatgggcacaacaaaatcctgaagagatggagagcttacttggggactcttcttacgagatcaacaactcaacggttgagaatacaggaaatttcagcatcaatagtgaacttcagtgtctagaatcaggccgttaa

SEQ ID NO: 53042 - DNA, 1990 bp, Oryza sativa
  Clone ID: PAT_MRT4530_55280C.1
cccccggcccctcctcctcctcttcttggtcgtcttctcctagctcgccaagatgaggatttccatggctctcgcggcggccgcgctgctgctgctgctgtcgctggcagcggcggacatgtcgatcgtgtcgtacggggagaggagcgaggaggaggcgcggcggctgtacgcggagtggaaggccgagcacggcaagagctacaacgccgtcggcgaggaggagcggcggtacgcggcgttcagggacaacctccggtacatcgacgagcacaacgccgccgccgacgccggggtccactccttccgcctcggcctcaaccgcttcgccgacctcaccaacgaggagtaccgggacacctacctcggcctcaggaacaagccgcggagggagaggaaggtcagcgacaggtacctcgccgccgacaacgaggcgctgccggagtccgttgactggaggaccaagggggccgtggctgagatcaaggaccagggaggttgcggaagttgctgggctttctcagcaatagcagctgtagaaggcatcaaccagattgttactggcgacctgatatctttgtctgagcaggagctagttgactgtgacacttcatataacgagggatgcaatggaggtctgatggactatgcatttgatttcatcatcaacaatggtggaatcgacaccgaggatgactacccttacaaaggcaaggacgaacggtgtgacgtaaacaggaaaaacgcaaaggttgtcacaattgacagctacgaagatgtaacaccaaacagtgagacgagtctgcagaaggcggtagcaaaccagcccgtcagtgttgcaattgaagccggtggcagagcattccagctctactcatcgggtatcttcacgggtaaatgtggaacagcactagaccacggcgtcgctgctgttgggtacggcacagagaatggcaaggactactggatcgtgaggaactcgtggggcaagagctggggtgagtccggctacgtccgtatggagcgcaacatcaaggcgagcagtggcaagtgcggcattgccgttgagccatcctaccctctgaagaagggcgagaaccccccgaaccccggccctactccgccgtccccaaccccgcctcccaccgtctgcgacaactactacacttgccccgatagcaccacctgctgctgcatctacgagtatggcaaatactgctacgcctggggctgctgcccactcgagggcgccacctgctgcgatgatcactacagctgctgccctcacgagtaccccatctgcaatgttcagcagggaacctgcctcatggctaaggacagtccactggcagtgaaggctctgaagcgtaccctggcaaagccaaacttgtctttcttgtttggcaacggcaagaagagcagcgcttgagcaatttcagaaccgtatcagaccgtccagagccagcgtggttgcatcatcaaatgatcagctggtaactgacgaagacgattgcgcagctcggcggcgaaccctgcgcactaagtatatctgcttttataatagatttctcgtgtacataaaatctaaaaaaacgggttcagttggttacagaactgccaaatttgcttctgaatgtatatgtaaaattcagctaggtttgctcctaagctcctagatgccagttcgacggaactgcaaattgatattggaacaagataaggtcattgccatattaatccatcattcatgtattccataccaaaaaaaaaaaaaaaaaaaaaaaaaatgatcatactcttgacttatgggatcttgccaatgagcaaattatacttggcttccctcagaaacacatacatactcactccgttcccagttcatgtacaagcctaccctgatagctgttatccagatctgagttgtagttctgtgattttctattccgaggacggccgccaaacaggagccaaggcgcacgtacgcgcgcat

SEQ ID NO: 53043 - DNA, 1413 bp, Oryza sativa
  Clone ID: PAT_MRT4530_55281C.1
atgaggatttccatggctctcgcggcggccgcgctgctgctgctgctgtcgctggcagcggcggacatgtcgatcgtgtcgtacggggagaggagcgaggaggaggcgcggcggctgtacgcggagtggaaggccgagcacggcaagagctacaacgccgtcggcgaggaggagcggcggtacgcggcgttcagggacaacctccggtacatcgacgagcacaacgccgccgccgacgccggggtccactccttccgcctcggcctcaaccgcttcgccgacctcaccaacgaggagtaccgggacacctacctcggcctcaggaacaagccgcggagggagaggaaggtcagcgacaggtacctcgccgccgacaacgaggcgctgccggagtccgttgactggaggaccaagggggccgtggctgagatcaaggaccagggaggttgcggaagttgctgggctttctcagcaatagcagctgtagaaggcatcaaccagattgttactggcgacctgatatctttgtctgagcaggagctagttgactgtgacacttcatataacgagggatgcaatggaggtctgatggactatgcatttgatttcatcatcaacaatggtggaatcgacaccgaggatgactacccttacaaaggcaaggacgaacggtgtgacgtaaacagggtatctttcgtcttctttgctcccttggtttttcagaaaaacgcaaaggttgtcacaattgacagctacgaagatgtaacaccaaacagtgagacgagtctgcagaaggcggtagcaaaccagcccgtcagtgttgcaattgaagccggtggcagagcattccagctctactcatcgggtatcttcacgggtaaatgtggaacagcactagaccacggcgtcgctgctgttgggtacggcacagagaatggcaaggactactggatcgtgaggaactcgtggggcaagagctggggtgagtccggctacgtccgtatggagcgcaacatcaaggcgagcagtggcaagtgcggcattgccgttgagccatcctaccctctgaagaagggcgagaaccccccgaaccccggccctactccgccgtccccaaccccgcctcccaccgtctgcgacaactactacacttgccccgatagcaccacctgctgctgcatctacgagtatggcaaatactgctacgcctggggctgctgcccactcgagggcgccacctgctgcgatgatcactacagctgctgccctcacgagtaccccatctgcaatgttcagcagggaacctgcctcatggctaaggacagtccactggcagtgaaggctctgaagcgtaccctggcaaagccaaacttgtctttcttgtttggcaacggcaagaagagcagcgcttga

SEQ ID NO: 53044 - DNA, 330 bp, Oryza sativa
  Clone ID: PAT_MRT4530_55282C.1
atggtggatgttggcaacaaagaaaacaagaacaacaggaacacggctgacaacgatgtggtcaacctgacacgaaaaacagaagaggaggaaagatgggagtcggtgctccggagaccaaacggtagtgaggaagaggatgcgccggggaagagagagagagagggagagggctactgggaggagagcgatgccaaggaggagagaggggctaccagggtggagggagggagcgcgggggagaagggtgttgggaggagagggcttttcatgaggagaggagcggtagggaggagaagcgccagagaggagtgggctgcgggatggtag

SEQ ID NO: 53045 - DNA, 306 bp, Oryza sativa
  Clone ID: PAT_MRT4530_55283C.1
atgggatcattaccgacggcagttcaagtgccgtgcaaagatagagtcgtgttcggcaaggacatatcatgtattttgggtataaatatgacccgggaccctgcaatcaggggtggcttctcgaagcaccaggagggtattggaaagaggttcaagacaaaagctcaaaaacaaggtgaggagattgagaacctaaagaaggcaataatagatactcagaaggcagcagcagatactcaaaacctcattcgagagatgatagcatttgaacagactcaggtcactcatcagaccactcctccttga

SEQ ID NO: 53046 - DNA, 1284 bp, Oryza sativa
  Clone ID: PAT_MRT4530_55284C.1
atggcgaggcgggccgcttcgtggccacggctcctcctcctctcccgcgccttcgccgccgccgccgctgagccgaagcgggtgctcgtgccggtcgcggacggcacggagccggtggaggcggccgccaccgccgacgtgctcaaccgcgccggcgcgcgggtcaccgtcgccacggctgaccccgcgggcgacgaccgtggcctcctggtggaggccgcgttcggggtcaagctcgtcgccgacggccgcgtcgccgacctggaaggcgaggcctttgacctcatcgccctacccggaggaatgccgggatcagctaacctcagagattgcaaggtgctggagaagatggtcaagaagcaggcagagcagggtggcctctacgccgccatctgcgccacgccggcggtgacgctggctcactggggcttgctcaaaggcttaaaggcgacttgctatccatcattcatggagaagttcaccgctgaaattatccctgtgaactctagggtggtggtagatagaaatgcagtgaccagccaagggccagcaacagcaattgaatatgctctcgctttggtggagcaactgtacggcaaagagaagtcggaggaggttgcaggacccttgtatgttcgtcctcaacctggggttgactatgtcatagatgagttcaattcagttgagtggaaatgcagtggtacacctcaggaaggaatccctggtcagggtttattaagtaagcataaggttcttgtgccagttgctaatggttcggaggaaatggaagctcttaatttaatagatatcttgcgtagagcaggagcaaatgttactgttgcatcagttgaggataagttgcaagttgtgacccgccgccacaaatttaacctgatagctgatattatggtggaagaagctgccaaaagggaattcgatctgattgtcatgccgggtggtctgccaggtgctcaaaagctttctagtacaaaggtacttgtagatttactaaagaaacaggcagaatctaataaaccatatggtgcaatatgcgcttctcctgcttatgttctcgagccccatggtttactgaaggggaagaaggcaacatcatttccaccaatggcacacctgcttactgatcagagtgcatgtgacagtagggtggttgttgatggtaaccttatcactagcaaagccccaggctccgcgacagagttcgcgctagccattgttgagaagctgtttggtcgagagaaagcggtgcctgtcacctgtgagtga

SEQ ID NO: 53047 - DNA, 371 bp, Oryza sativa
  unsure (1)..(371): unsure at all n locations
  Clone ID: PAT_MRT4530_55285C.1
acaagagatgccattcattttcattgcaacataaacttggtcgttgaactcacatactgggggtcaagccattagaacccaccataccaaaatatctctcaattgcaaatatctcccaatattcttccggtatgcagtgcagggcactgggcttgcgtggtaacgccattttccctcccagaagtagtccatccaccagccaatgcgatctccatttcgggcacagcttttggcgcagccctctcgttgcccgaaattctgtggccctcgcaggtgcgccaaattcccntcattggtggagtcggtcattcaaaattcggtcaatccagtggtccatcaacgtggtattccgtggtggtgcacaatgtggt

SEQ ID NO: 53048 - DNA, 2268 bp, Oryza sativa
  Clone ID: PAT_MRT4530_55286C.1
atggcgctgaaggtccagtcccgcatgtggtttgcgagaccgcaccttctatggagcaggctgatgtgctgctctttctctgatgcgcctgctgctcgtgcttccgccgccggcggcggcggcggcggcggcgctagagggtgttcttctgagttcgattccgcgatccgatcgctcaggatcaatccccagccagagaggctagcgcatatccttgattctgcttcagatttcaacctggcccttaggatattcagatgggcttcatatcagagaatgcccattcacacggttgacacatacgcccgtatgattgctaagcttggtgatgcagggaaccatgatgagataggaggatttctgaaggagatggtcagattggatgtacctgggttggagaaagtcatgaatgatttagttcagtttttgagtggtaaaaaccgtttcgatgaagcgttgctggttatccaacatgctagctctggtaatttcaagatttcagtctcgtcttgtaatggtgttctgtgtggtttggtcaaggaagggaggggcttgcggccgttcatgcgtgcctacatggaggttgtcaaggccggagttctccctgatgtggaaacattgaattggttaattgaggtattgtgtgaagctggccatttagagttggcactggttcaatttgataagatgagcaagaagaggtgcattcctaatagccgtactttcaagatactcataacagcactttgctcccatggcagagctgatgaatcagcagacgcatttgataagatgctgcagctgagatgcatccctgatagctcattttgtgttcaggttttgcccttattctgtaagttcaataaattgaaggaggccagaaaattgcatcaaatgatgaaagaatataaacttcagtcagatcagcatttatatagcgccttgattagatgcttatgcgagaatcaactattggatgatgcagtcacaacagttaatgacatgatagcgtcaggccatgctctgatgaggagtacgtttgtgaacattgtagactgttactgcacactgggtcagttccacaaagctgtgaactttcttgaggaaaatgatgttgctgaaattgaagcatataatgtattgctgagatcattgtgtaaaacaggaagagttcaggattcagttaactatcttacagaattacacagcaggggtttagttaattgtcaatcatggaatatagttatcgctcagttctgcaacaatgggaatattagaagagcatctgagctcatctgtagaatgatagtctcctcttttacagctgatgagagcacatattcttctgttgtatcttgttactgcaagctaggtttgtacaagaatgccttagatatgttcagaaggctggatgttagcaacttatccttgaattcagaatctttttcacagctggtagagagcttgtgccacatgaaaaagatccaagaagcagctgaagtttttaaatatcactgcaaaagaggatgtaaccttaccagtgagtcacttgagatgttaattcaagaaagttgtatggttggaatgatccgtgaggcaatcaaaatgcgttcattagctgtttgcactggtacttcttgtacatttaccacttataacacaattttccgagcgctactccatttgaagaaggagaaggatgtgttacttctctttgcacatatgttgatggaaggctgtctattgaatgagtatacatacaactgtattttgcgttatttccttaccaaggaaacgatttttgaggctgctatcttgttcaacagaatggtgaaggatggttttgttcctgaccaagagacatttgagctattagtccctgagatggctctttcttctttacttaatatgatttcagaaagtttgctaacagttgtaaatatggatggaatgatgagtcccagaatatctaacattattatttatggccttattaaagagggcttcaagagtgaagcatgtaagtttcttgatcaaatgatagagaagggatgggtacctgattcaaggacacatagtatcttgctcagcagtagtggtcgagaggagcctagagaaagtgatgaagtcaaccacacagtggatgatgacaatatggctgattcaaggttaatgctccgtctttaccgtttctggagtcccaacggattgcaaggcctaaacgccttgtgtgtaatgctcatggaagttactagagaaaatttgtaa

SEQ ID NO: 53049 - DNA, 1228 bp, Oryza sativa
  Clone ID: PAT_MRT4530_55287C.1
ggattgctacaaactcaaatggaactttgattcaaaagcaatgtgatacaggagaaatcaatccagagaaaggggaaaaagaaacagcttgtacaaataaacaacacgcacgcacatagagagtgacctccagttctcgtacgagcagaaattaaattactgaatcgaacaggaaactcgagtactcgacacaaatctagcttattcacgaatgttaacaaaccaacgatgaaaaataagtcacgcacgcaaaacaaaaaaatacaaatacaaaaacgaacgaaaaacaatcgatttagcgaatcacttaattatgatatgacgatcatatcgtcctcgtaaaccgggcgcgcgcgagcgggcgatcgatcgatcgatcgatggatcggatcagatcagatcagatcatcacttgggcatgggcccgtggttgtaggtgtcgcagcgccgcctgatctcgccggcggcgccggtcttgacgccgaagaggctgagcttgtcgatggcgcgggagaagtcgtcgaagaaggcggtggggttggacgcgtagagcttcacgaacggctgggtgcgcttgtccgaccacatctcctcgtccgtggcgaggaggccgagccctcgctccaggttcacgaagtacatgttgtcgaacttcccgggcgtcatcacgtcgttgaacgccgcgatcgtcgggtccttgaggtactccttgcacgccgtctgcaagcccttgctcagcaccgggttcatcgtcgggtccacgttcccgggcttcccctggtagtcgtagatcctctgcgcgaactccttgcagtgcgagaatcccagcgtgtggccgccggacagcgccaccatctcctgcaccgtgaaacccttgtcctggaacaacttgatcacctggtccatggtgaagttggactgcggcatctccttgtcgggcgccgtcggcgacgacgtcagcgagtccttgcggccgaaggagatcgggtagcgtgggccgccggtcatggtgatgagcacgcgcgccgccagcgccaggatgtcggcgcacgacaccacctcggggcactcgagctccagggcgagcttggcgcgcaccaccgcgtcgaacgggtcacccggcagcgaggggttgatctccgcgctctgctccgacttctcgaacgccgtggccgccaccagcaccgacgcgtcgcacccgctgaccggacgcgtgggtcgacccggg

SEQ ID NO: 53050 - DNA, 679 bp, Oryza sativa
  Clone ID: PAT_MRT4530_55288C.1
tgcacggcggatgggaactagatatgatatgagagagagagagaggaggggaaaggaaaattgatagtatgaagctatttgcttctgagtggaatgttgtctggttcaaggtctcatacaccttgtcggttttgaggatgatttgtgcaaggtttttcattcctctcatccgtgggatctcggaccaggcttcattcccctcagagatagcttcaaaacattagatctatagttctcgctattatttcttcactttcttccctctattattgaggatttcatttttcatgtgatgtttgtttcggtttatttttgttggtttgttgagaaccgaggatgctgtttcatgatttcactgcttttttgtttgtttgtttgtgtttgcttagaaccgaggagagatcgaagattggtgtaatgatggcttgctttgactcctcttttctctgtctctctggcaggcgctggaaagtttcatcattaccttttgattgggggaatcttccttgacattctctctccttctcttctatttcattatcttctctctttatttcttccattctgtttagtttcttcattttcacaggtgttcttttccctgcttccttttctcttaatgaaagatatacatatgttactttaacaagttagcataaaatttgatgtatatctggat

SEQ ID NO: 53051 - DNA, 710 bp, Oryza sativa
  Clone ID: PAT_MRT4530_55289C.1
ttcggcagtcgggttgtgagggttgtctgctctcatctctgatggggcgcactccccctagcccctcaaaatcatcccaccctccaacacgcggatggcccccaaccccccccgccccccccctccccgacccctaccgataccatcactgttcctccctcctccctctttaaccccccccccccccattttctgtccgcctatccccccgttttccccctcccctctttacttccccctctcctctcccttctctctgcctccccgcccccccctccccccccctttccccccccccctttttccccccccccacccccgtttttcccctcccccgcccctttttcctcccccccccccccccccccataatctcctcgtttatatttatcacctccccctccccccctcgccctccccttttctcgccccccacccccctccccttgatgcccccttcccaacccccccgttgtttcccttctttccccgcccgccggctttcttctcaactcactcctccccgcgttatctccccccccccctgttttttccatcccccctcccctctccttcccctttttttcctaataccgacagacgatccccggtgacccctccctctcccatttccctcttccctcgtctatcctccctctcctcctccatcctcttcttttattcctcctcctcctcctcttcccaccctt

SEQ ID NO: 53052 - DNA, 339 bp, Oryza sativa
  Clone ID: PAT_MRT4530_5528C.1
tcgggcgttgctcgtcgtcgtcgtctccgagctcgcagcatcgacgacaatggcggaccaccaccaagaacaggcggactacactgaccggccagctatgttagtccaggaatcgacataccacgacagaagcccgatagcctgcgatgcctgcacgttcggtgaagcgccagtgcgtggacgccagtacggaggacgagctacgccagtgaggctgctgccggcagctaaccccataggctgcacctggtgcacgtgctatgcgctcaaccacatgctgaggatcatctacaggtagagcggcgccgtcgacgctgggcactctatgggcgaggagtt

SEQ ID NO: 53053 - DNA, 492 bp, Oryza sativa
  Clone ID: PAT_MRT4530_55290C.1
ggaccgtcaacagagccccaaggccggtctaaccggggggcatcagagatagctaggcgatctgagagtagtacatgagcttccaattcaaacaagagtatcaaaaatcatcatttgcctcctggaacacaatcacaaccgcagtggataccttctggcttatcgcgctctcaaaagaggaggctacaatgtcttggggccaaggatcgaaaggagacaaaggccgaagatgtgaagaaccaaacgtgcaacaatttagagcctcaagctcctaagagagtgtggagacccaaggcggtaaaagatgagagaacggtgatttccaaagtagtgataaatccaattcgttgagagaagaaccatcggtcattagtcataagcttcctcgatccacatgatgttgttgacattaatatggtgtttatcttgccctcaaaatcaagcactaagaaaagctgattttgctcggggggtaagacattaatgttcttt

SEQ ID NO: 53054 - DNA, 442 bp, Oryza sativa
  Clone ID: PAT_MRT4530_55291C.1
ccccgcgtccgaagcagacgggctgggagaaaaaaaaaaaaaaaaaaaaaaaaaaaaaaaaagtaaataattataaaaaatacaagatacagtacttcagcatgcaaagtaatatctttatatagtgacaccaaaaaaaaagtcactggctcttcgtgggtacaacgtcgcggctggcgtgtctctgccgtttcccttcttatttgccttgccttacttccctttttcggccggtggcttaataccgtggaggccggaacccctcgccctttccaacatttgctcatcctgaatggcaacatggttctcgccctgtggcgaatcattaagcgccgcggatgtggcgctctcccccagcgtggcccttcctcttgccacagtggaaccccccgtttctttcgctttttacccttggtttgttgccgcgtccgccggctttccc

SEQ ID NO: 53055 - DNA, 278 bp, Oryza sativa
  Clone ID: PAT_MRT4530_55292C.1
ctggataagttctgcagataggacatacatacagtgtccaaagaagcatacaaatgaatatacaaaaaaaaaaggcatagagatgcatatcaaagaaaagaagcattgaaatgaaagagagcgccatctgtcctagttgctagggtaaaattttgtttggtttaagttttaactagtgcctgaacaacttgggtcagatccttttggccatgcaaaagtattgattcttcaatagattggtgattcttttggtcccaaattaatattggaaaagaatg

SEQ ID NO: 53056 - DNA, 1368 bp, Oryza sativa
  Clone ID: PAT_MRT4530_55293C.1
atggagagcgtggtgcaactctggagtgactgggaaatccagttgctaatgctccttagcttcacactgcagatgctgctattcttcagcggaggcttgcggcggtgtagcaccaaggcactagttaggttttgcctgtggatagcatacttgggggcagatatggtagcactttatgcccttggttatctctcacgacaccaagatgtcatcattggagggagcacattgagggaggttcacccactgtctttcctttgggcaccattccttctcatgcatcttggtgggcaggatactatcactgcatttgccattgaggataacaacatgtggctgagacatttgttaaatctgggagtccaagttgctttgaccctatatgtcttttggaagtcagtggatcgccataatgtacatatcctaattcctggcatctttttatttgttgctggcatcatcaacaatagtggatggccgaaggaaaggccgttgtggtctaattccatggggcagtacaattttctgagctacttgggttgtgacgagtcaaggctgtccaagctagtgaaaaaagtaataaggaagatggggagcctagttggcgctggagaggaagcaggaacgtccttgtggatgagcaagctgttagacaccaagtatgttacggtggataaggagatcatgcaatgtgtcatacacttgatctataattatagtccatttggacctgcaagcacggatgatcaacgctggccaaatcttgaggtgcacctatcgaactattatcttcatgaggtattggccagtgtgtgccggaaactatccaactacatgctctaccttttggtgagacaccctgaaatgttgccggtcagtggcactgctgaacctaccttgaaattctttcttggcagcattacttacagaaatgaccactacaagaatagaaccctaaaaagggcgagagatcggctgcaaattcaagaacctgcagatatgggcataaagacattagaggagatcagagacatgtgggcgatgcttctcatctactctgcaggcaagtccaaggcaaacatgcacgcagcgcagctgagcaaaggcggggagctccttacctttgcttggttgcttatggcccatctacagcttggagacgttggcgagcaatttgaattcctttttggcagcgtccctggtccggagagcaaagaggacaacagagacttgcagtggcggagccaggatctcacgacgcctagggctcaaattgaaggaactatccatgataattcatacgctgaagtacaaagtacagataaaaaaaactgcaagactgaaataacagagcaaaatcaagcctaa

SEQ ID NO: 53057 - DNA, 453 bp, Oryza sativa
  Clone ID: PAT_MRT4530_55294C.1
cccgggctgcaggaattcggcacgaggcaaaaaggtggagtatgcgcgagtacggactcttgttgacaatgcttacaaaaaggacccacgaattcagcggaggaaggaggaggagaaggctgagaaacagaggaggaaggaggcaaaatacctggccaaaaagatgcaagaggaagaagctgcaagggctgcagaagaggaaaggaagaggaaagaagaggaagcaaagagagctgcagaggctgctctcaatcagaaaaagttgaaggagaaggagaagaagctgctacgcaaagagaaaacccgtctgcgcaatcttgttgcaccggtagttgcagagagccacttttctctgtcagaagatgatgtcgaaacagcatgctcgtcacttgatatggaacgactgaagaagctctgtgatagcatggagaacaaagatacaacagaaaaggc

SEQ ID NO: 53058 - DNA, 1068 bp, Oryza sativa
  Clone ID: PAT_MRT4530_55295C.1
atgggtgccaaaacgccctatgtcgtcatcgtcatcgtagagctgatctacactggcatgtacattatctccaaggcagccttcaaccaggggatgaacaccttcatcttcatcttctaccgccaggcagctgcctccgtactactgctgcctcttgccatcgttcttgagaggagcacggggaccttaaacctgtacaacatgggcctcaagtacaccacgtcgacggtggcatccgcggcaggcagctcgattccggtgatgtccttcttcttggcgctcctactaaggcaggaaatgatccggctgaggagcttgccgggctcggcgaaggcggccggcgttggcctgtgcctggccggcgtgctggtgatcgcgctgtacaccgggccgacgataagcccactgatccaccaccgcgtgttcgccggcggcggccatgaagcttcggcgagcgggagcggcaggacgaggtggatcgtggggacggtgctgatcctgctgtcgaacgtgacgtggctgctctggtccatgctcatggcgccggtgctccgcgagtacccgaacaagctgctggccacgacgtggcagtgcgtgatcagcgcggcgcagtcgctggcggtggcggcggtggcggcggcgcgggaccccgccgcgtggaggctgcggctcgacactggcctcctcgccgtcgcctactccggcgtcgtcgtcacggccgtggcgttctacctgatggcgtggtgcatcgagaagaaggggcccgtgttcctcgccatgtccaccccgctcgccttcgtcttcaccgtcttctgctgcatcttcttcctcggcgagaccgtccacgccggcagcgtcgtcggcggggtcctcatggtggctggactctacagcgtgctgtggggcaagagcaaggagcaggacaagctcacgctcgccaccgccacgcccaccgtcgccgccgtagaacagaaagaagccgctgcggctgcgccagatgcagacgccagcaatagtggcagcgaactccaccatgggagattggtgtcgctagagcaacaagtctaa

SEQ ID NO: 53059 - DNA, 3357 bp, Oryza sativa
  Clone ID: PAT_MRT4530_55296C.1
atggaagaagatgaagtagaagatgagaacattccggacttggctcagtatggcggatttgaagaaaacacaatgggcgaggcggagctggatgttgaagggaatgacggtgctgatgaacttggtcaaatattgcgggacttacaggaggactgcgaaagtgaaaaggaggtgcagaaactagagcgcatgttagcggaccacaaaacagcgttgtacccaggttgcgagaagggctacaaaaagttgagtaccatcctagaattcttgcaatggaaggctaaaaatggtgatgggatgctgagacaccccgctgacgagtcgcagtggcgaaatatcgacagaacatttaaagacttcggcgaggatgcacgaaacatgaggttcggtttaagcacggatggaatgaatccgtttggagagatgagcagtggccatagcacctggccagtcaccatgtgcatctacaatcttcccccttggctatgcatgaagcggaagtacatcatgatgccgattattattcaaggcccgaagcaacctgataacgacattgatgtgtacctaagaccattggttgaagatttgaaagtgctgtggaggaaagagggcgtccccgtgtgggatgaggacaagcaggagcaattaacctacgagcgttgctattcgttacaattaacgattggcctgcgcttagtaacctatccggacaatcaaacaaggggcggaccccacacgtcagcgggtcaagggaatcggtccaccgtggaccgggaccacggggtggcgcggctgagcacgggcacggctcaggccggcccggctgagcgacggctcgcggcggcgcggcctcctgcggcgacggccggtgcatgtgagaaagcggcagtgaggcgcggcaaggggatccgggcggcccaggcaagcggggcggcggcaagccggccggccgacctaacggtggccgcgcacggcccggtggtcgccggcggcggccacaggcgcggcagcgcgcacgggagacagaggagggaggcaaagaggaagaggagtagctcaccaaagacgtggcgacgaggggcggggaaagacgggggagctcggcgtcggagggggagagagggctcccagcggcatgaatcgctggtcggaggtgagaacgggcggcggatgctcaccggcgcgaggggaaccgtgttccggcaggatcccggccatgaaaagcggcggccgaggtgctgctcggcgctacgaagcgagcggcggcaacagcgcgacttggggtggctaggagcggcgccaagcggcgactggagtcggcggcggcagtggaaagaggtggtgcgcgtggcgacggtgcttcggaggcggggaggggaaatggagcggatgccggggggaggggaggctggaccgagcccgggagaggcggagtcggggcggcaaccgccggtggcgtgggcggcatcgtggggtgtgggtggcggttttggaggggagaggtgggggaaaacggcgcggacgtgggcggcgaggtcccacggacgagcgcgcgcgcgcggggtggaggaggtgggcggaaacggcggcgtcgtggggcggctcgggcggccatggcggcagttggagctggaggaaggggatgacagccacgaaccgggacaaaagattaccgggtataaatatcaactgcatcggcttcctcgcgccacacttagacttctccacgatcgatcttcttcctcccgctccattaccgccccagacgtcgccgccgcctccgctgtcgtcgtcgtcgtgctcgccgcgctcatccgcccttgcgaacgccaccagcagcgttgcctccctcaagaccgcgatgacgaacaattcctgttagacacgatcgcagagggcagcagtcagtactgggtggatgatgaggggaacgaggatcccaaccaatacctgaacgaggagggcaacgatgagggtaaccaggaggctaaccaggaggggaccgaggaggggactgatagtcaaccgtcggccggacagaagaggccacgcgggaaaataggtcccgcgaagaagcttgagggaaggcacatcgttactgagattgccccagacggcgaaccagtagccctggcggagaaggacatgttgtggaccaccatgctggagacattcacgatccctgaggcagatcgtcctagatgcaaagaatggaccctgaagaaaatggcagaactattccagagctacaaatcagatctgtacaagagatacatcctcaagggcttgacacctgatttcaacgtgcataacaagcttagggatcactgggatgcgtttgtggcatacaagactggagcgcaagggcaagcacagatagaaaagaacaaagccaatgcagctaagaagaaataccatcaccggcttgggtcaggcggatatggaaaggcaatccccaagtgggacaagttggaagctgagttgatagcaaggggtatcgagccgaccacggctaattggcctgagcgatcgaggaactggttctatgcacacggtggatcgctcaatccaggcgatggctccctcatattcggcgatgagattcgagatgcagcacgccgacttgcggatgcaattgaagcctctacgcaggggactttccagcccgacagagaaaaggacgagctcacccttgcactacagaatcctgagcatccaggacgaacgcgaggaaaaggcgtcattccttggaaatatggattcaaagaggacatccacacgtataggagtcggatgaggagcaagagggatacagagtctaagatcgtcgatcttgagtacagggtgtccacctacgaggcaaggatgcaagaggaggtgacaagacaagtggaccaacgcctggctgagcagcgcggaatggaaacacaagcgcccgtcatggtgagcccctcgggcaaccgcagcagctgcgcatcaacgggccaagttggatcagagggcattgaggcagtggcagctcacgaagcaacccacttccccgttgatgatgtcacgcccattccacatggatatgcgaaggtcgagatagagctggtggaacgaacctacgaggatctcgagcttgacatccccggaggagacggggagaagaaacttggagacacagcccacgccatcatactctggctctcctccgccatcaccgcctcgtcagtctcctccggctccttcccctgcaccaccatctcctccgcgtgcaccagctgccaagtctgcaccgtcgggcccgcgggcaactactcctccgcgtgcacctgctgccaagtctacaccgtcaaggtcccgcccatatga

SEQ ID NO: 53060 - DNA, 127 bp, Oryza sativa
  Clone ID: PAT_MRT4530_55297C.1
atggtggtgcatcgatggcaccaccttcgactcgatggtgacataaacgctaggcccgagcccgagcccgacctagataagcctgatcttggcctgatatattatcggatagtctgggtcgggccat

SEQ ID NO: 53061 - DNA, 5468 bp, Oryza sativa
  Clone ID: PAT_MRT4530_55298C.1
gttgcctttgattgctcgtatctccttttgacgctgcaaccgacactgacagacacgtctatggatcggcaacggatgtacgcggatcggcggtcgaaagtgtttgttgacggcgtgcattattttttgggtgtggccaatgataacaagcgtaacggttttataagctgtccatgtgacaagtgcaaaaaccagaaggagtattccaccacacgaactattcatgcctacctgtttcagtgggggttcatgcgtagctacaattgttgacctcgcacggagaggttggggttgcaatggaagaagatgaagtagaagatgagaacattccggactgggctcagtattgcggatttgaagaaaacacaatgggcgaggcggagctggatgttgaagggaatgacggtgctgatgaacttggtcaaatattgcgggacttacaggaggactgcgaaagtaaaaaggaggtgcagaaactggagcacatgttagcggaccacagaacagtgttgtacccaggttgcgataagggctacaaaaagttgagtaccatcctagaattcttgcaatggaaggctaaaaatggtgtgagtgacaaggcattcggcgagttattgaaactcgtaaagaacattcttccggaggggaacgaattgcccgaaagtacgtacgaagctaagaagacagtctgccctctaggtctggaagtacagaagattcacgcgtgtccgaactactgtatcctgtatcgcggtgagtacgaaaacctggaagcatgccctgtttgcaaagcactacgatacaagataagacgagataatctaggtgaagttgacggatagcctttgaagaagagaattcctgctaaggtgatatggtatttccctataatatcaaggctgaagcggtttttcaggaacaaatcacatgctagaatgatgcggtggcacgtagaagaacataaacaggatgggatgctgagacaccccgctgacgggtcgcagtggcgaaatatcgacagaacatttaaagacttcggcgaggatgcacgaaacgtgaggttcggtttaagcacggatggaatgaatccgtttggagagatgagcagtggccgtagcacctggccagtcaccatgtgcatctacaatcttcccccttggctatgcatgaatcagaagtacatcatgatgccgattattattcaaggcccgaagcaacctggtaacgacattgatgtgtacctaagaccattggttgaagatctgaaagtgctgtggaggaaagagagcgtccccgtgtgggatgaggacaagcaggagcaatttaacctacgagcgttgctattcgttacaattaacgattggcctgcacttagtaacctatctggacaatcaaacaaggggtacaatgcttgcactcactatttggatgaaactgaaagtgtatatgggaagtccaaagatacactcgaagcacgcaatgatctcaagcatatggaacaacgcgagggccttcatccggaaccgaacgagaaaggaagccattacttaagtccggcgagctacaccctaagcaaggaagagaaggagagtatgtttcaatgcctaaagagcatcaaggtaccatccggatactcctcgaatgtaaagagaataataagcacgaaggataagaagttcacaaacctaaagtctcatgactgtcacgtgcttatgacatagctgcttcctgttataatttgtggtatccttcctgataatgtgcgggtaacaataacgaagctttgtgctttcatgaacgcaatttcacagaaagtcatcgatccagaaagtttagccgcccttcagcatgacgtgaggtacatgggcgttctaaagaagtacgttcgtaaccgttctcgtccggaagcaaacatcgcgaaggggtatggaacagaggaggtcattgagttctgcgtagattttattgaagacctcgagccaatcggagtacccgaatcattccatgaggggagactacggggaaagggcacacttgtaaggagagcaattatgactgtagacaacgatttattccgtaaaacacatttcacggttttgcaataatcttcgttggttgctccttacatcaatgagcaccttgcgattgttcgctcagaaaacagtggcaagtctgatgcctagattacacgccatcatattgatactttccccgcttggctgcgagaacacctcctgggtaacgagacgattgaccgacaactagccttcttggctaggggaccctccggctcggtaactacattccaaggttatgaaatcaatggatacactttttacacaagagcccaagagaaaaagagcacgaaccagaacagtggtgttcgtatcgatgccataggacacgatggtccaactagcacgtattacggtgtcatcgacaacatttgggaactagagtatggacccctgaaggtccctctgtttctgtgccaatgggttaggctgactggtggaggcgtaacgattgatgacagcgggatgataacggttgacctaaacaaggtaggatactcagatgaaccattcattctagccaatgatgtaacgcaagttttttacgtgaaggacatggatagcaaaccaaagaaggggaaagggcccgatgagccaagacgccatgttgttctcccaggcaagaggaaaatcgttggagtcgaggataagactgacaaaaattacgatctgtttgaggggcaacctccgtttgcagtgacggttgacccgagcatcatactatcaaaggaggacacgccgtactcacgcaacgatcatagcgaaggaacaatatacctgaacgaggagggcaacgatgagggtaaccaggaggctaaccaggaggggaccgaggaggggattgatagtcaaccgttggccggatagaagaggccacgcgggaaaagaggtcctgcgaagaagcttgagggaaggcacatcgttactgagattgccccagacagtgaaccagtagccccagcgggtataggacgaaagtttgtgaatcattgtggttgggtcgtgagagacaacgtccccatcagcatagtgtactggcgtcgaactaggtcacgcggggatgaagatagctttctccctgacacagagaaggacatgttgtggaccaccatgctggagacattcacgatccctgaggcagattgtcccagatgcaaagaatggaccctaaagaaaatggcagaactattccagagctacaaatcagatctgtacaagagatacatcctcaagggcttgacacctgatttcaacgtgcataacaagcttagggatcactaggatgcgtttgtggcatacaagactggagcgcaagtgcaagcacagatagaaaagaacaaagccaatgcagctaagaagaaataccatcaccggcttgggtcaggtggatatggaaaggcaatccccaagtgggacaagttggaagctgacttgatagcaaggggtatcgagccggccatggctaattggcctgagcgatcgaggaactggttctatgcacagggtggatcgctcaatccaggtgatggctccctcatattcagcgatgagattcgagatgtagcacgccgacttgcggatgcaattgaagcctctacgcaggggactttacggcccgacagagagaaggatgagctgagtcggatgaggagcaagagggatacagaggctaagatcgtcgatcttgagtacagggtgtccacctacgaggcaaggatgcaagaggaggtgacaagacaggtggaccaatgcctggccgagtagcgcggaatggaaacacaagcgcccgtcatggtgagcccctcgggcaaccgcagcagctgcgcttcaatgggccaagttgcgtcgggcatggccatacccacggacccttcgagtacataccattgcaggcccattccacatggatatgcgaaggtcgagatagagctggtggaacgaacctacgaggatctcgagcttgacatcctcggaggagacggggagaagaaacttggagacacagcccacgccatcatactctggcataagaagtacatcgtgtttcccgggcaagaacggccgcccgctcctccttcccggccgcaagcatagtctcctccgccatcactgcctcgttagtctcctccggctccttcccctgcaccaccacctcctccgccacctgctaccaagtctacaccgtcaaggtcccgcccatatgaacccgcaccttcaaggccgaagaagaaagccagatctgacgagccacggctccccgctctcaagaaaagggcgtacgacttgactccggaggagctcgatgaagccgttagagcagaagttatggagcagttgaagccacgtagtccggaaaagaagatccctatagccccggaggttgaggatcactttattatgatggccgaaccaggcaaaccggttgaagtttctgactatgatcgaacattgaggaaggctcttaaagccaagccttcagcagtgaagtgtggaaaggaagtccctcagctggggcaacagccacgacaagaggttgaaccgttaatcgtagaaccggcacaactagagatatgcaacttcttgaaagatacgggactgagtatggagcagttgctagaggacgcacctatcgaaacggctccggtcatgtacacgtttaaactcggtgaactgctagtcacgcctgataagatcagagagctacctacacagatgtaccggttccatcaatggtacatggacaaatcagggatgggtagagagatgttcggagctagggtgcgaaactcagattattaccaaggagaagatgttatttggatccgctacaaagaagtcttcgacttataccacctgaaggccctcgacgtctctattctcagcgcgtggactttaatggagattcagttatgccgtcaacacaacaaattcaatactggattcgtggacccatgcaaagtgaacacgctgatgatacaacaatacgagaaacaaactaaggacaatatcgtccatttcctggtgcagcagcattataagaggttcatactacttccctacaacacatcagttcatgtctacgattcaatggataaaccggagaaaacttttgcaaagattttcgaagtgatagatagagcatggattcggttccgtacattggtccgcgggatctggaatgaaaaactcacccggaggttcaattttctgatgatttacctgatagataacaccacccacgatgatttcataagggctgttcaagaacagataatgggattcatcaacaagcatattctccatcccacaggagaattctattatgatggatcgactattcataaagccggtccttcttcttcctatgtcaccaagtcgtagtagcaaaaacaa

SEQ ID NO: 53062 - DNA, 296 bp, Oryza sativa
  Clone ID: PAT_MRT4530_55299C.1
cgccgttcttctcgccgccgccgccgacccgcggagcgggctggtctactgcctagccgcgcaccacgtcgccccgcgggaccccgcccgggccgccgccttcctcgccgcctgcgacgacaacctcggtgcagcgacggagtaccaagagggcgggcgttccgcgcgctgtttgcgctgatcggggaggagagggacgagcaggtggcgatcgagcggcactgcgagttgctgaaggaataccccagggacctcacgtatcccaagagagcccaactcatctgcttctcacatgg

SEQ ID NO: 53063 - DNA, 888 bp, Oryza sativa
  Clone ID: PAT_MRT4530_5529C.1
atggcagagttggccgtccatggcggaagaaacggcagcacacgggagtacgggagggatgaagccgcgatagcacccactgctttcactggagaaacagtagtaatagtacactttctgtcgacaggatcaggatatcgcatctctttctcacgtcgccctacccaggggcggctcgggagtcgacgatccggccaccccttcccccctccatcttccttctccgcctcgccgtcgcccgagcggccgccggcaaagccgcgcagccgcaaggacggcggcggtggtgcttctcgccaacttgctcgggcagccaggggagtcaccctgggtggcggcgatgacaaccaccagatctgtgtcgcctcggccggatctagcggggtggcggccggcagcggggaaggcatcggcaacgaaggcaacggggatggcggcagggatggtgacggcgacggcagtctcggcaataggaggcggcggtggcggagaccgcggatccggtggcagggcacccggatctggcacctctgcgctggatctgcccggtggcggcgtgggcgggccggcgcggcctggtgcggctggcaggaggatggcgcaaccatgggtgatggtggcgacgggccagcgcgatgcggcggcgtggcctgggagacttgtggcgacgacggcgacagcgggcagccgacgagaggaacaacggcggaggcagtatgcgtggaggcgcagctagtgacgccggaggctgataaggcgcggccggtgacagccgcggtgcgtggaggcgaggccgaggtgccggtgcgtcacgacaaggcttgccggtgtggagacagtggagaggcgctagtggaggctagctcgatgatacgtgaccggtggtag

SEQ ID NO: 53064 - DNA, 177 bp, Oryza sativa
  Clone ID: PAT_MRT4530_552C.1
tctaaccatacattgaacgcgctagcgccacgcgagacccgagaggtttgcacccttgcagatgcggggtgggaggggtgattgtcatcactcgccgctagaccacgcaccaggtgaccaaggcttttagcgccgcgctgaaatcatcatttctccacacagtcttgaatcaggcac

SEQ ID NO: 53065 - DNA, 531 bp, Oryza sativa
  Clone ID: PAT_MRT4530_55300C.1
atggctgcggcggtcgatggagcagttcaacagcggcggcgtgccccgcctactgccaagggtggcggcgtccaggcgacgggcggccgacttaatcaccaccctctcccgccgttgctcgagatggctatgagaatgcctctccagacggccgtggtgacagatatctgtcgacagggaggacttgagaatatgcagcacttcgtcggctccataaacttcgaccggtttgcccggttcggccatcttaataaagtgatcctgaacattcggggctatagggatcttcttttccggactacatggcttcaactgctccctaacttctgctctaacggcttcatcgagctcctccggagtcaagtcacttggcagctggtgcacgcggaggaggtggtggtgcaggggaaggagccggaggagactgatgaggcggtgatggcggaggagactgtgcttgcggcggggaacgaggagcgggcggccgttcttgcccgggaaacacgatgtacttcttacgccagagtatga

SEQ ID NO: 53066 - DNA, 2103 bp, Oryza sativa
  Clone ID: PAT_MRT4530_55301C.1
atggaagaagatgaagtagaagatgagaacattccagactgggctcagtatggcggatttgaagaaaacacaatgggcgaggcggagctggatgttgaagggaatgccggtgctgatgaacttggtcaaatattgcgggacttacaggaggactgcgaaagtgaaaaggaggtgcagaaactggagcgcatgttagcggaccacagaacaacgttgtacccaggttgcgagaagggctacaaaaagttgagtaccatcctagaattcttgcaatggaaggctaaaaatggcccgaagcaacctggtaacgacattgatgtgtacctaagactattggttgaagatctgaaagtgctgtggaggaaagagggtgtccccgtgtgggatgaggacaagcaggagcaatttaacctacgagcgttgctattcgttacaattaacgattggcctgcgcttagtaacctatccggacaatcaaacaaggggtacaacgcctgcactcactgtttggatgaaactgaaagtacttatctgaagcattgcaggaaggttgtgtacatgggccatcgtcgattccttgctgcaaaccaccctgtacggaaaaaaggcaagcacttcgaacaaaaggcagaccatcgtactaagcctaaacatcgcaacgggaaagcagtgttcgaaatggtgaaggatctgaaagtagtatctggaaaggggcctggtagccaacctatagagagcgaagatggtcacgcagcgatgtggaagaaaaactctattttttgggaggtaccctattgggaggtcttggacattcgccacgcaatcgacgtgatgcaccttactaagaacctttgcataaacctgctgggcttcttaggtgtatatgggaagtccaaagatacactcgaagcacgcaatgatctcaagcatatggaacaacgcgagggccttcatccggaaccgaacgataaaggaatccattacttaagtccggcgagctacaccctaagcaaggaagagaaggagagtatgtttcaatgcctagagagcatcaagctgcttcctgttataattcgtggtatccttcctgataatgtgcgggcaacaataacgaagctttgtgctttcatgaacgcaatttcacagaaagtcatcgatctagaaagtttagccgcccttcagcatgacgtggtgcaatgccttgtcagctttgagttgatctttccaccctcattcttcaatataatgacgcatcttctgtgccaccttgtaaaagagatcggtattctcggtcctatgtacctacacaacatgtttcctttcgagaggtacatgggcgttctaaagaagtacgttcgtaaccgttctcgtccggaagcaagcatcgcgaaggggtatggaacagaggaggtcattgagttctgcgtagattttattgaagacctcgagccaatcggggaggacacgccgtactcacgcaacgatcatagcgaaggaacaatagtgaggagaaaacttctccacgatcgatcttcttcctcccgcgccattaccgccccagacgtcgtcgccgcctccgccgtcatcgtcgtcgtgctcgccgcgctcatctgccctcgcgaacgcaaccggcagcgttgcctccctcaaggtgaggggcgcaaatcttgcgcctccgatctcgcattctctctctctcgatcgatcttgacacgcgccggccgaccggatcgacctcgccgtcatcttcgtcgccgactccaccgccggccgccgccgccgcgcgccgactccacctccaccgccgccgccgccgccgcgcaccgactccacctccgccgccgccaccgccgccaccgctgccgccgactccaccaccgccgccgccacgcgccgactccaccgccgccgccaccgccgccgccgccgtgcgccgactccaccgccgactccacggtggaacaccgcgatgacgaacaaatcctgttagacacgatcgcagatggcagcagtcagtactgggtggatgatgaggggaacgaggatcccaaccaatacctgaacgaggagggcaacgatgagggtaaccaggaggctaactag

SEQ ID NO: 53067 - DNA, 1919 bp, Oryza sativa
  Clone ID: PAT_MRT4530_55302C.1
tgcgaatttcttcatttaaattttaatttaaaaatcggatttattgcgtcagccgaggggaggggcgcgcggaccgggtccacgggagtggggcccacgcggcagcctcacggtccacggtggaccgggtgcacgcagcttgcgccggccggcgccgtgggtcccacgcgtcagccgcacccgagggcgcgggcggctgacggccgggccccacatggcagccgcggggcgcgcccgaaggcggcctcgccggcacagccgacgaaaggcgacgcgcccgcgccccgatggtcgccggcggcgacctccggcgcgacggagcggcgcccgagagaggggagggaagggggaagcgaaatggcggtcctcggctcaccccgggtcgacggcgacgacggaaacggcgaccgaagtggagagaggcggcggcgcggctcgggtcgacgaggacggcggcattccggcggtcggcgggcgaaacgaaggggtggacgaggtcggcgaggacgcggcgaagccgaaggaggcgatgccgaagcgggaggaggtccggggcgacggcggcggcggaccgaagctcggcggcgacggcggagagagaggacgacggcgcgagctcgattccgacggggagagagagcggcgagcggcggaaacggaggagggaggcacggggagcgtttatatagtgttgggagtgagagagggcggccggaggggaaggaaaccggcgcggctatctcggctccatcaatgacgccggcgaagtttgcgggaggatttccaaacgaatccgagagagagagagagagggaaaagtggggggggaaagagggagggaatcacggggagtgatttccccctctttattgcgcgcgggggcggcgggatgcggcggaatccgcggcggcggcggcgctagggcacgggcgaggcggcgggagcggcgggaggacagggatgacaggtgggccccacccgtcagcgagggtggcgggcgggcccacccgtcagcggcgcgcgcgcggggaggaggccggatgggccgcggggaagaggagagagagagaaagggatgggccgagccggcccaagagggaaaagggggggggaaagactttttagggtttttgttaccactcgacgcgctgcgcagtggaagaaagcgctaaggagtcgaaggaaccctcgcgatgtagcgcgcgtcgatgtagaggaagtagtcaatcgcaccggctcgaccttctcctcctcgtgcgtcctcctcgccgtactcccacggtgatgcaatgcctccgccggtcacacccctcacgaatatataagatccatcactcgggcctccaatttgcctcttgctaagtgtcacgcccagaaatttccgaatagaattccaagcagaatgtgcatttaaacccccgtccaggaccggccggggtacacaaacgacaaagttgacaaacagatccacgtcggaaagaggccgtgacaggacccttcgcataaccccctctaaccaaacacaccacaccttaggtttcacccccactcctcgcaaggcagcgggcagtcccctcttgtgcctaggtgaatccggaagccgcataggccgtcgcagggcccatccaaactccatcatgcccacccttgcctggatgcgtcagctagagaaaagctacactacaagcccagccgttgcccacgctggcttgtggcgggtcccactggtcagcagctcaaaggggggccggtgcaccgtggaccgggaccacgcgggtggtccaccgccggtccacgggaccaacggcccagatcggccccgagccgattgggcggtggcgatagtggaggccgccgggctcggctcggcatcaaagccggccggccggtcagggctagcggcgatggcacgcggctga

SEQ ID NO: 53068 - DNA, 1371 bp, Oryza sativa
  Clone ID: PAT_MRT4530_55303C.1
atgtccaagaagaccaagaggaaggccgcattggtccttggagacctgccgaaaccatgcaaccagtgggggttcaagcccaagacgtcgagttcgtcggggcgaagcccccatggcaaagactatgaagcaaagacggcgaacggcgaagaatcgcgctaccgaagagtgagcagagcctccggcgctcggcgtcgaagctggtgtggcaccatcaacttcggcccctgccccgcaaccaccaccttcggctcctgccacttcgacggggcaggcaccgaacacggtcgatgcggcgaaggcggcagcggtggcaaggacgctccagaccagggcggagatcctttcaacaagtcagctggtggcgccccaaactgcttcgccgcagcaggctatagcttcgaccgcgctcaccgccacacaagtcaactccaacctcgaagcgcaagccgaagccaacatgggggccatgcgtcagaacatggcgcgactccaggacatgcttcgtcaaatgcaagagcagcagtaggcatacgaagcggcccggcaagccaaggtcgcctcggccctcattctctagtatttggcaggctacatcccaccctaggtctacccgcaagcgccgatgcaagcccttccgtcacaagtcatgcaagtgccagcgtacttcgccggacagccttcgaccgcaacagtacacccgacccctcatgtacagccacaagttcggccggtcgctgcccaagtacgcaacccgccgctcggtcaaatgtcgcaagcaatggcggaacaaatcaggcgccgaaccaggtcgccatggcatggacccagccttcgttcgacccatccatggcggcgcaccaagcgtcaccgttcggggccgggcagccgaacactgtggcccaaccgcacgcgcaagccatgacttcgtccttcgccacgccatatccaaatgggcctctacagcaaggtgctgtgagcaaggcggggggcgaaaaggggctgccgctgagtgggggaatcaagattcgtccaatcccacccctgtacaagttcccacccgttccgcgatactcgggcgaaacggacccaaaagagttcctgtccatctacgagtccacgatcgaagccgctcatggcgacgaaaataccaaggcaaaggggcagtgtggttggcgagctttgagcgatgcgggattaggaggcggcgtggtcggcgagctccgaccggtgcggatcgggggcggtgtggccggcgagctccgggcggcgcggatcgtgatcgcgtggccagcgagggcggtgcggtggagttgcctcgacggtgacgcagtagatcccgatggtggtgctcctaggttgccggggtag

SEQ ID NO: 53069 - DNA, 2220 bp, Oryza sativa
  Clone ID: PAT_MRT4530_55304C.1
atggatcagcaatggatgtgcgcggaccggcggtcgaaagagtttattgacggcatgcattattttttgagtgtggccaatgctaacaagcgtaacggttttatatgttgtccatgcaacaagtgcaaaaaccagaaggagtattccacagcacgaactattcattcctacctgtttcagtgggggttcatgcgtagctataattgttggatctctcacagagagctaggggttgcaagagaagaagatgaagtagaagacgagaacattccgggctgggctcagtattggggatttgaagaaaacacaacgggcgaggcggacgtggatgttgaagataatgacggtgcagatgatcttggtcaaatgttgtgggacgtacaggaggaccgcgaaagtgaaaaggagcaatggaaggctaaaaatggtgtgagtgacaaggcatttggcgagttattgaaattcgtaaagaacattcttccggaggggaatgaattgcccgaaacaacgtacgaagatggaattaatccttttggagagatgagcagcggccatagcacttggccggtcaccatgtgcatctacaacctccccccttggctatgcatgaagcggaagtacatcatgatgccgattattattcaaggcccaaagcaacctggtaacgacattgatttgtacctaagaccattggttgatttatacctaaggctattggttgatgatctgaaagtgatgtggaggaaagagggcgtccctgtgtgggatgaggacaaacatgagaaatttaacctacgagcgttgctgttcgttaccattaacgattggaaggttgtgtacatgggccattgtcaattccttgttacaaaccaccctgtacagaagaaaggcaagcacttcaaacagaaggcagaccaccgtactaagcctaaacatcacaacgggaaatcaatgtttgcaatggtgaaaaatctgaaagtagtatttggagccaacctacagagagcgaagatggctacatggcgatgtggaagaagaactctattttttgggagttaccctattggggttttgggagttaccctattgggaaattttggatgtatatatgggaagtccaaagatacactcgaagcacgtaatgatatcaagcatatggaacaacgcgatgtccttcattcggaaccgattgagaaaggaagccattacttgagtccagcgagctacaccctaagcaagaaagagaaggaaattatgtttgaatgcctagagagcatcaaggtaccgtctagatactcctcaaatataaagagtataataagcacaaaggataagaagttcataaacctaaaatctcatgactaccacgtgttgatgacacaattgcttcctgttataactcgtggtttccttgctgataatgtccgggcaacaacaacgaagctttgtgttttcttgaacgcaatttcacagaagatcatcgatctagacagtttagcagcccttcaggaggacgtggtgcaatgccttgtcagctttgagttgatctttccactgtcattcttcaatataatgacgcatattctatgtcacgttgtgaaagagatcgatattattgatcctgtgtacctacacaacatgtttcctttcgagaggtacatgggcgttctaaagaagtacgttcgtaaccgttctcgtccggaagcaagcatcgccaacgggaatggaacagaggaggtcattgagttatgcatagattttattgaagacctccgtccaatcagggagcaccaggcgattgttcgctcagaaaacattggcaagtccgatgcctggattacatgctatcatattgatactttccccgcttggctgcgacaacacctcatgggtaacgagatgattgaccgacaactagccttcttggctaggggaccatcttgctcggtctcgacattccaaggatatgaaatcaatggaaacacattttacacaagagccaaagacaaaaagagcacgaaccaaaacaatgatgttcgtatcaatgccataagatatgatagtacaactagcatgtattacggtgtcatcgacaacatatgggaactagactatggacccctgaaggtccctctgtttcggtgccaatgggttaggctgactggtggaggcgtaacgattgatgacagcgggagcagtgtagtaggaccaatggtctag

SEQ ID NO: 53070 - DNA, 2590 bp, Oryza sativa
  Clone ID: PAT_MRT4530_55305C.1
atgtcatggcagagggttggtgccctgctgctagggggctcagtcctgcctgcctgtcccgggtgtcccggccgtaggaggattgggtcggtactcttgtttatggctaggatgggttgggaactatgtcacgtcttccgtccgtataccgtggtgatggataacactggtaacaaaggctatgggaatgatggatccgatgactcaagaacccaagccaatgggaatgagaaaagcatcaacgaaacctcaccagagctaatccaaattgtggttaaccaaaccaacatgttggcaacagcctttcaactattacagaattggaacaacccagcagaggcaaccaacgttcaagtacctacagtccagcaacagtgcaagttatcagaatttctcaaaactgagcctccaacctttgccattgccgtcgatcctatggaagccagtgattggttgcgcacaatcgagaagaagctagggttgattcagtgcaccgaccaggagcgggttggcttcgcaactcatcagctggttggaccggcttcagagtggtgggatagctacgaagcatcacggccagaaggacataccatcacctggaacgagttttcatctgtattcaggagatcacatgttcccgcaggaatgatcacactaagaaaacgagagtttcgctacttgaagcaaggagatttgaccgtcacagagtacctgcacgagttctatcgtttggctcactatgcaccagaagatgtggaaacggatgaagacaaacaagagaagtttctccaggggttaaaagatgagcttgcggtgcaactacttctagaggattatggaaattttgagaaactcgtggacaaagccatgcaacttgaaagtgagcataatcggatgacgaactgcaagagaaggattgtcaacatcccagtatttccatgtggtaaccaaagacagcgcactgagccacttcagatcaccggaccttctgttgtgcatcaagagttcccgccccaagaagatggacgcaatgcagacaacaacactagcaatactaatgatgatgataccaccaacaaccatggttcttgccccattagtgaccactcgaacaaagcgtgcaatgtcagtagcattcaccaagatgtcaacgatagtatcaatgttggaacccagaatgacaaccttagcaatgttgacactgagaaagactccaatggtgatagcaactatggtaccactgatgccaatgttagcaaggatttccaaccaccaattccaactccaagtcaaaatgatcgtccccagatggacagctcagtacagaagacgttgatttgttacaactgcaaagaaccaggtcatttctctagagattgtccacagccgaagcgtaacctgtgccatcactccggccattatgcaagaagaagacaagtcactcgccttgtggtcactggagcaaacgccgtacctgtttctctgaaaggcagcaggctcaagtaccacatcgtcaccaaaagcatccacaactctcggagtgaagagtacttagttgacaaagttgacgccaaagatatgaattatgagaagttctggaactgaagtcccatcttcaagtgccacaacccagtcgaagtcagctaaaaggtgcaccctggttcaagtcagccacctcctctccctcggtcagccctccgtttcgcggggaaagcaccggagacgcgttctcgccggcaaaacagtggcgttgccgccactgttccacctccggccgccactgtcgcgtttcccgtgcgccggccgacgtcgccaccacctccctcggctccgcgacgccgccctccaccccggctgctcctcggtttcgccggaacaccgtcgccgcgccggcctctccatcctcttcgtcgccggcgtcctttcggccacccattcctcctcgtcggctcgtcgccccgctgcaccaccaccttctccaacatcgcagcagcgcgttccacgccgtcccctcctccgctcagccgctgctgcctgccatcatcgtttcctcgtcaccgttcgtcctcgccgatcgacgtcacgtcggtcgcctggctcatcgtctcgcggcgccgcctccgtcgtcggcatcgcagcggcgtggtccgcgccatcctcgcctccgtgcagccgctgccggcagccctcatcgcctcctcgccggccccggtcgtcgccgtcgtcgtcctctcgtcgttcccggtcgtcgtggcgttcgtccctccgtcgagccgttctcgtccgtcgtccgcgttcgtcaagcgaaccgctgcagccccgtcctcgtcttcgtcctcggctccgcgtcgtcaagcctcgtgccggccgcgtctcgccttcgtccaaggatcgccgccgaagccgtcccctcgccgttcgtctccgttgtgcccgtctgtctccgccgcgcccgttcgtcgttgtcgttcccacgcctcgtcgcgtggtggtaaggttccctctccctcgctgccccgtcctcgtcctttcggtgtcccccgtacccgttgtgcggttgtcgaccccggtacccatgtaccggtgtcgg

SEQ ID NO: 53071 - DNA, 377 bp, Oryza sativa
  Clone ID: PAT_MRT4530_55306C.1
gacaaaaaaaaaaaaaaaaaaaaaaaaaaaaaaaaaaaaaaaaaaaaaaaaaaaaaaaaaaaaaaaagggaaaaaaaaaaaaaaaaaaaacaaaaaaaaaaaaaaagggccgccattttaaaaattccggggcggccgttttaggggttccaactttacttccccttgtttgcgacaccttaattttttttttgggccccctaatttcaattcacggcccgggatttacccacgggttgcctggtaaaacccggtggttccccaacttattttccttgcataccatccccttttcgcggcctggcctattagccattggcgcccgcccgatcgcctttccaaaaattggccccccctttttggcgattggtaccccc

SEQ ID NO: 53072 - DNA, 3672 bp, Oryza sativa
  Clone ID: PAT_MRT4530_55307C.1
atgtcgtcttccaccaatccatctgatgcgccatcagctgagtacgctgagagctggatcacttggtaccaacgtgtatcggctagtaagaaagttcactgggatgagattagaatcggccaagcgcttgctctcaccacagccaattctgctaaggatgaacatctgatgactgccgccacctacttctggtcaaataccatcaatgctttcttattcaaccaaggaccgatgactccgactttaatcgacatcaccatgattactggattagatgtgacttcatcggctaaccccatgagcatgaacaccaagaaccaatttgactttaagaccaaaaacatagccgaagccctagaatcaaagaaagaattccctttgggcaaaattcttctcggctatctgtatcaaatgttgaacaatgcatcggctaaaatagccgtcggctcaatagtcggagcaggtggaccatggtggctgctgcaaacttggttaaatctgatagtcatgaaggttgtcaatcggccctatgtaacagaagctgagttcccattgccagagccgattgtagaagatgacggagaagagcgcacccatcgcagatgtatgtcatatggagcatatgcatccacaccaactgatgctggagcaaaactatcagccaagctgctcaaggactggttctgcagcttctacgaaggttttaagaaagatgcacgaatctggtttccttatgaagactcagtagatcttgaacttccatcggattttagatttgaagatattaatcatgagaaattccaaaaatccagagaagttcttacagctgcaatcagcccatgcatccttcctgtcggcattcatcaagggagaaatatccaagtctcctatgagttctatcacccaatgagctcggccaggcaacttggattgggccaactcccaatcggcttattctttgccgacaaaattcagtgccgaggacaaatcacgtccactttaatgatggatcggctacttaacctaccaggaccttctctgggtagcattgaaaatattgagttggcaggatttagaagcaaaaactttgacagatggtggggtttaatcctgaatggaggtggattatctccccctgtcatcggctaccatggccccaagacttcaactctccttcacggcttaaccagggaaccagccaatgcaggcaagaaaaggaaaaccagatcatcagctgtgagtaccttggtcttagctccaaagaaaaaagccaaattcaagaaaaccaagccgactgataagccggctgatgatctgcccgccttggatccatctattgaacaagccttagatgaagaggaaattggtgaagatgttgaccaggctttagccgagataagtgacacagaaagaactccatcggcttcacccaagcaaacgcctccaactccttctacccccgttcattttacaagaaaaaagaagactgctgtgaagaaaaagccagtagcaacgattgccaagtcggctccaccaatggcagactgcgatgacgaacaaatcctgttagacacgatcgcagagggcagcaacaacgtccccatcagcatagtgtactggcgtcgaactaggtcacgcggggatgaagatagctttctccctgacacagagaaggacatgttgtggaccaccatcttggagacattcacgatccctgatgcagatcgtcccagatgcaaagaatggcccctgaagaaaatggcagaactattccagagctacaaatcagatctgtacaagagatacatcctcaagggcttgacacctgatttcaacgtgcataacaagctaagggatcactgggatgcgtttgtggcatacaagactggagcgcaagggcaagcacagatagaaaagaacaaagccaatgcagctaggaagaaataccatcgccggcttgggtcaggcggatatggaaaggcaatccccaagtgggacaagttggaagccgacttgatagcaaggggtatcgagccggccacggctaattggcctgagcgatcaaggaactggttctatacacacgatggatcgctcaatctaggtgatggctccctcatattcggcgatgagattcaagatgcagcacgccgacttgcggatgcaattgaagcctctacacaggggactttccagcccgacagagagaaggacgagctcaccctcgcactacagaatgctgagcatccaggacgaacgcaagggaaaggtgtccttccttggaaatatggattcaaagaggacatccacatgtataggagtcggatgaggagcaagagggatacagaggctaagatcgtcgatcttgagtacagggtgtccacctatgaggcaaggatgcaagaggaggtgacaagacaggtggaccaacgcctggccgagcagcgcggaatggaaacacaagcgcccgtcatggtgagcccctcgcgcaaccgcagcagctgcgcatcaacgggccaagttggatcagagggtattaaggcagtggcagctcacgaagcaacccacttccccgttgatgatatcacgcagcgaacaccctgcgatatgcatactcccttcaggaacttgtctatcaaggtcgcgttgggcatggccatacccacggacctttcgggtacataccattgcaggcccattccacatggatatgcgaaggtcgagatagagctggtggaacgaacctacgaggatctcgagcttgacatcccaggaggagacggggagaagagacttggagacacagcccacgccatcatactctggcgtaagaagtacatcgtgtttcccgggcaagaacagctgcccgctcctccttccccgccgcaagcacagtctcctccgccatcaccggctcgtcaatctcctccggctccttcccctgcaccaccacctcctccgcgtgcaccagctgccaagtctgcaccgtcgggcccgcgggcaactactcctccgcgtgcacctgctaccaagtctacgccgtcaaggtcccgcccatatgaacccgcaccgtcaaggccgaagaagaaagccaaatctgacgagccacggctccccgctctcaagaaaagggcgtacgacttgactccggaggagctcgatgaagccgttagagcggaagttagggagcagttgaagccactttctgactatgatcgaacattgaggaaggctcttcaagccaaccttgcagcagtgaagtgcagaaaggaagtccctcagctggggcaacagccacgacaagaggttgaaccattcgtcgtagaaccggcacaactagagatatgcaacttcttgaaagatacgggacagagtatggagcagttgctagaggacgcacctatcgaaacggctccggtcatgtacatgtttaaactcggtgaaccgctagtcacgcctgataagatcagagagctacctacacagatgtaccggttccatcaatggtacatggacaaatcagtgatgggtagagagatgttcggagctagggtgcgaaactcagattattaccaaggagaagatgttatttggatccgccacaaagaagtcttcgacttataccacttaaaggccctcgacgtctctattctcagtgcgtggactttgtaa

SEQ ID NO: 53073 - DNA, 1806 bp, Oryza sativa
  Clone ID: PAT_MRT4530_55308C.1
tcacacgaacggacggccgagatcgaaccaatccaaaacggacggccgagatcgaatggtccacgaccggctcacggcggacgaccccgatgacgtcagcggtgacgtcaccgacagcggcggcggctcggcggaacggacggctcgggcggcgcacgcttgccggcgaacggcggcaccaggacgcaaacggagggcaccagcacgtagaggacgacgcggcgaacacaccggtgaccaaaacggcggcggaagaacaacggacgacgacgacgacgaggaggaaacggcggaaaccttcgggttgtcgacggcgacgaagctccggtgatctccggcaacggcgaaggggcggacgagaacggcgacgcgacggcgaccacgacgacggtcttcccgagcgacggtgacggctgtgattatttccggtcggggacgagcaggcccttgtactttagcaggagagctagaccctagatcgacattggcatcttttttaggaggattgtcaacttgagcttctacttcgaggatgtccttgtttcgctctgtacccgactggtttccagtcgggggctcctgattagcgtcgaccctagcttcggccgactggtttccagtcgggggctcattgctgggacctacattgtcggttgccggctgttcgtcactcaggcgatcccctgcagtcggctcggtctcttttgaaaaacctgtctccatgccagtcggttcggagtcttttctagaaggatctatgtcagatggcttcctagaagacttcctgatttttggcatgggacgactggatgttttcttctttgggttagcctgccttggatgttttccagtcacccctttgctgccagccttttcagcatcatcgtcgtcactcaggaccaatttcctcttacggaaatctgattggttggccgactgagtggtggtgggatgagagtcagaacggatttttggccctccactagtttggctagtcttcccacaaggagtgcggtgttgggtaatcggaggatcagacttcatcaaggtaaactccggtggaggggggttgaaagcattgtatggtacaactggcagcagatgtgaatagctgacaacgatagcatttgagaagatcttgtacattctttccttcatgaccttaaagtcaagagagtctggatcttcacgatttggatcatgtttgccatcaaattcaaaagccgtgcgggatctctctttgattggagctagccgacttttgatgaagtgccgagtgatctgctttccctgcaaaccttgttccttcagttttagcatgcgctccatcagttccactgcctgagcagcttcatctcccataggcaatgaattccatgtgtcctggcagaccggagggagacaggagtactcggggagtgctggttcaggattctgaacgtaaaaccagtttgcgtgccagcctttgtttgaggtcttgaagggcatggagaaatacttttggcttagtgttcctctgagttggaaaccagcgcccccaacaacgcatggtttgctcttgttcggctggggcttgaggaagaagatgcggcggaacaaagcaaaatgaggtctaatgcccagaaaagcttcgcaggcatgaataaaattggcgatatgcactatggagtttggattcagatgatgcaggcacccgatgatctccttcactggaagaacgccgtgtgctaccatttctttcagattctcctccatcacatcggagggcgcccactgactctcaaaactttctctctcttccgccat

SEQ ID NO: 53074 - DNA, 504 bp, Oryza sativa
  Clone ID: PAT_MRT4530_55309C.1
ctgcaggctcagaagctttgcaacctccggcgagtagacgagagacgatggcgagcgccggcggtgaggtcgtcggcgtcgacccggccgcggccgcggtggcgcctgacgtcgagcaccacgcgccggcgccgcggctgactccggcgggcagcggcgggcggctgatggcggagctgctcggcgtgttcaacgggctgacggagcggatgggggacgacgtcgccacctcgtcgtcgtggaccctcctcttccgcgcgctcaagctggcgctgcccgcgctccgcgacgccgccggcggacgctccctcgcccgcgcgctcatcgtcgcggcgtccctcgccgacctccagatggacgccgaggtcatctcggcggggatcgtgaggcaggcgatggacgccggcgcggtggccatggccgacgccgaggcgcagctcgggccgggcgccgccgcgctgctccgcgagagcctcgacgtgaagaacgcgccgacgcgggtcg

SEQ ID NO: 53075 - DNA, 2093 bp, Oryza sativa
  Clone ID: PAT_MRT4530_5530C.1
ccacaataagcgtactgaatcaaaaaggaaagcttgagacttcggtctacattctacacagatgctagtataaaggcaacacagccgaacaaaaggacagaggtacttcaactaatgcaagtcatcatagaggtaactaagggatcattagagaaccaaagaaagcaacaaggtaacatcacgcagacgcagtacaaaaatgctaaccatttcttcggagttgaacctcttgtcaggcagcagatctttttttttttcctttctgaaacttgtcaggtaaatatatgggccattgatcacagagctgaaggatcagcagaatactatcagtatcctttaggcaaagctattaacaattattattattgtacaacaaaacatatgctgacagcctgatcatgaacccagtagactggtgcatgctccacaggcaaattatagaaaaatgtcaagaatagtactcttcaggtttcaatagtacagatcacgctgcctccatgtttgcagcagcgcctacatcgccaatcatccttcaggctgtagcacttgcttaaattatagtagtaacatgttctacaattgtcacacgatttcttcaatatacatcacgttgtctcctggaaagattgagatcgagatagagctgctggattcgcctgcaggactcgtgcagcaccggatatctgctccctgctttcaggtttcgactggaatgatctgaacatgctacggtcaccaggttcaatgccaagggttgtccagattgagctctttgcagcttcgtcaggatcatcgatccgaagcgttttcggaatccacaagtttttctctgccttgtcatctccttgcggtttggagtccctggagtgctttcctaggacaggagagccgttgtctgaacatgtactagtgcttgtaggagatgaagctgacacgctgcaattaggttgaatccatggcgagctccatgcaccatttggccagggagaaatgaagggccaaactgaagatggaattaccggaaagtatcctggtaccggcatcactggtggcatgctccactgaacactagctgtgcttccattgtctgaagaatttgctggttcagctggtgctgtgcataccggtggtgccatggcaggaatgccattccatgctggactccatgggtacacaaaaggaggaccagggaagcatggtatgggatgcatgggagggactccactatgcccaacaattccattttgatgcccactaactgctccattaactggttcattccggggactatctgaagttgttcctgaagccgggcaggtctgggtttctccatttctgggttgtgctgttgaggtaggcttggcattcttactctgctctccaattttcagcacagaggccatggaattacagagtggggaatcaggtgcaaatttaactgccgttgctgtttgatctccttttatagagagttgatagaggggagcatctccagcaggagcagctagattgctgcccgtgattaatatactgcggtaatttgcagtggagctcttactcttgcgcctaccagcaccaacagggaggttcctcatgcttccacctgccgtccaatatctctgacaactcttgcaaaaatgtcttggctggttaatgttgtagttgttgtagtagcagaactttgtatccatgctgttgcaacgaggacaaggcaggatcttgtctggcttcttcaggaccttctcttcactcgatccaccaccctctgtttgagctgcctcagatttggactctgatccagtcatttcatcattgctaggtgtttgattctcacactcgctggaactattaaagctagaactattcatctgatcagcatctaactcctgatctgtgcatggcttttcttcactgatcctcatgtctcctgtatcctcacatgaatccttctccggcgtctgcgggggcggaggcacgtgggattccggcggcggcggcggcgggtgaggaggggaggcggcggcgaggtcgtccatggagatggtacatgggcgagagagagagggagagagacagagagagagagatccgac

SEQ ID NO: 53076 - DNA, 2235 bp, Oryza sativa
  Clone ID: PAT_MRT4530_55310C.1
gatctgtacaagggctacaaatcagatctgtacaagagatacatcctcaagggcttgacacctgatttcaacgtgcataacaagcttagggatcactgggatgcgtttgtggcatacaagactggattgcaagggcaagcacagatagaaaagaacaaagccaatgcagctaagaagaaataccatcaccgacttgggtcaggtggatatggaaaggcaatccctaagtgggacaagttggaagctgacttgatagcaaggggtgatggctccctcatattcggcgatgagattcgagatgcagcacgccgacttgcggatgcaattgaagcctctacgcaggggactttctggcccgacagagagaaggacgagctcaccctcgcactacagaatcctgagcatccagggcgaacgagtcggatgaggagcaagaggaatacagaggctaagattgtcgatcttgagtacagggtgtccacctacgaggcaaggatgcaagaggaggttgcgtcgggcatggccatacccacggacccttcgagtacataccattgcaggcccattacacatggatatgcgaaggtcgagatagagctggtggaacgaacctacaaggatctcgagcttgacatccccggaggagacggggagaagaaacttggagacacagcccacgccatcatactctggtgtaagaagtacatcgtgtttcccgggcaagaacggccgcccgctcctccttccccgccgcaagcacagtctcctccgccatcaccgcctcgtcagtctcctccggctccatcccctgcaccaccacctcctccgcgtgcaccagctgccaagtctgcaccgccaggcccgcgggcaactactcctccgcgtgcacctgctgccaagtctacaccgtcaaggtcccgcccatatgaacctgcaccatcaaggccgaagaagaaagccagatctgacgagccacggctccccgctctcaagaaaagggcgtacgacttgactccggaggagctcgatgaagccgttagagcggaagttagggagcagttgaagccacgtagtccggaaaagaagatccctatagccccggaggttcaggatcactttattaagatggccgaaccgggcaaaccggttggagtttctgactatgatcgaacattgaggaaggctcttaaagccaagccttcagcagtgaagtgcggaaaggaagtccctcagctggggcaacagccacgacaagaggttgaaccgttagtcgtagaaccggcacaactagagatatgcaacttcctgaaagatacgggactgggtatggagcagttgctagaggacgcacctatcgaaacggctccggtcatgtacacgtttaaactcggtgaaccgctagtcacgcctgataaggtcagagagctacctacacagatgtaccggttccatcaatggtacatggacaaatcagcgatgggtagagagatgttcggagctagggtgcgaaactcagattattaccaaggagaagatgttatttggatccgctacaaagaagtcttcgacttataccacctgaaagccctcgacatctctattctcagcacgtggactttattccattgggtccttcttcttttcgaccttgagaaatccaaagttcatgtctacgattcaatggataaaccggagaaaactttcgcaaagatttttgaagtgatagatagagcatggattcggttccgtacattggtccgcgggatctggaatgaaaaactcacccggaggttcaattttccgtgtgcaaagcaggaaaaggggactaacttgtgcggctactacgtatgccattacatgcactgcttagcacaccaaatcaggactggccaggaccttgaaatgatttacctgatagataacaccacccacgatgatttcataagggctgttcaagaacagataatgggattcatcaacaagcaaattctcgatcccacaggagaattttattatgatggatcgactattcataaagccgcttgcaaggaatccggggaaacaggttcacacttcaacacaagcagtgatatgttgcaaccaaatgataagaaggatgtgatgacatcaactgcatcctggctggaaatgggttgggattctcgatggtctgacctttgtgatgggcctcctaagatgttaaagctctatgttgtttctcacatggtaatctga

SEQ ID NO: 53077 - DNA, 3556 bp, Oryza sativa
  Clone ID: PAT_MRT4530_55311C.1
atggctcctcgtaagcccaccaaggccgggtcgactggcgaagaccctagcagcctcggggaggggtggtcatgctttcttggcaaatcgcttgtcaaagaggccgacttggccgaattggtctcctccggcactctcgcggagggccaagggacatgtgggggcgaagccgttgtcccttcgccaggcgatgggcgaacggtcgtcttcgccaccttctttgccgccgggcttcgtctcccgtgtgacgatttcctggcgtccgtgctggcgacatacgaggttctctcccaccgccgagctgttcgccgtcctatttacagcatgtgccacgaccaaagacgtgcatacgccagccggaccaagaaaaaccgttttcggttgcgtgaacttcatgctgcggctggaatggccggcgacgaggatgtcggtacgtcgaagaagtgcaaacgagcggttgcaaagggtggccaggtgcgaactcgtcgcgccgctaaggacgcggccgaaagcgatggtggggaggaggaagaagacgatagggaggccggatctgaggatgatggatcgcatggttatactcctagcccagctagggtgaaatctggggtgggctctcatgtttcgcccgtgcgcccgcaagacattgctggagcgaatgcccttctggcgatttctagctctgcggcgaagccgggagctgttgccaggaagaagaagaagaaggggaaggttgtgcaagttggctgtggcttttcggacagtgagggccgcctctccctcctcgccggagcgccgtccggtcgcgccgtcgccctcctctagcatcgcagccgcctcctcttcgccggcctaccctctgtctcccgcggagacctccggaagtgcctccccgccggcaaccgtggtgttgccgccacgattccgcctccggtcgcctctgccgcgtccccggtgcgccggccgacgtcgccaccacctctcccggcaccggagtgccgtcctctttcccggcaaggccacggcgtcgcccgaatttcgccggaacgccgtcgcccgcgtcggcctctccttcctcctcgtcgacgtctcctccggcagcccccttccgccgggcccgtgcatcagccggcgctgccgtccctccctcggcatgccgcgacgtcgtcctcggcctcgcctcccctccgaccgaacaccgccggtgtccgtcgtcgtcttcaccgttcatcctcgccggctcgtcgtctcgcggtgccgcctccgtcgtcggattcgcagcggcgcgttccacgtcgtccccgtctccgtgcagctgccgccggctgccctcatcgtctcctcgccggccccagtcgtcgtcgtcgtcgtcctctcgtcgttctcggtcgtcgtggcccccgtcctcgtcttcgtcctcggctccgcgtcgtcaagcctcgtgccggccgcgtctcgccttcgtccaaggatcgccgccgaagccgtcccctcgccgttcgtctccgttgtgcccgtctgtctccgccgcgcccgttcgtcgttgtcgttcccgcgcctcgtcacgtggtggacaaatgaaggctacacgagctgcggcccggtagtcgagatgtcatggcacagggttggtgccctgctgctaggggctcagtcctgcctgcctgtcccggaggttccggccgtaggtgggattgggtcgaattggaacaacccagcaggggcaaccaacgttcaagtacctacagtccagcaacagtgcaagttatcagaatttctcaaaactgagcctccaacctttgccattgccgtcgatcctatggaagccagtgattggttgcgcacagtcgagaagaagctagggttgattcagtgcaccgaccaggagcgggttggcttcgcaactcatcagttggttggaccggcttcagagtggtgggatagctacgaagcatcacggccagaaggacataccatcacctggaacgagttttcatctgtattcaagagatcacatgttcccgcaggaatgatcgcactaagaaaacgagagtttcgctacctgaagcaaggagatttgaccgtcacagagtacctgcacgagttctatcgtttggctcactatgcaccagaagatgtggaaacggatgaagacaaacaagagaagtttctccaggggttaaaagatgagcttgcagtgcaactactcctagaggattatgaagattttgagaaacttgtggacaaagccatgcaacttgaaagtgagcataatcggatgacgaactgcaagagaaggattgtcaacatcccagtatttccaggtggtaaccaaagacagcgcactgagccacttcagatcaccggatcttctgttgtgcatcaagaattcctgcccgaagaagatggacgcaatgcagacaacaacactagcaatactaatgatgatgataccaccaacaaccatggttcttgccccattagtgaccacccgaataaagcgtgcaatgtcagtagcattcaccaagatgtcaacgatagtatcaatgttggaacccagaatgacaaccttagcaattttgacactgagaaagactccaatggtgatagcaactatggtaccactgatgccaatgtcatttctctagagattgtccacagccgaagcgtaacctgcgccatcactccggccattatgcaagaagaagacaagtcactcgccttgtggtcactggagcaaacgccgtacctccgcctctccctcctcgccggagcgccgtccggtcgcgccgtcgcctcctctagcatcgcagccgcctcctcttcgccggcctaccctctgtctcccgcggagacctccggaagtgcctccccgccggcaaccgtggtgttgccgccacgattccgcctccggtcgcctctgccgcgtccccggtgcgccggccgacgtcgccaccacctctcccggcaccggagtgccgtcctctttcccggcaaggccacggcgtcgcccgaatttcgccggaacgccgtcgcccgcgtcggcctctccttcctcctcgtcgacgtctcctccggcagcccccttccgccgggcccgtgcatcagccggcgctgccgtccctccctcggcatgccgcgacgtcgtcctcggcctcgcctcccctccgaccgaacaccgccggtgtccgtcgtcgtcttcaccgttcatcctcgccggctcgtcgtctcgcggtgccgcctccgtcgtcggattcgcagcggcgcgttccacgtcgtccccgtctccgtgcagctgccgccggctgccctcatcgtctcctcgccggccccagtcgtcgtcgtcgtcgtcctctcgtcgttctcggtcgtcgtggcccccgtcctcgtcttcgtcctcggctccgcgtcgtcaagcctcgtgccggccgcgtctcgccttcgtccaaggatcgccgccgaagccgtcccctcgccgttcgtctccgttgtgcccgtctgtctccgccgcgcccgttcgtcgttgtcgttcccgcgcctcgtcacgtggtggtaa

SEQ ID NO: 53078 - DNA, 3612 bp, Oryza sativa
  Clone ID: PAT_MRT4530_55312C.1
atggatcggcaatggatgtacgcggatcggcggtcgaaagagtttattgacggcatgcattattttttgggtgtggccaatgataacaagcgtaacggttttataagctgtccatgcgacaagtgcaaaaaccagaaggagtattccaccacacgaactattcatgcccacctgtttcagtgggggttcatgcgtagctacaattgttggacctcgcacggagaggttggggttgcaatggaagaagatgaagtagaagatgagaacattccggactgggctcagtatggcggatttgaagaaaacacaatgggcgaggctgagctggatgttgaagggaatcacggtgctgatgaacttggtcaaatattgcaggacttacaggaggactgcaaaagtgaaaaggagatgcagaaactggagcgcatgttagcggaccacagaacaatgttgtacccaggttgcgagaagggctacaaaaagttgagtaccatcctagaattcttgcaatggaaggctaaaaatggtgtgagtgacaaggcattcggcgagttattgaaactcgtaaagaacattcttccggaggggaacgaattgcccgaaagtacgtacgaagctaagaagacagtctaccctctaggtctggaagtacagaagattcacgcgtgtccgaacgactgtatcctgtatcacggtgagtacgaaaacctggaagcatgccctgtttgcaaagcactacgatacaagataagacgagatgatccaggtgaagttgacggacagcctttgaagaagagaattcctgctaaggtgatgtggtatttccctataataccaaggctgaagcggtttttcaggaacaaatctcatgctagaatgatgcggtggcacgcagaagaacgtaaacaggatgggttgcggagacaccccgctgacgggtcgcagtggcgaaatatcgacagaacatttaaagacttcggcgaggatgcacgaaaccggaagtacatcatgatgccgattattattcaaggcccgaagcaacctggtaacgacattgatgtgtacctaagaccattggttgaagatctgaaagtgctgtggaggaaagagggcatccccgtgtgggatgaggacaagcaggagcaatttaacctacgagcgttgctattcgttacaattaacgattggcctgcacttagtaacctatccggacaatcaaacaaggggtacaatgcttgcactcactgtttggataaaactgaaagtacttatctgaagcattgcaggaaggttgtgtacatgggccatcgtcgattccttgctgcaaaccaccctgtacggaaaaaaggcaagcacttcgaacataaggcagaccatcgtactaagcctaaacatcgcaacgggaaagcagtgttcgaaatggtgaaggatctgaaagtagtatttggaaaggggtctggcagccaacctatagagagcgaagatggtcacgtggcgatgtggaagaaaaactctattttttgggagctaccctattgggaggtcttggacgttcgccgcgcaatcgacgtgatgcacctcactaagaacctttgcgtaaacctgctgggcttcttaggtgtatatgggaagtccaaagatacactcgaagcacgcaattatctcaagcatatggaacaacgcgagggccttcatccggaaccgaacgagaaaggaagctattacttaagtccggcgagctacaccctaagcaagaaagagaaggagagtatgtttcaatgcctagagagcatcaaggtaccgtccggatactcctcgaatgtaaagagaataataagcacgaaggataaaaagttcacaaacctaaagtctcatgactgtcacgtgcttatgacacaactgcttcctgttataattcgtggtatccttcctgataatgtgcgggcaacaataacgaagccttgtgctttcatgaacgcaatttcacagaaagtcatcgatccagaaagtttagctgcccttcagcatgacgtggtgcaatgccttgtcagctttgagttgatctttccaccgtcattcttcaatataatgacgcatcttctgtgccaccttgtaaaagagatcggtattctcggtcctgtgtacctacacaacatgtttcctttcgagaggtacatgggcgttctaaagaagtacgttcgtaaccgttctcgtccggaagcaagcatcgcgaaggggtatggaacagaggaggtcattgagttctgcgtagattttattgaagacctcgagccaatcggggtacccgaatcaatccatgaggggagactacggggaaagggcacacttggaaggagagcaattatgactgtagacaacgatttattccgtaaagcacatttcacggttttacaacaatcttcgttggttgctccttacatcgatgagcaccttgcgattgttcactcagaaaacagtggcaagtccgatgcctggattacacgccatcatattgatactttccccgcttggctgcgagaacacctcctgggtaacgagacgattgaccgacaactagccttcttggctaggggaccctccggctcggtaactacattccaaggacacgatggtccaactagcacgtattacggtgtcatcgacaacatttgggaacaagagtatggacccctgaaggtccctctgtttcggtgccaatgggttaggctgactggtggaggcgtaacgattgatgacagcgggatgacaacggttgacctaaacaaggtaggatactcagatgaaccattcgttctagccaatgatgtaacgcaagttttttacgcgaaggacatggatagcaaaccaaagaaggggaaagggctcgatgagccaagacgccatgttgttctcccaggcaagaggaaaatcgttggagtcgaggataagacggacctcgccggcttcctcgtccccgactccaccgccggtcgccgccaccgtgcgcccacaccaccgctgccgtgcgccgactccacctccaccgccgctgccgccgtcccgcgccgattctacctccgccgccgccagcgccgctcgcctcttcgccgccccaggacttacccacttataaccttccccgggtataaatatccactgcatcggcttccccgcgccacacttagacttctccacgatcaatatccttcctcccgcgccattaccgccccagacgtcgccgccgcctccgccgtcgtcgtcgtcgtgctcgccgcgctcatccgccctcgcgaacgccaccggcagcgttgcctccctcaaggtgaggggcgcaaatcttgcgcctccgatctcgcattctctctctcgatcgatcgatcttgacacgcgccggccgaccggacctcgccgccatcgtcgtcgccgactccaccgccggccgccgccaccgtgcgccgacaccaccgccgccgtgcgccgactccacctccaccgccgctgccgccgtcgcgcgccgattccacctccgccgccgccagcgccgcgcgccaactccacctccacctccaccgccgccgcccccgccaccgccgccgccgccacgcgcgccat

SEQ ID NO: 53079 - DNA, 1146 bp, Oryza sativa
  Clone ID: PAT_MRT4530_55313C.1
atgaatagagtacccaccagttggggttttgtttattctagggtgaacaagccgaggggagggggcgcgcggaccgggtccatgggagtggggcccacgcggcagcctcacggtccacggtggaccgggtgcacctggctcacaccggccggcgccgtgggtcccacgcgtcagccgcacccgagggcgcgggcggctgacggccgggccccacacggcagctgctaggcacgcccggaggcggccacgccggcgtagcggcgggaggcggcgcgcccgcgcccctatggtcgccggcggcggccataggcacggcggagcggaggccgagagaggggaaggaaagggggaaaggaagcggcggtccacggctcacctcgggtcgacggcgacgacggaaacggcgaccggagcggaggaaggcggcggcgcggctcgggtggacggggtcgacggcgttccggcggtcggcgagcgaaacggaggggtggacgaggtcggcgaggatgcggcgaagccgaaggaggcggcgccgaggtgggaggtggtccggggcgacgacggcggcggaccggagctcgacggcgacggcggagagagagagcgacggcgcgagctatattccagcggggagagagggcggtgagtggcggaaacggtggtcgggagctcggggagggtttatatagggttgggagtgagagagggcggccggaggagggagaagtgggcgcgggagacccggccgccattaatgccgccggcgaggttaggggaggggtttccaaacgaatccgagggagagagagaggaaaaaatggggggaaagggggaggggatcccggggaataattcccccctctttattgcgcgcggggacggcgggaggcggcgggattcgcggcggcggcggcgatagggcgcgggcgagtcggcgggatcggcgggagaaaggggatgacgggtgggccccacccgtcagcgagggtggcgggcgggcccgcccgtcagcggcgcgcgcgcggggagaggccggatgggccgcgggggagaggagagagggggagggagatgggccgagccggcccaagagggagagggagggaaaggggactttttagagtttttctttttataaaatcattt

SEQ ID NO: 53080 - DNA, 369 bp, Oryza sativa
  Clone ID: PAT_MRT4530_55314C.1
atggaggatattgtcctcgagacgtcgagggcgtcgcggtggcttggctttaagagccttcctcaatgttcgatcataatcagaaactacgaccggtttgctcagttcagccatcttaataaagtgatcctgaaccactggggatatagggatcttcttttccggactccatggcttcaactgctccctaacttccactctaacggcttcatcgagctcctccggagtcaagtcatacgcccttttcttgagagcggggagccttggctcgctgaggagtcgttgcccgcggacccgacggtgcagacttggcagcaggtacacacggaggaggtggtggaggcagaggagcgggaggagccggtgtag

SEQ ID NO: 53081 - DNA, 1527 bp, Oryza sativa
  unsure (1)..(1527): unsure at all n locations
  Clone ID: PAT_MRT4530_55315C.1
ggcctggtaatccactccatgtggataccccaagaccacgcacatgcctcgcagctccaagacgaagccagtcatgtccaaaccacgacgggtgacgctgccggccatctacaaacaaaacaaaaagaaaaacaacattttagagatcagattttggaatgtccatcgacccccgacttcatccacctccatccgtgtacttttgtttataaccagactgagccacaaactaagccttacccactagacatgtggaagtacggtagtgctttgcaacagaggcccgaagaccggtccttatatggccgaggtgctactatcaaaaccatgcaccccgagcccagcctaaaaccattttgagggttttgaatagagggggagagagagaacggccttccgaaccttcggcgacgaccacaaaccacgcttcgagaacctccggaacgacagaagctacgcgaagcacacaagcaaagctacaagcctataaagaagcaataacaatacataaaaagaaaaccgggtacacagagacggtccacgggtcgacggaagcggaccccgtgtgtcaaccgaggcgagtagccgacaaacggactccactagacaccacgcgagctgcacacgtggaaaccacgcggctaccgagcggacacactaacacggtcaccacgcgcacaagcgaacgactgccgacaccgatacacgggcgagacgcggccggcacaaggcttgacgacgcggagctgaggacgaagatgacgacggggctgctgcacacttgacgaaacgcgggcggcagacgagaatgtctcgacggagggatgaacgccacgacgaccggaaacgacgagaggacgacgacgncgacgaccgggtccggcgaggaggcgacgagggcagccggcagtggctgcacggagacggggacgacgtggaacacgccgctgcgatgacgatgacggaggcggcgccgcgagacgacgacgtcggccgacgctccgacgagggacagcagccggaacggaggcgacgccagtggaggggaagcagctgcgacgctgctggcggcgacggcgcgaccggacgacgctccggcgaggagggagaggcggctggaggcggccggcggcacgggagagagaggacgacggcggggagaggcggggggttcacgggagagagagaggagctgtgcgggaggaggaagaagcgcctggcaggcgggtcccacgcggggcgcgcgctcagcgcgcgtgcgacgcgcgtgcacgcgggagggaggggcggctcgggcagggggcgcggcttgggccgagcggccggcccaagaggagaggagggagaggcagcccgggagagagagggaggaggaagctgggccgaggggaaggggagcccaagagaaggagggagagaaggagagggagagaaagaatgatttttaattcgggatgaatttatcagacgtgacatacaggatcatacttagtgtgaatttatagactgacttttaataaataattg

SEQ ID NO: 53082 - DNA, 346 bp, Oryza sativa
  unsure (1)..(346): unsure at all n locations
  Clone ID: PAT_MRT4530_55316C.1
cccaagaaaanttaanagacacaattttggcggcattttattccctgngnangagtgcgagtgacaattgnnnatacaacacactggaaaaaaagcaaggccnaaaccaaaagggaaaaaggaagcaagcaagcaccgccacaaaaaggggacgcaacccggacagacnttgaaaaaggggcaaccacagggggaaacaaaaccaannncccccaaaagcaccacgcggagggctacaaccaaggggaaaaagnnggcacggggcgccgaagcggatacacagacccgcggggcaagcacgccccaaaatgggggggaggcccaccacgacgacgaccagcctagc

SEQ ID NO: 53083 - DNA, 162 bp, Oryza sativa
  Clone ID: PAT_MRT4530_55317C.1
acatgaatcagtgcaagtgcggatgtcctgtaatgcagaaacaacgccttgccttgttggttataggcattgagacatcaaatcaggtcctggcattataggtacggaagtcataaagggtttttatagtagcatccttgatgtgcataggattcgactaca

SEQ ID NO: 53084 - DNA, 132 bp, Oryza sativa
  Clone ID: PAT_MRT4530_55318C.1
atggcaccggctgcaaggctccaagacgttgaactcaactttggaaggaactttcaacctgatgaacgttttgacagcctccagtgctctatgagcttccacggggatgtgccgctggtttccatctcttag

SEQ ID NO: 53085 - DNA, 3259 bp, Oryza sativa
  Clone ID: PAT_MRT4530_55319C.1
atggagcccgagatcaccgcgccggtttccttcccctccggccactctctcccctttccaaccctatataaaccctccccgtgcctccctcacccgtttccgcccttgccgcaccgtctcctcgccggaatcgagctcgcgccgtcgctctctctctctgccatcgccgtcgagctccggtccgccgccgccgtcgccccggaccacctcccacctcggcgccgcctccttcggcttcgccgcatcctcgccgacctcgtccacccctctgtttcggtcgccgaccgccggaacgccgttgaccccgtcgacccgagccgcgccgccgccttcctccgctccggccgcctttttcgtcgtcgccgtcgacctagggtgagccgaggaccgccgcctcttttcccccttcccttcccctctctcggccgccgctccaccgtgcctatggccgccgccggcgaccataggggcgcgggcgccgcctcccgccggccgcgccgagtggccgccgcgtggggcccggctgtcagccgcccgcgtcctcgggtgtggctgacgcgtgggacccatggcaccgggcggtgcgagcccgggtgcgcccggtccaccgtggaccacgctgcagcttcggaagatccgctcttcgtggaagttgaagccgacgtttgggaaagcgagcaaggcaagtcacatcatccttgaacatattgaatcccaatggacgaagtcggggtcgatggacatctctaggacaaatgaaggctacacgagctgcggcccggtagtcgagatgtcatggcacagggctggtgtcctgctgctaggggctcaatcctgcctacctgtcccggaggttccggccgtaggtgggattgggtcggtactcttgtctatggctaggatgggttgggaactatgtcacgtcttccgtccgtataccgtggtgaataagcctaacatacatcataacagcaaaagacttagatctgttaaggtcctatccttagtttctaatctgtctcttccctttgttttccctctctccctctccaaacctttgcaacagatggctgacaatgagaaaggcaataaggtcagaagtcaggacatcggtacctcaagctcccgagtgaatgaagcaccagacaccagttgtgtgacactggtccaacacctgattaaccaaaaccgattgcttatagagatactacagcagcatcagacgccaattctgaacctgagtcagatacagcctcaagtgcagttggaggcagtccaagcactcacaccacaagtcagcatgccgccagcatcccaaaagaccgatggtggcgtgccacatgttgactcaaaagaagcaagtatcatttgttttatgtgtgatgagcaagggcactatgcaaggaactgtcctcagcagaaaggaaaaacaccaatgcgaaccgaagatgaagtccgtaagatgatcattaccagcacagaatggcctccaccaggaatgacaaaacgtcagagaagaaataccttccgaggtgcaccacagttgacagagcatcttttagctaatggaggtagagtgtctgatagtgaagattcagatcaagtctcctcagatgatgaagatgagaagtctccccaagattgtcaattcagttttttgctgacgaagaagatggccaaccaacccgccagttccaatggagagaagcatcaaggcaacacaaatcctcgccaagattacagtttcagcctaactccagtgccaggacagaggaatcaaaatgagaaaagaaaatgccgagtccgggaagatatctgttgcttcaattgtcaaggaatgggtcatttcgccgacaagtgcccaaaaccgagaaacatagctgccagcacgtcagtccacgcaactccctgcaatcagaagcttgctcctcagcgaattgtcatccatgcatcccgaagcagtcctatagcccgcgttacaacagctccaactccagcgagtgcattaccacaaggtgtcaatgctcaatttcagccccagccaccagttgacaagacagaggccagtatcggcattgtacctttggatgttccagcacagcagccaagaaatcaaaattggaacaacccagcaggggcaaccaacgttcaagtacctacagtccagcaacagtgcaagttatcagaatttctcaaaattgagactccaacctttgccattgccgtcgaacctatggaagccagtgattggttgcgcacagtcgagaagaagctggggttgattcagtgcacagaccaggagcgggttgtcttcgcaactcatcagttggttggactggcttcagaatggtgggatagctacgaagcatcacggccagaaggacataccatcacctgggacgagttttcatctgtattcaagagatcccatgttcccgcaggaatgatcacactgagaaaacgagagttccgctacctgaagcaagaagatttgaccgtcacagagtacctgcacgagttccatcgtttggctcactatgcaccagaagatgtggaaaatgatgaagacaaacaagagaagtatctccaggggttaaaagatgagatcgcagtgcaactactcctagaggaatatgaagattttgagaaacttaattgtaagagaaggattgtcagcatcccagtattcccatgtggtaaccaaagacagcgcacggagccacttcagatcaccggatcttctgttgcgcatcaagagtttccgccccaagaagatggacacaatgcagacaacaacattagcaatactaatgatgatgataccaccaacaaccatgcttcttgccccattagtgaccactcaaatcaagcgtgcaatgtcaacatcattcaccaaggtgtcgatgatagtatcaatgatggcacccaaaatgacaaccctagcaattgtgactctgagaaagactccaatggtgatagcaactatggtaccactgatgccaatgttagcaaggatttccaaccaccaattccaactccaagtcagaatgatcgtccccagacggatagctcagcaaagaagacgttgatttgctacaattgcaaaggaccagggcattactcgagggactgcctgcaaccaaggcaaagtcgacctccacattaccgccaatttacacgaagcagacatcccaatcgtattgtggtcactggagcaaacgccgtacccgtgaggcctcgtgttaatcagaacccatag

SEQ ID NO: 53086 - DNA, 4476 bp, Oryza sativa
  Clone ID: PAT_MRT4530_5531C.1
atggcgagagagatccacaagatcgcgagcctgaggcgggagagctcgctgtggaggcggggcgacgacggcgtgtatttctcgcggtcgtcgacgggggcgtcgtcgtcgaggttcagggatgaggaggacgacgaggaggcgctgcggtgggcggcgctggagcggctgccgacgcgggaccgggtgcggcggggcatcctgctgcaggcggcggaggggaacggcgagaaggtggaggtggacgtcggcaggatgggcgcccgcgagagccgcgcgctcatcgcccgcctcatccgcgccgccgacgacgaccacgccctcttcctgctcaagctcaaggaccgcatggacagagtggggatagattatccaactattgaggtacggtttgaaaaactagaggtggaggcagaggtgcacgttggcaacaggggcctgcccacgctcctcaactccatcatcaacacagtgcagttgcttctcaggaccttcaatcttaaagctctcataaacaggatcctagaggatctaggaagatatgataacccttttacattgtgtgattacaaaatggtctacgaacaaggaaaattacaagcgatcgggaacgcgctccacatctcccccaccaggaagcagccgatgaccgtcctccatgacgtcagcggaataatcaagccccgaaggatgacattacttctaggacctcctgggtcaggcaagacaacgttgctcctggcattggctgggaagcttgaagacaatctcaaggtttctgggaaggttacctacaatggccatgggatggatgagtttgtgcctcaaaggacagctgcttacatcagccagcatgatctccacattggagagatgacagtgagggagaccttggccttctcggcacggtgccaaggtgttggatctcgatatgagttgtcaaggagggaaaaagcagagaacatcaagccagatcaagatattgatgtctatatgaaggcctcagctattggaggacaagagtccagcgttgtcactgaatacatattgaagattttaggattagacatttgtgcagacacagtggtagggaatgatatgttaaggggtgtatctggtggacaacggaagcgtgtgactacaggtgagatgcttgttggtccagcaagagctctgttcatggatgagatatcgaccggactggatagttcaaccacataccagattgtgaattccattgggcagaccatccgtatccttggtggaactgctgtcatctccttgctacagccggcacctgaaacatacaacttatttgatgacattatactcctctcagacgggcagattgtgtaccagggtgcccgcgaacatgtgctcgagttcttcgagttgatgggcttcagatgcccccaaagaaaaggagttgctgacttcttgcaggaagtgacatcaaagaaagaccaggaacagtattggtataggaatgacataccatactctttcgtgcctgtgaagcaattcgcagatgcattccgttccttccacgtgggacagtctattcagaatgaactttcggagccatttgataggagcaggagccaccctgcttctcttgctacctccaagtttggagttagctggatggcgttgctcaaagccaatattgatagagagcttctactcatgaagaggaactcgtttgtgtacatctttaaagctgccaatttaactcttaccgcgttcctcgtaatgaccacgtttcttcgtaccaaaatgcgccatgatacaacttatggaacgatctatatgggggctctgtactttgcccttgacacaatcatgttcaatgggttcgcggagcttggcatgactgtcatgaagcttcctgtcttcttcaagcagagggatcttctattcttccctgcatggacctacaccataccatcatggattcttcagatccccgtcacattttttgaggttggagtttatgttttcacaacatactatgttgttggctttgatcccaatgtgagcaggttctttaagcagtatctgctacttgttgcacttaatcagatgtcatcttcactgtttcgatttattgctggcatcggtagagacatggttgtgtctcaaaccttcggacccttatcattgttggctttcacagcactgggtggctttattcttgcaagacctgatgtgaagaaatggtggatttggggttactggatttctcccttatcgtatgcacagaatgctatttcaacaaacgaatttctagggcgcagttggaacaaaagttttcctggacaaaatgacactgtcggaataagcattctgaaatctcgaggcatatttactgaagctaagtggtattggattgggtttggtgctttgattggatatacactcttgttcaacctcctttacactgtggcactttcatttttgaaaccacttggtgactcttacccatcagtgcctgaagatgcactgaaggaaaagcgtgccaaccaaactggtgaaattctagatagctgtgaggaaaagaaatctagaaagaaggaacagtcccaaagtgtcaaccaaaagcattggaataacactgcagaatctagtcagatcaggcagggaatactcccctttgcacaactgtcacttagttttaatgacataaaatactcagtggacatgcctgaggcaatgacagcacaaggagtaacagaagagcgcttgttacttttaaagggtgttagtggttcgtttaggccaggagtacttaccgcactgatgggtgtgagtggtgctggaaagactactctgatggatgtattagcagggaggaaaactggaggatacatagagggagacatcaccatctcaggctatccaaagaaacaagagacctttgcgcgtatatcaggatactgtgaacaaaatgatattcattctccacatgtaacagtttatgagtcactcgtattttctgcttggatgcggcttccttcagaggttgattcagaaacaagaaagatgttcatagaggaggtcatggagcttgtagagctcacatcactgaggggtgcactcgttgggcttcctggagtgaatggcttgtcaactgagcaacggaagaggctaactgttgctgtggagcttgttgctaacccttcgatcatttttatggatgagcctacatctggtcttgatgctcgggccgctgcaattgtgatgaggaccgtaaggaagaccgttgacactggtaggactgttgtttgcacaattcaccagccaagtattgacatatttgaagcatttgatgaggtggacaattctttattgtcaatatggataaagcttttcctaatgaaaagaggaggagaagagatatatgttggtccattgggccagaattcctcaaaactgattgagtactttgagggaattgaaggcattagtaagataaaagatggctacaatccagcaacatggatgttggaagtaacctctactacacaagaggagatgcttgggattgatttcagtgaaatctacaaacgatcagaactatatcagtttgtctcctttcatgctgttttagtgaactgtattctttacattgggatacaaaattctggttgtgttcaacctgtagtggtggtggagagaacagtcttttaccgagaaagagctgccggcatgtattcaggtttcccgtatgcatttggacaggttgcgatcgaattgccatacatcctagttcagacactggtatatggtgtactagtctactcaatgattgggtttgaatggactgttgctaagttcatttggtacctgttcttcatgtacttcacattgctgtatttcacgttcttcggaatgatggcagtaggattgacaccaaacgagagcattgcagctatcatttcaccagcaatctacaatgcatggaacctcttctcaggatatcttatacctcgacctttttgcaatcatgaagttcaacttccagaggagatgaagaagatgccattcttagatgtagtcgtagaagatggtgtagtctcatatatagagtttattttcattcggtacatagaaaatgtaacaagttccttaattccaaaaggggcgctagaaaagattgattactttagaagaagatacctttggcaggaagatcaggggattagaaaatatcacctggtgcaatggccaatagtgtgttcacctagagacatggggggcttgggtatttcggatttggaaactatgaacaagacacttctggggaaatggctgtggaggttggagaatactgatgctttatggcaaaaattgttaagagaaaaatatctaaaaaagaaaccacttacagcacaaaaaatcaagcagggagattcccatttttggcatggattgatggagataaaagaaaacttcatttctgtgaaatatccttag

SEQ ID NO: 53087 - DNA, 2657 bp, Oryza sativa
  Clone ID: PAT_MRT4530_55320C.1
atggatgaagtcgggggtcgatggacattctccagggcaaatgaaggctacacgagctgcggcccggtagtcgagatgtcatggcacagggttggtgccctgctgctagggggctcagtcctgcctgcctgtcccggaggttccggccgtaggtgggattgggtcggtactcttgtgtatggctaggatgggttggaaactatgtcacgtcttccgtctgtataccgtggtgatggataacactggtaacaaaggctatgggaatgatggatccgatgactcaagaacccaagccaatgggaatgagagaagcatcaacgaaacctcaccagagctaatccaagttgtggttaaccaaaccaacatgttggcaacagcctttcaactattacagaattggaacaacccagcaggggcaaccaacgttcaagtacctacagtccagcaacagtgcaagttatcagaatttctcaaaactgggcctccaacctttgccatggccgtcgatcctatggaagccagtgattggttgcgcacaatcgagaagaagctagggttgattcagtgcaccgaccaggagcgggttggcttcgcaactcatcagttggttggaccggcttcagagtggtgggatagctacgaagcatcacggccagaaggacataccatcacctggaacgagttttcatctgtattcaagagatcacatgttcccgcaggaatgatcacactaagaaaacgagagtttcgctacctgaagcaaggagatttgaccgtcacagagtacctgcacgagttctatcgtttggctcactatgcaccagaagatgtggaaacggatgaagacaaacaagagaagtttctccaggggttaaaagatgagcttgcagtgcaactacttctagaggattatgaaaattttgagaaacttgtggacaaagccatgcaactcgaaagtgagcataatcggatgacgaactgcaagagaaggattgtcaacatcccagtatttccatgtggaaaccaaggacagcgcactgagccacttcagatcaccggatcttctgttgcgcatcaagagtttccgccccaagaagatggacacaatgcagacaacaacattagcaatactaatgatgatgatgttaccaccaacaaccatgcttcttgccccaatagtgaccactcgaatcaagcgtgcaatgtcaacatcattcaccaagatgtcgacgatagtatcaatgatggcacccaaaatgacaaccctagtaattgggactctgggaaagactccgatggtgatagcaactatggtaccactgatgccaatgttagcaaggagttccagccaccaattccaactccaagtcagaatgactgtccccagacggatagctcagcaaagaagacgttgatttgctacaattgcaaagaaccagggcattactcgagggactgcctgcaaccaaggcaaagtcgacctccacattaccgccaatttacacgaagcagacatcccaatcgtattgtggtcactggagcaaacgccgtacccgtttcactgaaaggcagcaagccaaaggacctcatcgtccccagaagcgtccgcaatccacattaaagaataccacctgttagaggttgacgccaaagatatgaattatgagaagttctggaactgaagtcccatcttcaagtgccacaatccagtcgaagtcagctagaggtgcaaccagggaaaagtcaggtgaagagaagattccatctgcaacacccgcgcgcgcgccgctgacgggcgggcccgcccgccaccctcgctgacgggtggggcccacccgtcatcgcctacctcgcgccgcgcccgccgctcgcccgtgccctagcgccgccgccgccgccgaatccgccgcatcccgccgtccccgcgcgccataaagagggggaaatcactccccgtgattccctctcccttttcccccgtttttccctctctctctctccctcggattcgtttggaatctctcccgaaatcctcgccggcgtcattgatggagccgagatcgccgcgccggtttccctctcatccggccgccctctctccctcccgacgctatataatcgttccccgtgcctccctcctccgtttccgccgctcgccgctctctctctccgtcggaatcgtgcccgcgccgtcgtcctctctctccgccgtcgccgacgagctccggttcgccgccgccgtcgctccggacttcctcccctctcggcgtcgcctccttcggcttcgccgcgtcctcgtcgaccccgtccgctcctccgtttcgcccgccgaccgccggaacatcgccgtcctcgtcgatccgaaccgcgccgccgccttcctccgctccggtcgtcgtttccgccgtcctcgtcgtcccggggtgagccgaggaccgccgcttcgcttccctcttccctcccctctctcggccgccgctccgccgcgccgttggtcgccggcggcgaccatcggggcgcgggtgcgccgccttccgtcggccgtgccggcgaggccgccttcgggcgcgccccgcggctgccaggtgggcccggccgtcagccgcccgcgcccgcgggtgcggctgacgcgtgggacccacggcgccggccggcgt

SEQ ID NO: 53088 - DNA, 216 bp, Oryza sativa
  unsure (1)..(216): unsure at all n locations
  Clone ID: PAT_MRT4530_55321C.1
gtcggcgaggcctacaaccgcctctaccgcccctccggcaccaccaccaccactagatcgcgtcggcaccacncggagaccnnnncctccccgaagtgaagtagnngagcaattttaccaagcaccaatgttgttgatcttttccagttggttcataaggttgcatgaggccatgacatatgtattgcacaggggactgatatgtctttttttcat

SEQ ID NO: 53089 - DNA, 4800 bp, Oryza sativa
  Clone ID: PAT_MRT4530_55322C.1
atgggcaagcatacgtacgacagtatgaggacggacaaaaatcgtcataatcttcaaccacttcatcaaaccaatcttaaaaggaccactagagcatacctgatatcattgatgcaaataaatcagtctggtgtcagcgcaacgcaaaccataccaatcggcttcaccaatgctcatcaaacctctcaacctattttcacacgctattcgctgtcgttttcgccatcggacttgagatgcttgcatccttgcgtcctttgctggaatcgcatggcaggacctgttcgtccggtccggttgatgttacaactttgctcttggaaaaggaagctttcatgggccgaggaggcgttgtggcagtcaatcacagaagaagctcccaaaaggccgggggaaacagaagattgggccaaaaatttctttcggagattttgcaggaccgtgccaggctccgtcgcggacgccatcgagctcgacgttcccggcttcaactatgaggtcccggttatcgtcaggttgttggcagaacgcaccaagacgaagttgcttccaggcgccgttacggacgcgacgtgcgagttgcgacttgactgtatgcgatcgggctttgcatctgctcaagttgcttcctccgtatcaaatcatcgaagaactgaagatgtggtttggggtgcttcattgtgcaacaaagattccaatatctccacgtcccatggctgcttcgtggaggagaggacggcgatgatggacattggctcctctctgacgcgctcaaacggcacggtgccgccatcatgggggcgcggcgacggtgacgacgactgctgcttgtgggagcgcgtcaaatgcagcaacatcactgggcgagtatcacatctctacttctcaaacctgtatgattctctggaagtgctaaatgcacatggtgactcgttttggcgtttcaacacgacggtcttctcctcattcccggagcttcagttcctggatctgtccagtatctatcccagttctctaaatatcgatggcttggtagggctgaagctgcccaagctacagcatctcaacctcagttataactggttgcaagagagtatcctcgcagatcttggggaactggtttcgcttgaagtcctagatgccagctccaacgccatgagtggagttgttcccactgcaggaagttcgttagcaggacgtactccaattaattcatctttggagccagtttcactacaagtattaaatctcaacaacaacaggatgagtggagctcttccaaccgaacgaggtcttcggttttcccagaacaatctgagtggtaaactctcatttttttggctgaggaacctcactaaacttgaagaaatcaacttgtcagggaatattaatttagcagttgatgtcaatattcctggatgggcacctccattccaactgaaacagttagctctctctggttgtggtcttgacaaaggcataattgcagaaccacactttctacgcacacaacatcatttgcaggagcttgacttgtcaaacaataacttgtcaggaagaatgccgaattggctttttacaaaagaagcaactctggttaacctaaaccttggaaataactcgctaactggatctctaagtcccatatggcacccccaaacagctctacaatctattgttatatctaccaaccgtattacagggaagctacctgccaacttcagcgcaatatttccaagcttgtccactctggatttgtcagacaataactttcatggagaaattccgatgtcactgtgcagcatcaaacacatgaaggacttgagcttatcaaacaataatttttctggtaaaatgccgacttgtgtgttcactgattttcttgagctgtggaccttgagtgcctcaaacaaccagcttggaggtctggtgtttggtgggatgaaaaaactgtccatcgggtttgcaatgcacctacagaacaacaaatttgaaggaacactgcctcgtaatctgtcaggagcactagtaatcatggatttgcatgataacagcctgtccggtgaacttgacacctcattttggaatctgtctaaattgcaggtactagatctttctgggaaccatataactggcagtatccctcaaaaaatttgcagcttggcaagcattgaaattttagatctttcaaacaacaacttatcaggatctataccaagatgtgccagtgcatctctaagttcgcttaatctgtatgggaattcattatcaggaaacatctcggatgatcttttcaacacatcaaatcttatgtatttggatatgagacataataagttgactggtaacctcaattggttacggcatcttgataaaatcaagacactttcattgggatggaatgactttgaaggccaaatcactccaaacttgtgtaaactaaagtgcccaaggataatcgacttctcacacaacaaactctcaggctcactgccaccatgtgttggcaacatctcttgtgagagtgatacggcagctcaaaattattcaccattgctacttatttatgttataatagaggcttacataattgttcatgacccaatagacttcacctttgctacaaaagggggacaatatacatatggttacaacttcttcgatctgatgtctggtatcgacttatccgggaatatgctgtcaggagaaattccatgggagcttgggaatctgagccatatcaaatccctcaacctgtccaacaatttcttcactggtcaaatcccagcaagctttgcaaacatgagcgagattgaaagcttggacctttcccacaatgaactgagtggattgattccatggcagctgaccaaattatcgtcattagcggtgttctctgtggcatataacaacttatcaggatgtattccaaactctggtcagttcggcacgtacggtatggatagctaccaaggcaacagtaatcttcggagtatgtcaaagggaaacatatgctctccagattcaggagcaggtgacttgccatcggaaggaagagacagtatggcagatgatccagtgctctatgcaccggtcggtggggctagcggaagaggaggaggacggcatcacgatggtggccggcggctgccaaagatgggcctgggaaggcggcagcaaggcggaaacggcacgggcgtcgatggggaggcgggggtcgtcgacggcgggtgcgatgctgtcgaggtcgctcacctcgccgctaccgggatcttcgacctcgagctcacccgtgccgccactaccaacgcctcccgggcctctccgacagtccgaccccaaggtcgcacgcgccgccactgcctcccttctcaagcgtcgcagccgctgccgcttcccttctctcgtgtcgtcaccgtcgccgctgggctatcgccgaaagcaaatattctcgtcatgagatctccgcgtaaccgcgttactattgtcccacttggccttccagaacccaggtgcaaacgagtcttgctagctgaaattgagttgtttttggctcgcacgttttttgagttattaaacgattccaatatctccacgtcctcccatggctgcttcgtggaggagaggacggcgctgatggacatcggctcctctctgacgcgctcaaatggcacggcgccgcgttcatggggccgcggcgacgactgctgcttgtgggagcgcgtcaactgcagcaacatcactgggcgagtatcacatctctatttctcaaacctgtatgattctaatgaagtgctagatgcacacggtcactcgttttggcgtttcgacactacggtcttctcttcattcccggagcttcagttcctggatttgtccatgaacaatgctactttccagagctgggatggtttactaggattgaccaagcttcggtatctcaagctcaataacaactgcttgaatggtactatcccggcatctattgggaaattggtttccctggaagtcttgcatcttcagtttactggcgttggtggagtacttccgtcttcagtttttgaaagtcttcggaacctgcgggaattggatttaagttccaatcgactaaatggaagcattccatcattgttctcacttcctcgtcttgagcacttgagtctctcacaaaatctctttgaggggagtattcctgtgacaccgtcttcaaatattacgtcagcgttaaagacattcaatttttcaatgaataatttgagtgggtcattaggtccaatatggtatccccaaatgaatctacaagctatcagtcttcctatgaaccgtatctccggacatctaccggctaacatcagctcagtatttccaaatatgagttttcttgatgtttctagcaatacgatttctggagaaataccatcatcattgtgcaacattactagaatggaatacctggacctatcaaataacagtctttcaggagaattgcctaattgcttgctcactgaatatcctatactgacaaccttgaaggtctcaaacaacaaacttggtggccccatatttggtggtacgaatcatttgtcgatcaaacatgcattataccttgatggcaacaaatttgaaggaacactgccgcgatatctaacagcagatttcgatgctcatggaacattggatttgcatgacaataatttatcagtacctttttctttcttcaatagctctactgtcatggctttggatctcagtcacaaccaattcaacggaaacattgaatgggtacaatatctaggtgaa

SEQ ID NO: 53090 - DNA, 2680 bp, Oryza sativa
  Clone ID: PAT_MRT4530_55323C.1
atggcgctagggcgcgggcgaggcggcgggagcggcgggaggacagggatgacagccgaggggaggggcgcgtggactggatccacgggagtggggcccacgcggcagcctcgcggtccacggtggaccgggtgcacccggctcacaccggccggcgccgtgggtcccacgcgtcagccgcacccgagggcgcgggcggctgacggccgggccccacatggcagccgcggggcgcgcccgaaggcggccacgccggcacagccgacgggaggcggcgcacccgcgccccgatggtcgccgccggcgaccaccggcgcggcggagcggcgcccgagagaggggagggaagggggaaacgaatcggcggtccacagctcaccccgggtcgacggcgacgacgggaacggcgaccggagcggaggaaggcggcggcgcggctcgggtagacggggacggcggcgttccggcggtcggcgggcgaaacggaggggtggacgaggtcggcgaggttgcggcgaaaccgaaggaggcggcgccgaagcgggagaaggtccggggcgacgacggcggcagaccggagctcggcggcataatttctaggatgtattttagagtcattttgggacgcgacagttctacatcgtacacgtcgaagagggagtacaagatgatagaatgcgaagtctgctccacattacaaggggctactgccaagatgaaatggtccaagcacaagattgagttctcagaggcggaccacccaaagatcgcgaccacacccggcagatatccgatcgtggttgaacccaccattcggaacatcaagatcacctttgatgtcgcggaattcaataccgcacatgacgccatcattgggagaactgtgctcgtgaagttcatggcagcatcccactacgcttatcaagtactcaaaatgccaggaccaaaatggacaatcactacccagggagacgccaagttggcggtgcagtgcggcaagcggagcctcgacatggtcaagcatactcccaacccatccaccacgactgagctgcccaagaaagaactcgcattcatcatcttcctctgcgacaatgtagacgtgttcgcttggcaaccgttagacatgccgggagttcccagggtggtgattaagcacaagcttatggtgcgaccccatgctaagccagttaagcaaaaactgcgaagattcgcacccgatcgaaaacaagccatacgagaagaacttgacaaacttctcaaagctggcttcattagagaagttctccatccagagtggcttgctaacccagtaatggtacgcaaagccaacgggaagtggagaatgaacgtagatttcactgatctgaacaaggtgtgtcccaagtatcacttccctctacctcgaatataccaacttgtagattcgacagccagctatgagttcttgagttttcttgacacttactccagctaccaccagatcagcatagccaaagaggacgaggagaagacggcattcatcactcccttaggtgtgttctgctataccaagatgccatttggactaataagcgcagacaacacatatcagcgtaggatccagggggcacttggcgatcaactcagacgaaccgtcgaggcctacgtcgacgacattgtcgtcaaaactaaaacaagagactcgttgatcgatgaccaaagggaaacgtttgataacctccgacgatatcaaatgaagctccacccggagaagtgcacgttcggagtaccatcagggaaactactcggcttcctagtctcgagacgaggaatcgaggccaacgctaagaaaatcaaagcaatcgaaaacatgaagtcacccacaagactcaataaggtccagagattgaccagatgcatggcttcgctaagttgtttcgtcacaaggatgggagaacgaggacagccttttttcgccctgctcaagaagccggacaaattcgagtggacccaagaggccgagaacgcgttcatcgcgctcaggcactacttgtcaaacccccctatactcgttgctccacaacttgataaagaattatttctatatatcgctaccatgtcttattttgtgagtacggttattgtcattgagaaggaaagagtacaacacccagtgcactacatcagtgaggccctccatgatgcaaaaactagatacccacagattcaaaagctgctctgcgttgtgaccatgacgtcaagaaagctatgccactactttcaggcccacaaaactatcccagaagatagaccagacgatcaaacagataacgaaacttggactatggcgttcgatggcgcactcaacagccaaggagcaggagcagtattcgttttgacatttcccacgggagttcagttcaaacatgcaatccacctcaatttccgggcaacaaacaacacggttgagtatgaaggacttctcacaggaatacgagtagcttccgcactcggcatcaagcgactgattgtgaaaggggatttagaattagtcgcgaatcaagtgcataaagactacaaatgctctaatccagagttggccaagtatctcaccgaggtcgacttgatcgaagttcaacatgtctaccgcaaagacaacatcgaaccaaacaacctcgcacgacacgcgtcaagatga

SEQ ID NO: 53091 - DNA, 507 bp, Oryza sativa
  Clone ID: PAT_MRT4530_55324C.1
gggggaaaaagattttatttaaatttaaatgaccctaagtttcaaaaggcacacaagggggggggtggctttttttttaacaaaccaaccttttttttgtgccaatttaggcccaaacccccccaacagggggaattctccgggggacccttattataattgggggaaaaccccggaccggggggttaccccggaaattcgggacggggcccgggggggtaacaaattttccttaaaggggggggattaaaagctgggggaaaaaagggaaaaaattgtttccgggggaaaaattttttcccttaaaaattccaaaaaaaaaaaagcccggaagaaaaaagggaaaacccgggggggcctaagggggggccaaacccaaattaattggggggggccaaaggccccttttcaaaggggaaaacctggggggccagttgtataaaaaaaacgcccaaaccccgggggagggggttttggtttttgggccccagggggttttttttttta

SEQ ID NO: 53092 - DNA, 1032 bp, Oryza sativa
  Clone ID: PAT_MRT4530_55325C.1
atggcggcggctgcgcgcggagttcatctgatcgtgctcccctttggatttcgtccagtgaccaaaaaatacaaggtcacacacttccttggtgatagccgtaaggctcacccccgtgcaaaagacagcttctatgccattcaagttcacacacttggtgatgagaaatggaaagatgtaggatccccagaagctctaagcttgaactgtgtgaagaactctggagtagtcaacgttgatggaataatgtattggctaactgaagaccagggagctagttggcagcatgcagtcatctcctttgatcttagcagagaaagttttggacggatacaactgccaacagtagtacttgaagatttcgcattttatggtcctcatcagtactggatcaaagagatagatggaaaggtatgcatcgcaacatctcaaactactcaaaatcagcccagagagcttataggtgagattcagatctggactcttcacatccatctagagcaaaggtggatccagaagtacatgatccagtcctcaccgcagtgcattcttggaccaaatattttccatggggataagattttgtcgcaacaatatggtagcatcctatattcttgtgagttgcttggaaagaacctagaggttaaaatgagcaatgcagataggctgttagatttcacgccccgcaagccagggaacatgcaatcctacacctttgtgaaatcacttgtacggttagatgcatacaagaaggctagtattgtaactaggaagaatttccacacagtaaccaactggctgttgctgcgtcaaccggatgatgaagcattgaagtgtataagcatgagaattgatcaaatgttgcgttgtctatcagattgtccaaatcaggtagagctaacctgcctatctgcctcaaatcaagaaggtggtgacctcttaaggatgataacaagttatttacgcgatcaggtcgcaatctccttttacatgtttcgatctgatcccatctgcaacatacaaggaatttaa

SEQ ID NO: 53093 - DNA, 3186 bp, Oryza sativa
  Clone ID: PAT_MRT4530_55326C.1
atgggcaagcatacgtacgacgaagaagctcccaaaaggccgggggaaacagaagattgggccaaaaatttcttttggagattttgcaggaccgtgccaggctccgtcgcggacgccatcgagctcgacgttcccggcttcaactatgaggtcccggttatcgtcaagttgttggcagaatgcaccaagacgaagctgcttccaggcgccgttacggacgcgacgtgcgagttgcgacttgactgtatgcgatcgggctttgcatctgctcaagttgcttcctccgtatcgaatttgaaaagtgtgcacgcggaaaacgagggaaaggggttgggaaacttgtggaaagaacgcagcctaagagagtttctgattctagaaaaagattccaatatctccacgtcccatggctgcttcgtggaggagaggacggcgctgatggacattggctcctctctgacgcgctcaaacggcacggtgccgccatcatgggggcgcggcgacggtgacgacgactgctgcttgtgggagcgcgtcaaatgcagcaacatcactgggcgagtatcacatctctacttctcaaacctgtatgattctctggaagtgctaaatgcacatggtgactcgttttggcgtttcaacacgacggtcttctcctcattcccggagcttcagttcctggatctgtccagtatctatcccagttctctaaatatcgatggcttggtagggctgaagctgcccaagctacagcatctcaacctcagttataactggttgcaagagagtatcctcgcagatcttggggaactggtttcgcttgaagtcctagatgccagctccaacgccatgagtggagttgttcccactgcagttttaaaaaatcttacgaatctgaaggagctgaatttgagtgccaacggattcagcggaagccttccggggtcattacttgaactacctcaccttgatccctcaggaagttcgttagcaggacgtactccaattaattcatctttggagccagtttcactacaagtattaaatctcaacaacaacaggatgagtggagctcttccaaccgaacgagcattcggatatctaaggaacctacgagaattgcatttgagttccaataacttcactggaaacatttctactttcttgctttcacttccacatattgaacgattggatctctcgggaaatacttttgaaggacctatccctataactccatcttcaaatctttctctgtctctcaaaggtcttcggttttcccagaacaatctgagtggtaaactctcatttttttggctgaggaacctcactaaacttgaagaaatcaacttgtcagggaatattaatttagcagttgatgtcaatattcctggatgggcacctccattccaactgaaacagttagctctctctggttgtggtcttgacaaaggcataattgcagaaccacactttctacgcacacaacatcatttgcaggagcttgacttgtcaaacaataacttgtcaggaagaatgccgaattggctttttacaaaagaagcaactctggttaacctaaaccttggaaataactcgctaactggatctctaagtcccatatggcacccccaaacagctctacaatctattgttatatctaccaaccgtattacagggaagctacctgccaacttcagcgcaatatttccaagcttgtccactctggatttgtcagacaataactttcatggagaaattccgatgtcactgtgcagcatcaaacacatgaaggacttgagcttatcaaacaataatttttctggtaaaatgccgacttgtgtgttcactgattttcttgagctgtggaccttgagtgcctcaaacaaccagcttggaggtctggtgtttggtgggatgaaaaaactgtccatcgggtttgcaatgcacctacagaacaacaaatttgaaggaacactgcctcgtaatctgtcaggagcactagtaatcatggatttgcatgataacagcctgtccggtgaacttgacacctcattttggaatctgtctaaattgcaggtactagatctttctgggaaccatataactggcagtatccctcaaaaaatttgcagcttggcaagcattgaaattttagatctttcaaacaacaacttatcaggatctataccaagatgtgccagtgcatctctaagttcgcttaatctgtatgggaattcattatcaggaaacatctcggatgatcttttcaacacatcaaatcttatgtatttggatatgagacataataagttgactggtaacctcaattggttacggcatcttgataaaatcaagacactttcattgggatggaatgactttgaaggccaaatcactccaaacttgtgtaaactaaagtgcccaaggataatcgacttctcacacaacaaactctcaggctcactgccaccatgtgttggcaacatctcttgtgagagtgatacggcagctcaaaattattcaccattgctacttatttatgttataatagaggcttacataattgttcatgacccaatagacttcacctttgctacaaaagggggacaatatacatatggttacaacttcttcgatctgatgtctggtatcgacttatccgggaatatgctgtcaggagaaattccatgggagcttgggaatctgagccatatcaaatccctcaacctgtccaacaatttcttcactggtcaaatcccagcaagctttgcaaacatgagcgagattgaaagcttggacctttcccacaatgaactgagtggattgattccatggcagctgaccaaattatcgtcattagcggtgttctctgtggcatataacaacttatcaggatgtattccaaactctggtcagttcggcacgtacggtatggatagctaccaaggcaacagtaatcttcggagtatgtcaaagggaaacatatgctctccagattcaggagcaggtgacttgccatcggaaggaagagacagtatggcagatgatccagtgctctatgcagtcagtgctgcctcattcgtcctggcgttttggggcaccgttgctttcttgtttttccatccactcggacggcgtgcaattctcgcgacaaggaatttggtgttttggtgtggtcattaa

SEQ ID NO: 53094 - DNA, 968 bp, Oryza sativa
  Clone ID: PAT_MRT4530_55327C.1
atggctccgtcctactcactaagatgggaatcactcacggttgcggacatcgacaaaggcgcgcagcacgcgagcgaagaggaagacgagccgtcgcgaacgaacagggagcagtcgtgcgaaccgcttcccaaaaaccttattaccgccttcttcttgtgcatgacgtcgaaggcacaggttccgaagatctgctctcccgatcgccggtgcacgccggcgaacgggatggagccgaggcccagccaggctgcccgcctccctcctctcccggggtcgccgacaggccgcgccatcgccgccgtcgggttcgcgtggccgggatccaccccgtccacctctcctccgtcgaggttcgttgccggagccctcgttccctcgcactcggggcaccccgaagctcgtccgctcgccgacgtcgtcctcccgtggcttgccgtcaccgttcgccatcgtcttcctccgcgccggccaccctcggtgaggcatcccctcccctcttttccccttcctctcctcttagtgccgcgccgccgcttcaagtcgcgcgctgtcgccttcgaccgccgccgcctcgcgtgccgccggtcgctgccgtcgtcggtcgcatgcgtcgccggcaacgcgttcgcgcgcgcgtcatcgccgtcgccgcggtcggcaagggtgggcgtgatggagcggggcgggccctgcgacggcctctgtcgcttccggattcacctaggcacgagaggggactgcccgttgcccgctggggacgggggtgaaacctgaggtgtggtgtgcttggctagagggggttatgcgaagggtcctgtcacagtctctttccgatatgtcgtggtggcatgtcggcgcacgaaaacgtgtcgtggggctgtgtcttgtgggtacagttgtacacctctgatcagagtaaaactattcgaatagccgtgcccacggttatgggcggtcgaccagat

SEQ ID NO: 53095 - DNA, 428 bp, Oryza sativa
  Clone ID: PAT_MRT4530_55328C.1
tcaaccaacgccttccaaccctgggaagggaaggaaggcgaaaatgccgaaccagcaccaaccatgagctcctccaactccaatgctaatgggggcctcctcccaacctcccgcgaccgttagaagcagcggttaattcgccagggggtgcttcaacaacttgctgccctacaatggagccgcaaccccagcttacggccgatccaaccatgccctttccgcctccctcacctgccaaggagccgacttactcgaccttccgaacgccaagaccagcatcctccgttgcaccctaaaagccgctcgcgccttcttggggcaaacgaccaacccgccttctacctctaccgaccatggggcagggcaagtagaacatcctatgacggaggcgtaaacctggtccctgcttgcatggacgaccccttaag

SEQ ID NO: 53096 - DNA, 1313 bp, Oryza sativa
  Clone ID: PAT_MRT4530_55329C.1
gtttatcgccgccgctccgaccacttcactagggttttgcacgcggcggcggcggcggcgagatgctgcggcggaacacgcggctccggcgggagtacctgtaccgcaagagcctcgaggggaaggagcggcagcactacgagaagaagcggcgcctccgggaggcgctcgacgaggggaagcccatccccaccgagctccgcaacgaggagctcgccctccgccgcgagatcgacctcgaggacaaggactccgctgttccgaggagcctcatcgatgacgagtacgcgggcgcggcgctccgcgagcccaagatcctactcaccacctctcgcaatcccagcgcgcccctcactcagtttgtcaaggagctcaaagtcgtcttccctaactcgcaaagaatgaaccgtggtggtcaggtgatatcggaaattgttgagtcttgccgttcgcatgatatcaccgaccttgttttggtgcatgaacatcgtggccagcccgatggtttaatcgtctgccatcttccatttgggccaactgcatattttgggttgctcaatgtggtgacacgccacgatattaaagataggaaggccatgggtaaaatgtcagaagcgtacccccatttaatactagataacttcacaaccaagactggtgaaaggactgctaatattgtcaagcatctctttccagtgccaaagccagattcaaaacggataattactttcgctaacagagatgactacatctcattcaggcatcacgtatatgaaaaacatggtggcccaaaatcccttgacctgaaggaggttggccctcgattcgagttgcgactatatcagatcaagcgaggaactgtcgaccaagcggaggcgcaaaacgagtttgtgctacggccatacatgaacacagcgaagaagcaaaaatctcttggtgcctgattagcctgcaaggctgcaactgctgtagtacatcaattttgagtttctgtttcatccttgtaacgttagctcagtgtgtctaatgtatcctgctgtgataatggttccatcgaaatagttactgggtccaatttgttggattgtttttacacctctgctgtggattggggcccaataacggccaatttttgtagaaatggcagcccacatcatgcaagatagaacttccaaaatcatttaaaggaatgttttactgatgttataattgatgaatctgaatgcatcagattcagagtatgacacaagatgttagtttttaaaaaaaaaaaaaaaaaaaaaaaaaaaactcgaactagttcttcctcgtgc

SEQ ID NO: 53097 - DNA, 378 bp, Oryza sativa
  Clone ID: PAT_MRT4530_5532C.1
atggctgaccacatgtcatctatgcacataatcgcaaaaaaaaatgtcatctatgcacatcataaattgccggtggtgcgccgcgccgctgccacaagtgagggaggggaggcctatgctgccgtcgccacacggccacaacccgtgcttcccgatgaagccccctctgccaccaccctcttccttgaccccgtcccacgcctccgcgtcctccctagtgccgtcgtgcgcgcgggagcctcgctgcactctggctacgtggaggtccgactccagaatcccgtatctaacggcacggcagcattcgctccactgcagttcgtcctttgtcgtttgtcccagaagcgcatcgcccagtcgttcaacccacgtcgctag

SEQ ID NO: 53098 - DNA, 426 bp, Oryza sativa
  Clone ID: PAT_MRT4530_55330C.1
atggagccgggaagcatagccgagcgtttcagagataggagcatactcatcaccggctctactggctttctggcaaaaatgctggtggagaagatacttcgaattcagccggacgtgaggaagctttacctgctggtgcgtgctccggacgccgcagccgccaaggagcgtcttctcactgaagttgtaggaaaaggactatttgatgttctgcgagaacaacacggtgcatctttccactctttcatcaaggaaaaagtatgccctttacctggagacatcacgcatcaaaactttgggcttggaaactctgagatcctacggttatcccaggatgtcgacatcatcgttaatggtgctgcaacgaccaactttatggagaggaaggttaatgagaccttaaacctcttggaaaattttctttag

SEQ ID NO: 53099 - DNA, 162 bp, Oryza sativa
  Clone ID: PAT_MRT4530_55331C.1
atgcggagggcggtggaggactgtggccacgccgagtttgtcggagaaaacggacactggtcacttgtcgtcaccaccgctcccctccttcgatccgacctccgtcgtccctcgcctctggtgaacaaggcaacggcgacggcgtcggcgtcctcaacctga

SEQ ID NO: 53100 - DNA, 1308 bp, Oryza sativa
  Clone ID: PAT_MRT4530_55332C.1
atgcgccaaattgacatcgaggctcacccctcggggagacttaaagaggggcggtcataccaccctcgggcccgacccccccgagggggtcaggccacgtgggtgatcgcgcctgctcaatcctctagtcatgatactcccggtcccatgtcaccgacaaagccgatgatcaaagatgttaaggttgaaattgcagcaataacagccgatgattggaggaaattaagatataaggcgttgaagtacactctattggatgatgagctttattatcggacgattgatggagtgttacttaagtgcttgagtgtcgatcaggctaaagttgcaatcggcgaagttcatgaaggaatttgtggcactcaccaatcggcccataagatgaagtggctacttcggcgtgcaaggtatttttggccgacaatgctggaggattgcttcagatattataaggggtgtcaagattgtcagaagtttggggcaattcaacgagcgccggcatcggctatgaatcctattattaaaccgtggccatttagaggttggggaattgatatgatcggtatgataaacccaccatcaagtaaagggcataagtttatattggtggcgactgattatttcaccaagtgggtggaggccattcctttgaagaaagttgattctggggatgcaattcaatttgttcaagaacatataatctaccgatttggtattcctcaaactattacaactgatcaaggttcaatctttgtgtctgatgagtttgttcagtttgccgatagcgtgggtatcaaattgttgaattcttcaccatattatgcacaagctaatgggcaggctgaggcatctaacaagagcttgatcaaattaattaagcggaagatttctgattatccttggcaatggcatacccggttggccgaagcattgtggtcttatcggatggcttgtcatggatcaattcaagttcctccttataagcttgtttatggacatgaagctgttttgccatgggaagttagaatcggctctagaaggatagagttgcaagacggtttgacagccgatgagtattataaccttatggccgatgagagggaggacttggttcaatcgcgtttacgagcccttgctaaggttaccaaagataaggaacgagttgctaggcattataacaagaaagtagtgcctaaggatttttcggaaggtgaacttatatggaagttgattttgtcgattggaactcgggataacaagttcggcaagtggtcaccaaattgggaaggaccgtttcaaatctttaag

SEQ ID NO: 53101 - DNA, 1092 bp, Oryza sativa
  Clone ID: PAT_MRT4530_55333C.1
atggagaagccgatgatggacacgggaggggggatgattgagcggaccaagtcggaccagctggcgccgccgccgccgccgtcgtcggcgcagtcgctgagcaggacggcgtcggcggagacggtgctgagcacggccgacgtgacgacgacgacgagcctgtcgcgcaagtccagcttcgggaagcgctcggcgtccggcggcgccggcgccggtgggaacagccacggctacagcagcagcaacaacaacaacagccacatccgcaagtcccgcagcgcgcagctgaagctcgaaatggaggacctcgtctccagcggcgccgccctcagccgcgcctccagcgccagcctcggcttctccttcaccttcaccggcttcacccctcctccccaggacaccatgtcctccgccgagctccatcccttcagcgacgacgacaacacgatggacatcgaggccgggacgccgcgcaagaagctgatgaccgagccgacgttgccgatatatctcaagtttgcggaggtgaagtacaaggtggcggtgaagggtacgccgagggagatcctgagcgggatatccgggtcggcggcgcccggcgaggtgctggcgctgatgggcccgtcggggagcggcaagacgacgctgctcagcatcctcggcgggagggtcgccggccccggcgacgtcgaaggctgcgtctcctacaacgacgagccatactgcaagtccctcaaccgcaggattggatttgtgactcaagatgatgttctttttactcatcttactgtaaaggagacattgacttatgcagcactgcttcgtctcccaagaacaatgacgaggcaagaaaaggaagaacgaacaatagacatcatatatgaacttggccttgaaaggtgccaggacacgatgattggtggatctttcgtccgtggggtttcagggggtgaaaggaaaagagtttgcattggaaatgagatcataataaatccatctttactctttctcgatgaaccaacatctggattggattcaactacagctctcaggataattcaacttctacatgatatagctgaggtgacatga

SEQ ID NO: 53102 - DNA, 2757 bp, Oryza sativa
  Clone ID: PAT_MRT4530_55334C.1
atggcgaccaccgccgccgccgccaacctcctcctcttctcagccgtgttgctcctcgccacgccgtcgaacgccgcctcggcggcagcgccggcggtggcggcgatgccggtgcagccgcaggagctgctgctcagcttcaggtcctccctgaacgacccgtccggtgccctgtcgacgtggtcgcgctccacgccgtactgcaactggtcgcacgtcacctgcaccgccggcggcggcggcggcggcgtcgcggtcggcctgtcgctgcagggcctcggactctccggggacatcgccgccgagccgctgtgccgggtgccggggctggcggcgctcagcctcgcgtcgaacaccttcaaccagaccgtcccgctgcagctgtcgcggtgcgcgttgctcgtgtcgctcaacctcagctccgcggggctctggggtccgctccccgaccagctcgccatgctcgcctccctcgcgtcgctcgacctcagcggcaacgacatcgagggtcaggtgccgcccggcctcgccgcgctgcgggggctccaggtgctcgacctcggcggcaaccgcctctccggcgtgctccacccggcgctgttccgcaacctcacgaagctgcacttcctcgacctgtccaagaaccagttcctggagtccgagctgccgccggagctcggcgagatggccggactcaggtggctcttcttgcaggggtcagggttcggcggcgcgatccccgagacacttctccagctggagcagcttgaggttcttgacctctccatgaacagcctcaccggagctctgccaccggcgttcggccacaacttccggaagctgctgtccctcgacctctcgcagaatggcttctccgggccgttccccaaggagatcggcaagtgcgtgatgctgcagaggttccaggtgcagggcaacgggttcaccggcgagctccccgccggcctctggtcgctgccggacttgcgggtggtccgcgccgagagcaaccgcttctccggccggctccccgagctgtccgcggcggcgtcccggctcgagcaggtgcaggtcgacaacaacagcatctccggcgagataccccggagcatcggcatggtccgcaccatgtaccggttcaccgcctccgcgaaccggctcgccggcggcctgccggacaccctctgcgactccccggcgatgagcatcatcaacgtctccggcaacgcgctctccggcgcgatcccggagctcacgaggtgcaggaggctggtgtcgctgtcgctgtcgggcaacgcgctcaccggcccgataccggcgtccctcggcggcctgccggtgctgacgtacattgacgtgtccagcaacggcctcaccggcgccatcccggccgagctccagggcctcaagctcgcgctgctcaacgtctcctacaaccacctcaccggccgcgtcccgccgtcgctggtctccggcgccctccccgccgtgttcctccagggcaaccccggcctgtgcggcctgccggcggacggcggctgcgacgcgccggccgcgccgccgtcgagaaaccgcctcgcgctggccgcaaccgtggcgtccttcgtcaccggcgtgctgctgctgctggctctcggagcgttcgccgtctgcaggaggctgcacgccgccgccaagctggtgctcttctacccgatcaagatcaccgccgacgagctgctcgccgcactccgcgacaagaacgccattggcaggggagcattcggcaaggtctacctgatcgagctgcaagacgggcaaaacatcgcggtcaagaaattcatatgctcaagcaaccaaacattcggagcagtgaagaatcacatgaaaactttcgcaaaaatccggcacaagaacattgccagattgctgggcttctgctacgactcccatggcggcggcggcgaggtgagcgtcatctacgagcacctgaggatggggagcttgcaggatctgatacgcgcgccgaagttcgcggtggggtggaacgacaggttgaggatcgcgatcggagtagcagaagggttggtgtaccttcaccgtgattacactcctcgctttctgcatcgcgatctcaagtcgagcaatgtgttgctgggtgatgattttgagcccagagttaccggatttgggatcgatcgtgtcgttggcgagaaggcgtatcgatcttcgttggcttctgatctgaattacagctgctacatcgctccagttatacatttcacccagaagcagaatttcattaggatagctatttccacagcagaattgcactcaagatttcataaaactctggctctctgcgcacttatcccactgaagttgtttgctcttttgctgaaaccagaggtaaactgcaccaagaaaccaacgcacctcatggacgtgtacagcttcggcgtcatcctcctggagctgatcaccgggaagccggcggggcagccggcgtcggacgactcggtggacatcgtccggtgggtgcggcggcgggtcaacgtggccggcggcgcggcgcagatactcgaccccgccgccgccgtctcccacgcggcgcagcaggggatgcaggcggcgctggagctcgccctgctctgcacctcggtgatgcctgaccagagaccggccatggatgaggtcgtccggtcgctgcagctgctgcattcgccgcagactctgccgccaccgccgccgttcaccggagttgctgtggaaccttga

SEQ ID NO: 53103 - DNA, 381 bp, Oryza sativa
  Clone ID: PAT_MRT4530_55335C.1
atggcctccggcctggtccgccttgcccttgagtgcgaaaaggcggcgccgccgaccaacccaggcgagaagcggcggcgggcggcgctgatggaggagacgacgtggcgggcgtactgcaacgggcgcaagtgcgggtacgcggtgcgccgcgagtgcggcgccgaggagtggcgcgtgctgcgcgccgtcgagccggtcaccgtcggcgccggcgtgctccccgacggtggcggcgttgccggcggcgagggggacatgatgtacatgagagcgaggttcgagagggtggtggggtcgagggactcggaggcgttctacatggtcagccccgacggcaacgccggcccggagctcagcatctacctcctcagagtttga

SEQ ID NO: 53104 - DNA, 2718 bp, Oryza sativa
  Clone ID: PAT_MRT4530_55336C.1
atggtgtctctattcaatttgagcctcgcgaacaacttgctccatggaaacataccagaggaactaggttctctacagaatctcgagtatttggatttatcattgaacaacctaagcggaccaatacagggatcaattgagaactgtttgaaacttcaatcactaaggctgggacataatcacctcggaggaagcatacctattaaactagggatgctgacataccttcaagaattgttggatttaagtgacaattcatttgccgggatcataccaagtcagctgagtggtttgaacatgcttgaagccctcaatctttcacacaacacattaaatggcagcataccaccatcatttaagggtatgatcagcctctcatccatggatgtgtcttacaataatttggaagggccagtgccacacattaagttcttggaagaagctccagttgagtggttcgtgcataataaacacttgtgtggtacagtcaaagctttaccaccttgcaaccttattcagaaaggtggcaaaggaaagaaattcagacccattttacttggtatagttgctgctgctggcatatctattgtgttcatcacagcactagtgacatggcaacgcagaaagatgaaatatggggagcaaagtgaaaatggagttggaaacacaaaagtgttttcagtctggaactttgagggaggagatgcatgcaagcagatttttgaagccacagagaatttcaatggaactcattgcattggtatgggaggaaacggatctgtctacagagctcaattgccaacaggcgagatatttgcagtaaagaaaattcatatgacggaagatgacgagctaatatttaagcgggaagtagatgctttgatgagtattcggcatcgaaatattgtgaaactctttgggtactgttctgcagttcacgtcaaatttcttgtctatgaatacatggatagaggaagcttgtcaagatatttggagaaccataacactgcaattgagttggattggatgcgaaggataaatattgtaaaggatgttgataatgctttgtcttacatacatcatgattgctttgcacccatagtccatcgagatataacaagcaacaacattttgcttgatctggaattcagagcttgcatatctgattttggtatcgccaaaattctagatgtagaggcatcgaactgcacaaagcttgctgggacaaaaggttatcttgctccagagctagcatatacaacaagggtgacggagaagtgcgatgtttacagctttggagtgctcgtctttgagctgttcatggggtgtcatcctccccttccgaccgttgccgccgccgccgccgccgggatgccacctcgccgccgccgccgagtccggccgccgctcccaccctcccctcccctcctctcttccaccaccgcaacaccaccgccaaccccgcccgtgggcacccccaaatccgaggccgccgaccgccgccctcctcccgcccgccgccgcctccccctcgtctccgccgccgccgtcgaggaggaggacggagagtggcaccccctgccgctctccgccgccgacctgtccctcccgctcaccctccccacggggcagaccttcctgtggcgccgcacgtctctctccccgctccgcttcaccggcgccgtggggcctcacctcgtctccctctcccacctcccgtcctccgacggccgcctcgccttcctcctccacaacaacggcggctcctcctcctcctccgtccccgcggcggcccgcgccgcgctctccgactacctcaacgccgccgtgccgctcgccgacctctggcgccggttcgccgccgcggacgcgcggttcgcggaggtctccgcgcggctcgggggcggcggcgcccgggtgctcaggcaggaccccgtcgagtgcgtgttccagttcctctgctcctccaacaacaacatcgcgcggatcgagaagatggtgtgggcgctggccggctacggggagcggctcggcgaggttggaggataccaattccaccaattccccacgatcgagcggctcgcgcgcgtgtcggagcaagagctccgggatgccgggttcgggtacagggcaaagtacatcgtcggcactgctaaaatattacaggccaagcctggtggaggcgagaaatggcttgcctcattgcgtacaagggaactcccggaggtgattgaggctctttgcacccttccaggtgttgggccaaaagttgcagcctgtgttgctttgttctcactcgatcagaaccatgctattcctgttgacacacatgtctggaaggttggtgttccatacctttatgatgctttggtggttagtaccttacaacgaggcgttcaaatgccgagtaggtacggactgctgtgggcacatccacgatagaggagcacattcagaaaactggctgtgatttcgtattctatcctgtaccagctacctaccatggttttgagaagtgcccaaatttaattcttgccgacagactttctggtctctaggttgttttgcattggaagattattatggttggagggattagttccctaacacagccttatatgacacaaatacacgctatggtttatgtctgaagacctcaaacttgtacagagagttatacatacatttgcatatatatacaattcgaaagtgaatgct

SEQ ID NO: 53105 - DNA, 1665 bp, Oryza sativa
  Clone ID: PAT_MRT4530_55337C.1
atggcttcgccggagctcgccgccggcgatggcagctacaacttccacctccgctccctctccgccgcatccagggactccgccgcggccgccgaccccgcctccgaccccatcctcctcgaatccgtaaggagggtgtgcgagatgtgcaagaaggccaaggggcccagcgacgagatggtggcccgggcgttccctgtgatgagcaagctgttccagcgctgcgccgccgcgccgacccaatccgtggcctccagcggcgtgctgctactcaccattctgcagttcttcctggactttggggaggcagtcctgcatgatgctgatggtagcttgaggaccttcttccgctcttgcctaagtagggagttcgctgatcctattgtcgcagaacgtacacttgaattcctgatagcgaataagacaaagatcctgagctcttttcccacattaattccacagttttttccattgttgctgaagctaattgcatcaaatggtgagagattggagaggaagttctcagaagtgcttccgttaatgatgtcagcaggatcttttcttcctctcttcctgtcccttatggatcttccaatgttagtggtagcattggaaaaggtggaaagaagttctggaactctcatcggtagtagtatagctactatacagaagagtgctgctcctgagatgctacttgcactaatggatgaagcatacactggttctgctatagaagatgccattggcaatgcaggttcggatgatagtggtcctctagaccttgctgacccgatgttccttgatcttctaaaagatgagaatgatggtattgctgcagcagttaatagcccacaatcggacagattgaaacagtcactgaaaatggcacctcgttttcttacattatattttgctacagcattgcgggacgttaacgactcactcctatgcgctctgattcctgtagttatgtcaagatatgcagcaatgttccctgacaaagtatactccttcgaggtgaggaaaagactttcagatttcatattggctgcattccagcgctcccctgacatcattgcactgctaaagactgaattagcattgcatttgtgttgggccattggtgagcatggagctggaggaaaaaatcgcaaagatgtagctcgtgaactgtttgaaaatttggagttgctgttatatgaaaatctggctaccagtcgtttgggattaagtcaggacacaggatttgatcctatgggtgcatcttctagaaaatcatctcaagctaggctcctctgctttgtggtgactgccatagcaaagctagcaacgttccataatgagttgcttccaagagcacgtgtatcattggccaaggtaggccctaatccttccagtttgaggaatattaaggtcgctcgttcccgaacctcggacaggagagtgtggcaacgtgcttgtgactatttaggtctattgaatgaaccggccatttgtttatctgtactaggaccatccaccgcacaaggaaatggtcctggtattgtcaactggagtgaaggaggaacaaagatggtagctcacattccgttctacctgttagctgaacaaaaaggtgcaccgatccatgatttttcgtttgacgatctcgtccccacggaatga

SEQ ID NO: 53106 - DNA, 1812 bp, Oryza sativa
  Clone ID: PAT_MRT4530_55338C.1
tgggcctagtttaatgggctctaattcggctgaggcccatcatacgtccccatctgtaaactcactcgttcgtcggaggcgacggccatggcttcgccggagctcgccgccggcgatggcagctacaacttccacctccgctccctctccgccgcatccagggactccgccgcggccgccgaccccgcctccgaccccaacctcctcgaatccggggggtgggatgtgctcacgttttggcttgttgactcgtgtgggctttgcggcgtgaaggtgaggagggtgtgcgagatgtgcaaggaggccaagggggccagcgacgagatggtggcccgggcgttccctgtgatgagcaagctgttccagcgctgcgccgccgcgccgacccaatccgtggcctccagcggcgtgctgctactcaccattctgcagttcttcctggactttggggaggcagtcctgcatgatgctgatggtagcttgaggaccttcttccgctcttgcctaagtagggagttcgctgatcctattgtcgcagaacgtacacttgaattcctgatagcgaataagacaaagatcctgagctcttttcccacattaattccacagttttttccattgttgctgaagctaattgcatcaaatggtgagagattggagaggaagttctcagaagtgcttccgttaatgatgtcagcaggatcttttcttcctctcttcctgtcccttatggatcttccaatgttagtggtagcattggaaaaggtggaaagaagttctggaactctcatcggtagtagtatagctactatacagaagagtgctgctcctgagatgctacttgcactaatggatgaagcatacactggttctgctatagaagatgccattggcaatgcaggttcggatgatagtggtcctctagaccttgctgacccgatgttccttgatcttctaaaagatgagaatgatggtattgctgcagcagttaatagcccacaatcggacagattgaaacagtcactgaaaatggcacctcgttttcttacattatattttgctacagcattgcgggacgttaacgactcactcctatgcgctctgattcctgtagttatgtcaagatatgcagcaatgttccctgacaaagtatactccttcgaggtgaggaaaagactttcagatttcatattggctgcattccagcgctcccctgacatcattgcactgctaaagactgaattagcattgcatttgtgttgggccattggtgagcatggagctggaggaaaaaatcgcaaagatgtagctcgtgaactgtttgaaaatttggagttgctgttatatgaaaatctggctaccagtcgtttgggattaagtcaggacacaggatttgatcctatgggtgcatcttctagaaaatcatctcaagctaggctcctctgctttgtggtgactgccatagcaaagctagcaacgttccataatgagttgcttccaagagcacgtgtatcattggccaaggtaggccctaatccttccagtttgaggaatattaaggtcgctcgttcccgaacctcggacaggagagtgtggcaacgtgcttgtgactatttaggtctattgaatgaaccggccatttgtttatctgtactaggaccatccaccgcacaaggaaatggtcctggtattgtcaactggagtgaaggaggaacaaagatggtagctcacattccgttctacctgttagctgaacaaaaaggtgcaccgatccatgatttttcgtttgacgatctcgtccccacggaatga

SEQ ID NO: 53107 - DNA, 2245 bp, Oryza sativa
  Clone ID: PAT_MRT4530_55339C.1
atggtgctcactcgcagcaacgggaatggccccaacagcaacaataacaacaacaatggagagaacccaacacttgctcaagttcttgctcaacagactcagttaatgaacatgatgatgcagcaacttcagaatcagcaaaaccaaggaaataaccatgcacctccccagaacaagttagcagaatttcttcgtgtgaggccgcctattttctctagtaccactaatcctgttgaagctggtgattggttgcatgccatagagaagaagatggatttgcttcagtgcactgatcaggagaaggtctcatttgcatcacatcagttgcttggccctgcctctgaatggtgggatcacttccgcctgaataggattactgctgaacctattacttggcttgaattcaccgctgctttccggaagacgcatataccatcgggagtggtgtctctcaagaagaaggagttcaggtcgctcacccagggatctcgctctgttacggagtatctgcacgagttcaatcgtcttgctcgttatgctccggaagatctgcgcaatgatgaagagcgccaggagaagtttttgggaggacttaatgatgagctttcttacccactcatggttggagattatcctgatttccagaaattagtggataaggctatacgtcaggaggacaagtacaatcgcatggagcagaagaaacgccggattgctcacttcaaggcacaacaggggagtaatcagaagccgcgtcttactttaggaccccagtctgtgccacagggaggttcttcgtccattgttcgtccgcagcgtcagttcttcaacaacaatgctggcaacaacatccgtaatcaagtcccacgtcctgttgctgcctcgacacagcaacaacctgccaagaggaagcaaggcagcaagcccgtggtgtgtttcaactatggagacccaggacattatgctgacaagtgtccgaagccccgacgcgtgaaggttgtccctgcccagaataactctgctgtaccagcatcaaaggcccgtgtcaatcatgttgctgctgcagaagctcaagatgctccagatgtgattttggaccttgacgtcattctagggatggactggtcaagactgaaccagataactttgggagagattcctatagttcgggagtatcccgatgtgttcccagatgatttacctggatattatcgaaggtttatagagaatttttccaagattgctaagcccatgacacgcctgcttcagaaatatgtgaagtacaagtggtcggaagaatccttagaagcgaagcccacactaattgatcaagttagagaagctcaaattagtgatcctgatattcaagagatcaagaagaatatgagaagaggaaaagctatcggtttcttggaggatgagcaaggaactgtatggttgggcgagagaatttgtgtccctgacaacaaagatttaaaggatgcaattctgaaagaagctcatgatactttatactccattcaccctggtagtactaagatgtaccaggatctcaaggaaagattttggtgggcaagtatgaagcgtgaaatcgcagaatacgtagcgccgtcgccgtcgctcgggaagaccaccgtcgtgctcgccaagtcgtcgccgtcctcgtccgcctcttcgctgtcgccggagatcaccggagcagcatcgccgtcgtcgacccgaaggttcccgccgcttcctcctcgtcgccgtcgccgtctgttggtcttccgccgccgtttaggtcaccggtgagttcgccgtgttgtcctctacgtcttggtgccctccgtttgcgtcctcgcgccgccgttcgccggcgagcgtgcgccgttcgagccgtcttctccgccgagccgccgccgctgtcgctgacgtcgtcgctgatgtcatcggggtcgtccgccgtgagccgccgtggacccgatcgatctcggccgtccgttttggatggatcgatctcggccgtccgttcgcgtgaaccgccgcccgtgcgcccggtccacccaaaccctagccgctgacgcaataaatccccttttccttgcaatcattcatcagaggaagagttctacaatgaggctgatggtgtggaggattaggtgtagccttggtcaagctgcctgtggagtggagccgtctgcgccgtttatttattttccgctgcttagatctttattgattgagaggaactatctacctctgt

SEQ ID NO: 53108 - DNA, 569 bp, Oryza sativa
  Clone ID: PAT_MRT4530_5533C.1
agccttttgtcaacacaaagttattataagaaaggatctagatttgagtggagtcgtgtcagatgtggacatattctgtattttgggtataaatatgtgcccgataccttgtaatgaattaacaccagttcaatacactttcggcacatcgccacctttttctactttcattgtttcgacgagttcttgctttcgagttgggctgcatcagttaagatctctgacgagaggtaaaacttgttgtataaattatatgatgttaacatctacagccgataaagtgaatttagttctttatctactatacgcttcactgtcgatccaaattatattgcattggcttgatactagacgatacttcatcggcaatccagccaatcggctatcgtttatggtatgtttcttgtcgatttaaatgttgcagaatctttggacctgcactagagtaaagcaaatctctcaggccagtgtgtgttttttgcatcaacagacggctaccccaaacagcccaattacgggagacttccgcgcgtggatccggcggtggcagcggcgttggcttctcccgt

SEQ ID NO: 53109 - DNA, 2739 bp, Oryza sativa
  Clone ID: PAT_MRT4530_55340C.1
atgcaccacggcggcggcggcggcgcgatccgcgtgctgaatgtggcggagaagccgtcggtggcgaagtccgtcgcggagatcctgtcgcggccgtcgggcgggatgcggtcgcgggaggggcggtcacggtacaaccgcgtcttcgagttcgattactccatcggcggccgcgcctgccacatgctcgtcacctccgtcacggggcacctcatggagctcgagttcgacgaccggttccgccgctggcactcgtgcgaccccgctgatctcttccacgcccccgttcgcaagtccgtaccccagggtactgcacttaaggaactctattctagggttcttcaggagcttgatcgggggacatcgcatgattgctactcgtttttgaattgggaaccactagtgctgctggtcatttgcactgttgcgcagcagcaatctggttccagtcatatacgtctaaaaattagtaaactagaggcagaagttaaacagatatacaagtttcctctcattcttccgttcttccagcatcaggagaacaagatgctactctttttgtcggttgcactgccacaaccatgctggagcttgcttgttgataagcaagacataaaaagaacattggaagaggaagccaggaagtgtcagtggcttgtgctttggcttgattgtgatagagagggtgagaatatcgcatatgaagtgattgatatatgcgcaggtgccaacagccgcctcaacatttggagagctcgtttctcagctttgattgacagggaaatccatgaagctgtgcaacatcttgacagacccaacaagctctttgctgatgctgttgatgcaagacaggaaattgaccttcgcatcggtgcctccttcacaaggttccagacaatgctgctgaaagatgcatttgttcttgatgacactggtgatgataggaatataattctgagttatggtccttgccagtttccaaccctaggatttattgttgagcgtttctgggagattcaagctcatgaacctgaagagttctggacaataaattgttcccacacttcagatgaaggcactgcatcttttggttggatacgtggtcatttgtttgattactcatctgctgttgtgatctatgaaatgtgtgttgaagaaccaatggcgacagtgcaaaatgtaaggaatcaagagaaactaaaataccccccatatccactaagtaccatagagcttcagaaacgtgcctctaggtacttcagaatgagttccgagcacacaatgaaggtggctgaggaactttatcaagctggatttattagttatcccaggacagagactgataacttctctccaaacactgacctacattccatcgtacatgaacaagtggctcatccaaattggggaacatatgctcagcgtcttttggatcctgaagcaagactttggagaaaccccagcaatggtggtcacgatgacaaggcacatcctcctattcatccaacaaaattttcagctggggaaacaaattggactgataatcacaaaaaattgtatgagcttgttgttcgccatttccttgcttgttgctcccaacctgcagttggagctgaaacaactgtggaaattgacattgctggtgaacagttcaatgcatcagggcgcgttgttcttgctaaaaattatttggacgtatatcggtttgactcatggggcggtacattacttccgacatacatcattggacaacaggcaggaattggcactgatgcaacgatgcatgatcacataaaaaagttacttgaccgttgttatgcaaccaaagatgcaaatacacggttctccccaacaaatctaggcgaggcattggtgatgggttacgatgaaatggggtatgagctttggaaaccttatttaagatcaatgatggaagctgatatgaaatcagttagcattggtacaaagagtaaatcagaagtacttgagaattgtttgcagcaaatgaaggcttgttttcttgatgcaagggcaaacaaggtgaaactctttgatgcaatgggaacattctttgcaaggtcaagtagaccggtcaatgagacacagaactccatagaaactgtgagaccatgtgctgcatgcaatgaatctgaaatgtttctgaagcaaaggccgtgtagaaatgtagtttggctcccacgatctctttcaggggctgctgtgactgatcaagtttgtcctacctgtgctccaggtccggtttataagattcaatttaagtttcggcgaagggatattccaccaaattttgatgtcgatcacctcggttgtattggtggatgtgatgacatactcaaagagctcatggaattaagtagatttggaagtcatagccagactgcaacaccagcaagaaatcagagccagactgcaagtggtgtaaggcaggggtcttcaaggcaagatttacatactagctttcatccagccgtgcaatttactaacggacaaacacctgttgtgaatcctcaaggttttcgttcaacccatacccaaagctcaggaaatgcatcagatgggaagacgatgtggagaactctgcgccgaggggccgtggcgggcgtgggcggggcgggcgcagtagcagcaggcaatcatctgcatctgcatctgcagggcggagaggcggcacccaagggcgaggcaggaggggcagaggacggaatgctgatggcatga

SEQ ID NO: 53110 - DNA, 5167 bp, Oryza sativa
  Clone ID: PAT_MRT4530_55341C.1
aaggtgcgctgtagtggattgtgttgtgcgaggggtactgtcacagctcctttccgagctcctggtttggaatggtatattcctggtttggagttagaactgtgcagccgggatggttgttcggaatggttgggcctatgcaacaggatgccgcgctacaagcctgagtacttgtttggtgttgagggatttgtccaggagttgcgtacgatgtcctatgtcataggatttgggactgcccctttttatgcctagattactcatgatcgtcacgaagagaagtgccgagtcaaagtcaccttgaacagtaatagtgaagatatcccctcagtgatgttcgaagctggaggaagaaactacatccatgcgtgtcaggaagtggcaaggatcgccataggagagctccgcgatcgctacagtgatcagttggccgacactgagtatcgctaccatcctcgccaaccccagggaagtgactgtggcagttaccttgagactgaggggattgagaatgatgctaccacaaggcatttggttgagatgctgtgggctatggatgaaacccgtgcggagactgtgttagcagctcaagatcgtgaagaccggaatcgtggtaagatttgcaagctagaggacaaggtggatcgtttggagaaggaactagccgcgttgaagggagaagcaccaccgcagaaggccaggattcgtcttaccgcaaggaagagagctctatttgtccctcgctaccaattggcgccaaagatggtgctcactcgcagcaacgggaatggccccaacaacaacaataacaacaacaatggagagaatcccacacttgcccaagtcctggctcaacaggcacagcttatgaacatgatgatgcagcaactccagaaccagcagaaccagggaaataaccatgcacctccccagaacaagttagcagaatttcttcgtgtgaggccgcccactttctctagcaccactaatcctgttgaagctggtgattggctgcatggatttgcttcagtgcactgatcaggagaaggtctcatttgcatcacaccaactgcatggccctgcctctgaatggtgggatcactttcgccttaacagaactactgccgagcctatcacttggcttgaattcaccgctgctttccggaagacgcatataccatcgggagtggtgtctctcaagaagaaggaattcaggtcgctcacccagggatctcgctctgtcaccgagtatctgcacgagttcaatcgtttggctcgttatgctccggaagatgtgcgcactgatgaagagcgccaggagaggttcttggaaggacttaatgatgagctttcgtacccactcatgactggggattatcatgatttccagaagttagtggataaggctattcgtcaggaggacaagtacaatcgcatggagcagaagaaacgccggattgctcacttcaaggcacaacaggggaatagtcagaggccgcgtcttactttaggaccccagtccatgccacagggaggttcttcgtctgttgttcgtccgcagcgtcagttcttcaacaacaatgctggcaacaacatccgcaattaagctccacgccctgttgcagctccaacacagcaacagcctgccaagaaggagcaaggcatcaagcccggggtgtgcttcaactgtggagacccaggacattatgctgacaagtatccgaagccccaacgcgtgaaggttgtccctgtccagagcaactctaccgcacaagcatcaaaggcccgtgtcaatcatgttgctgctgcagaagctcaaggtgctccagatgtgattttgggtacgttccttgtcaactcagttcctgcaacagtgcttttcgattctggtgctacacattcatttttatccatgagttttgcgggaaatcatgggatggaagtagaagatcttagacgtcctttgatggttagtaccccaagtaatcaagcactctctttgcaacgtagcccctctgtcagaatagaaattcaagaagtaccatttctggccaatcttatcttgttagaatccaaagaccttgatgtcatcctagggatggattggttagccaggcataaaggtgtgatagactgtgccaacagaaaagtaactctcaccaacaatgatggtcgagttgtaactgttcacgcattgtcttctgaatctttaaggtcaagtctgaaccaaatagctttggaagagattcccatagtacaggaatatgccgatgtgttcccagacgatttacctggtatgccgcctaaaagggatatagagttcagaatagatttggtaccaggaaccactccgatccataagcgaccatatagaatggcagccaatgaattggcagaagtcaaaaggcaagtcgacgatttgcttcaaaagggatacatcagaccgagttcatctccatggggagcccctgttatctttgtagaaaagaaagaccatacccagaggatgtgtgtggactatcgcgcactaaatgatgtgactatcaagaataagtatcccctacctagaattgatgatttgtttgatcagcttaaaggtgccaccgttttctctaagatagatcttcgatcagggtatcaccagttaagaatcaaagaggaagatatacctaagacagcttttaccactaggtatgggttgttcgaatgtactgttatgtcttttggacttaccaatgcccccgctttcttcatgaacttgatgaataaggtgtttatggaatacctagacaagttcgtggtagtctttattgatgatattcttatctactcccgaaccaaagaagagcatgaagaacatcttcgccttgcattggagaagctacgagaacatcaactgtatgctaagtttagcaagtgtgaattttggttgtctgaagtgaagttccttggtcacgtcatctcagcaggaggagttgccgtcgatcctagtaatgtggaatccgtaaccaactggaaacaaccaaagacagtttcagagattcgcagtttcctaggcctcgcaggatattatcggaggttcatagagaatttttccaagattgctaagcccatgacacgactgcttcaaaaagatgtgaagtataagtggtcagaagaatgtgagcagagttttcaagagttgaagaatcgcttaatatcagctcctattttgattttacctgatccaaagaagggtttccaagtctattgcgatgcatccaaacttgggttaggttgtgttctgatgcaagatgggaaggtggttgcctatgcatctcatcagttacgtccgcatgagaagaactaccctgctcatgatcttgagttagctgcagtggttcatgtgttgaagatttggcgtcattatcttttcggtactcgtacagaggtgtacactgatcacaagagtttaaagtatatttttactcagccagatctgaacatgagacaacggagatggttggaattaattaaggattatgacctaggaattcattatcatgcaggaatggctaatgtcgtagcagatgcccttagcagaaaaggctattgtaatgctatggatggacgacagttgcctttggaattgtgcaaggagtttgaaaggttgaatctgggaatcgtcagtagaggcttcgttgcagccttagaagcaaagcccactctaattgatcaagttagagaagcccaaattaatgatcctgatattcaagaaatcaagaagaatatgagaagaggaaaagctatcggtttcttcgaagatgagcaaggaactgtatggttgggcgagagaatctgcgtccccgacaacaaagatttaaaagatgcaattatgaaagaagctcatgatactttatactccattcaccctggtagtaccaagatgtaccaggatctcaaggaaagattttggtgggcaagtatgaagcgtgaaatcgcagaatgcgtagcagtatgtgatgtttgtcagcgagttaaggcagaacatcagaaacccgccggtttgctgcagcctttgaagattcctgaatggaaatgggaggaaatcggtatggattttatcactggtttacccagaacgtcatcaggccatgactctatttgggtgatagtcgacagacttaccaaagtggctcatttcatcccagtaaagacaacctattccggaagtcggttggcggaattgtatatggcaaggattgtgtgtttgcatggcgtccctaagaaaatagtgtccgatcgaggcagtcaatttacttcaaatttttggaagaagcttcaggaagagatgggttctaagctgaactttagtactgcttatcatccgcagacagacggacaaaccgaaaaggtaaatcagattttggaagacatgttgagagcttgtgctttagacttcggtggaagttgggataagaatctaccttatgcggaattttcgtacaacaacagttatcaagctagtcttcagatggctccttacgaagcactgtatggtcggaagtgccgcactccgcttttgtgggatcaaacgggagaacgtcaggttttcgggacggatatcctaagggaagcagaagaaaaggtgaaaatcattcaagaaagattgcgtgtagctcagtctcgacataagagttatgcctacaattgccgcagagatttgagttttgaagaaggagattatgtgtatcttcgtgtcacgcctcttcgaggggttcatcgttttcacaccaaaggaaaattggcaccgcgttttgtgggaccttataagatcgtcagtagaagaggagaggttgcttatcagttggagttacctcaatctttggcaggagttcataatgtgttccatgtgtcgcaactgaagaagtgtttaagggtacctaccgaagaagctaatcttgaacagatagaagtccaagaggatctgacctatgttgagaaaccaatccgtatcttggaaatagatgagagaagaaccagaaatcgagttatccgtttttgcaaagtccaatggagtaatcactcggaagaagaatcaacttgggaacgagaagatgaattgaagtcagctcatccgcatctgttcgccagttcttccgaatctcgaggacgagattctgtttaa

SEQ ID NO: 53111 - DNA, 3166 bp, Oryza sativa
  Clone ID: PAT_MRT4530_55342C.1
ggatgtgatccttgggatgaattggttggctcaattccaaggggtagtggattgcgcaaggcgcactgtcactctgtaccgagggccggaacaaccagttgtgttctttgcacccccaacctctgttggcagttcagaacttcatcagataggattgtcagaaatccccatcgtcagtgagttcggtgacgtgtttccggaagaactacccggtatgccgcccaagcgggagatcgagttccggatagatcttgctccaagaacaactcctctgtacaaacggccctaccgtatggcagcaaatgaacttgccgaagtcaagaagcaattggaagagctgaaggaaaaggggtatatacggccgagcacttccccctagggtgctcccgtgatttttgtggagaagaaggataagacgaagaggatgtgtgttgactacagagctctcaatgaagtcactatcgaaaacaagtaccctcttcctcggatcgatgatctgttcgaccagctcaaaggtgccaccatcttttctaaaatcgatcttcgctccggatatcaccaattgcgtattcgtgaagaagatatcccgaagaccgcattcaccacgcgatatgggctgtatgaattcacggtgatgtcgttcggtctgaccaatgctcctgccttcttcatgaacttaatgaacaaagtgttcatggaatacttggataagtttgttgtggtcttcatcgacgacatcctggtgtactcacaatcagaggaagaccattagcagcatctccgtctggtgttgggaaagctgcgggaacatcaactgtatgccaagcttagcaagtgtgagttctggttgtccgaagtcaagttcttagggcacgtgatatctgctaaaggagttgctgtggaccccgaaacggtgaccgccgtcaccgattggaagcaacccaagacgatcactcaagtccgcagctttttgggtttggccgggtactatcggaggttcatcgagaacttctccaaaatcgctcgacccatgacacagttgttgaagaaagaagaaaaatttgtgtggagtccgcagtgtgagaaagcattccaaactctcaaagaaaagctggtttcctcgccagtgttaatcttaccggatactcgcaaggacttcctggtgtactgtgacgcttcgcgccaaggattggggtgcgtattaatgcaggaaggtcatgtggtagcctatgcctcacgccagctacggcctcatgaaggcaactaccctacccatgatttggaattgaccgctgtggttcatgctttaaagatctggcggcactatctcattgggaatcgctgtgaaatatatactgatcataagagtttgaaatacatcttcactcagtcggatctgaatcttcggcagaggagatggttagaactcatcaaggattatgatgtggggatccactatcatcttggcaaggccaacgtagtcgccgacgctctaagtcgaaaaagccattgcaacactcttggcgtccgtggcattccaccggaacttaatcaacagttggaagccctgaacctaagcatagttggtcgtggattcttggctacgttggaagccaagcctaccttgctcgatcaaatccgcgaggctcagaagaatgatccggatatgcatgggctcctcaagaacatgaaacagggtaaagccgctggtttcacagaggatgaacacggaaccctatggaacgggaatcgggtatgcgttccagacgtcagggaacttaaacagttgatacttcaggaagctcacgaaagtccctattccatccatcctggcagcacgaagatgtacttggacttgaaagagaaatattggtgggttagtatgaagcgggaaattgcagagttcgtggccctttgtgatgtgtgccagcgtgtcaaagtcgagcaccaatgaccggccggactcctccaacctctacaagtgccagaatggaaatgggatgaaattgggatggattttatcaccggacttccaaaaacccaaggcggatatgattctatatgggtagtcgtggatcgactaaccaaggtagcacggttcattctcgtaaagaccacctatggagggaacaaactagttgaactctacttcgctaggatcgtaagtctccatggcattcctaagaaaattgtctctgatcggggaagccagttcacctctcatttctggaagaaactccaggaagagttgggaacccgattaaatttcagcaccgcgtaccacccgcagacagatgggcagaccgagcgtctgaaccagatcctcgaagttatgctttgcgcatgtgtcctagattttgggaagacatgggataagagtctcccctacgccgagttctcctacaataacagctaccaagccagcatacagatggcaccatacgaagcgttgtatggccgcaaatgcaggacaccactattgtgggaccaagttggggaaagccaagtgttcgggaccgatatcttgagagaagctaaagcgaaggtcaggaccattcgggaaaacctaaaggtggcacagtctcggcagaagagttatgcagacaaccgacgccgtgacctggaattcgcagtggataactttgtgtatctccgggtaacgccgttgcggggtgtacacaggtttcaagcgaaagggaagctcgcccctcggttcgtgagtcctttccgcatcattgctcgacgcggagaagttgcttaccagttggagctgcccgcctccttcggcaacgtgcatgatgtgtttcatgtgtcgcaactcaagaaatgtcttcgagtgccatccgagcaggccgactcagagcagattgaagttcgcgaagacttgacctacgtggaaagaccagtgaaaatcctggacaccatggagcgcaggaccaggaatcgggtaatccgtttttgcaaggtccgatggagcaaccatgccgaggaagaagctacttgggagcgtgaagacgagctgaaggcagcccatccagatctcttcgccagggcgcgggcgcgccgcctcccgccggccgtgccgatgtggccgcctccgggcgcgcctagcggctgccgcatggggcccggccatcagccgcccgcgccctggggtcgcggctga

SEQ ID NO: 53112 - DNA, 504 bp, Oryza sativa
  Clone ID: PAT_MRT4530_55343C.1
atggtgcgttgtgatgatagcgatagcagcacgagcggtggtggcgccgtggggctcacgaggcagcggcagaggcagaagaacggccaggagcgcggaggtgcgtccaccattcaaccaccaatgaggaccgccattcgactgccgatagggacccggccacagcgacccggccgcgacggaggcgaaggactggcccggagtacagaggctcgaccgccatccacaccggtgggggcgggcctcacgcggcggtggaggaccgacccgaagcgtgaaggcacgactgccatcgaagtagaggttgttgtcccggcctcactcggccagccatggagcttgacctcccgccgaagcaaccggccctaccgcgtgctcctcttcttgttgctccctcacctccttgccgccatcggcagcgctccctgcggctgcgtggctgtgaagcttgctatgagcgggcgtgatgcgaacccatcggcctgctccctacagcggcggtga

SEQ ID NO: 53113 - DNA, 861 bp, Oryza sativa
  Clone ID: PAT_MRT4530_55344C.1
ttcaaaagtacaaaatttgtgacctcgtttccaactgtttcactccctcctttcacttgtctttagatgccgcgctacaagcctgagtacttgtttggtgttgagggatttgtccaagagttgcgtacgatgtcctttgccataggatttgggactgcccctttttatgcccagattcctcatgatcgtcacgaagagaagtgccgagtcaaagtcaccttgaacagtaatagtgaagatatcccctcagtgatgttcgaagctggaggaagaaactacatccatacatgtcaggaggtggcaaggatcgccataggagagctccgcgatcgctacagtgatcagttggccgacactgagtatcgctaccatcctcgtcaaccacagggaagtgaccgtggcagctaccttgagactgagggaattgagaatgatgctaccacaaggcatttggttgagatgctgtgggctatggatgaaacccgtgcggagactgtgttagcagctcaagatcgtgaagaccggaatcgtggcaagatttgcaagttagaggacaaagtggatcgtttggagaaggaactagccgcattgaagggagaagcaccaccgcagaaggccaggattcgtcttaccgcaaggaagagagctctatttgtccctcgctaccaattggcgccaaaggtccgtgtggtggaaaaagaagttaccccagccctagcggatcctccggtcgtcaacataagtgatgatgaagtagaagaatccaagcgcacctattccaagattgagtggggagccactcaagatgatgaagacgagccggacgagccttcaatcaactccgatgcccggaagaattag

SEQ ID NO: 53114 - DNA, 207 bp, Oryza sativa
  Clone ID: PAT_MRT4530_55345C.1
ctgcaggcttaggtggttcaaccagctcgacccaagaatcaaccggagccccttcaccgaggaggaggaggagctcctcctcgcgtcgcaccgcgcccacggcaaccggtgggcggtgatcgcgaggctcttcccgggccgcacggacaacgccgtcaagaaccactggcatgtgatcatggcgcggcggtgcagggagcggatggg

SEQ ID NO: 53115 - DNA, 123 bp, Oryza sativa
  Clone ID: PAT_MRT4530_55346C.1
gggaagcaactaactaattccaagtgtccatccgagcctgccgaatgactacgctaaatgcttaccgccctgtgggagcgagcaagcacaagcctaagaataataggagagagctcgcgagct

SEQ ID NO: 53116 - DNA, 1189 bp, Oryza sativa
  Clone ID: PAT_MRT4530_55347C.1
atgagtagagtgtccactagttgaggttttgtttattctagggtgaacaagccgagggagagggcgcgcggaccgggtccacgggagtggggcccacgcgtcagcctctcggtccatggtggaccgggcgcacgcggctgacgccggccggcgtcgtgggtcccacgcgtcagccgcacccgcgggcgcgggcggctgacggccgggccccacctggcagccgcgggacgcgcccgaaggcggccttgccggcacggccgacgggaggcggcgcgcccgcgccccgatggtcgccggcggcgacctccggcgcgacggagcggcggccgagagaggggagggaagggggaaaggagtggacgagatcggcaaggacacagcgatgccgaagcaagcgatgccgaagcgggaggtggtccggggcgacgacggcggacgtgacacggagtgcggccgcccctgccgccgcgttagcacgccggccggccgtgccgtggcctcctctagcgtcgcagccgcctcctcttcgccggcctgccctctgtttcacgcggagacctccagaagtgcatccctgccggcaacagtggcgttgccgccactgttccgcctccggccgcttctgccacgtcccctgtgcgccggccgacgtcgccaccacctctcccggcaccgaaacgccgtcctctttcctggccaggccacggcgtcgcccgaatttcgccagaacgccgttgcccgcaccggcctctccttcctcctcgtcgacgtctcctccggcagccccttctgccatgcccgtgcgtcagccggcgctgccgtcccctccctcggcacgccgcccgtccctcctcgcccgtgcaccggtcggccgcacctcaaccaccttcggcatcgcagtggcgtgttccgcgccgtcctcgtctccgtgcagctgctgccggctgccctcatcgcctcctcgctggttccagtcgtcgtcctctcgtcgttcccggtcgtcgtggcccccgtcgttgtcttcgtcctcggctccgtgtcgtcaagccttgtgctggccgcgtctcggcttcgtgcaaggatcgccgccgaagtcgttccctcgccgttcgcctccgtcgtccctgagccgtctccgtcgcgctcgttcgtctttgtcgttcccacgcctcatcgcatggtggcctga

SEQ ID NO: 53117 - DNA, 622 bp, Oryza sativa
  Clone ID: PAT_MRT4530_55348C.1
atctggtcgaccacccataaccgcgggcacggctattcgaatagttttactctgatcaaaggtgtacaactgtacccacaagacacagccccacgacacgtttccgtgcgccgacatgccgccatgacataccggaaagaggccgtgacaggacccttcacataaccccctctaaccaagcacaccacacctcaggtttcacccccactcctcgcaaggcagcgggcagtcccctctcgtgcctaggtgaatccggaagccgcataggccgtcgcagggcccatccaaactccatcacgcccacccttgcctggatgcgtcagctagaggaaagctacactacaagcccagccgttgcccacgctggcttgtggtaagtacgataagttcttccagggcatcccgcgaactggtccttaactgccatgggtgcgaccagcaaaaccatgcacccacagcccaccattcagttgcattttagttggataattacgaccatgaagcatggccagatgtctcgagcacgcagctcattctgatactaaaaaggtctaatactataattatcccatcaactgagctagtggtaattaagcatggctaagcatatagttctagctag

SEQ ID NO: 53118 - DNA, 3927 bp, Oryza sativa
  Clone ID: PAT_MRT4530_55349C.1
atggtgaacactcgcagcaacgggaatggccccaacaacaacaacaacaataacaacaacaatgaagggaacccaacccttgctcaagttcttgctcaacagactcagttaatgaacatgatgatgcagcaacttcagaatcagcaaaaccagggaaataaccatgcacctccccagaacaagttagcagaatttcttcgtgtgaggccgcctattttctctagtaccactaatcctgttgaagctggtgattggttgcatgccatagagaagaagttggatttgcttcagtgcactgatcaggagaaggtctcatttgcatcacaccagttgcatggccctgcctctgaatggtgggatcacttccgcctgaataggactactgctgaacctatcacttggcttgaattcaccgctgctttccggaagacgcatataccatcgggagtggtgtctctcaagaagaaggagttcaggtcgctcacccagggatctcgctctgttacggagtatttgcacgagttcaatcgtctggctcgttatgctccggaagatgttcgcaatgatgaagagcgccaggagaagttcttggaaggacttaatgatgagctttcttacccactcatgactggagattattctgatttccagaagttggtggataaggctattcgtcaggaggacaaatacaatcgcatggagcagaagaaacgccggattgctcaattcaagacacaacaggggaataatcagaagccgcgtcttactttaggaccccagtctgtgccacaggggggttcttcgtctgttgttcgtccgcagcgtcagttcttcaacaacaatgctggcaacaacatccgcaatcaagctccacgtcctgttgcagctccaacacagcaacagcctgccaagagggagcaaggcaacaagcccgtggtgtgtttcaactgtggagacccaggacattatgctgacaagtgtccgaagccccgacgtgtgaaggttgtccctgtccagagcagctctaccgcactagcattaaaggcccgtgtcaatcatgttgctgctgcagaagctcaagatgctccagatgtgattttggtccgggagtatcccgatgtgttcccagatgatttacctgccaatgagttggcagaagtcaaaaggcaagtagacgatttgcttcagaaaggatacatcagaccgagttcatctccatggggagctccggttatttttgtggaaaagaaagaccatacccagaggatgtgtgtggactatcgtgccctaaatgatgtgattatcaagaataagtatccgctacccagaattgatgatttgtttgatcagcttaaaggtgccaccgttttctccaagatagatcttcgatcagggtatcatcagttgagaatcaaagaggaagatatacctaagacagcttttaccactaggtatgggttgttcgaatgtactgttatgtcttttggacttaccaatgctcctgctttcttcatgaacttgatgaatatggtgtttatggaatatctagacaagttcgtggtggtctttattgatgatattcttatctactcccgaaccaaagaagaacatgaagaacatcttcgccttgcactagagaagctacgagaacatcaactgtatgctaagtttagcaagtgtgaattttggttgtctgaagtgaagttccttggtcacgtcatctcagccggaggagttgccgtcgatcctagtaatgtggaatccataaccaactggaaacaaccaaagacagtttcagagattcgcagtttcctaggcctcgcaggttattatcggaggtttatagaaaatttttccaagattgctaagcccatgacacgactgcttcagaaagatgtgaagtacaagtggtcggaagaatgtgagcagagttttcaagagttgaagaatcgcttgatatcagctcctattttgattttacctgatccaaagaagggttttcaagtgtattgcgatgcatccaaacttgggttaggttgtgttctgatgcaagatgggaaggtggttgcctatgcatctcgtcagttacgtccgcatgagaagaactaccctactcatgaacttgagttagctgcagtagttcatgcgttgaagatttggcgtcattatcttttcggtactcgtacagaggtgtacaccgatcacaagagtttaaagtatatctttactcagccggatctgaacatgagacaaaggagatggttggaattaattaggaattatgacatgggaattcattatcactcaggaaaggctaatgttgtagcagacgctcttagcaggaaaggctattgcaatgctacggaaggacgacagttgccattggaattatgcaaggaatttgaaagattaaatttgggaattgtcagtagaggtttcgttgcagccttagaagcgaagcccactctaattgatcaagttagagaagcccaaattaatgatcatgatattcaagaaatcaagaagaatatgagaagaggaaaagctattggtttcttggaagatgagcaaggaactgtatggttgggtgagagaatctgcgtccccaacaacaaagatttaaaagatgcaattctgaaagaagctcatgatactttatactccattcaccctggtagtaccaagatgtaccaggatctcaaggaaagattttggtgggcatgtatgaagcgtgaaatcgcagaatatgtagcagtatgtgatgtttgtcagcgagtcaaggcagaacatcagaaacccgccggtttgttgcagcctttgaagattcctgaatggaaatgggaagaaatcggtatggattttatcactggtttacccagaacatcatcgggccatgactctatttgggtgatagtcgacagacttaccaaagtggctcatttcatcctagtaaagacaacatattccgggagtcggttggcggaattgtatatggcaaggattgtgtgtttgcatggcgtccctaagaaaatagtgtccgatcgaggcagtcagtttacttcaaatttttggaagaaacttcaggaagagatgggttctaagctgaactttagtactgcttatcatccgcagacagacggacaaaccgaaagggtgaatcagattttggaagacatgttgagagcttgtgctttagacttcggtggaagttgggataagaatctaccttatgcagaattttcgtacaacaacagttatcaagctagtcttcagatggctccgtacgaagcactgtatggtcggaagtgccgcactccgcttttgtgggatcaagcgggagaacgtcaggttttcgggacggatatcctaagggaagcagaagaaaaggtgaaaatcattcaagaaagattgcgagtggcccagtctcgtcataagagttatgccgataatcgccgcagagatttgagttttgaagaaggagattatgtgtatcttcgtgtcacgcctcttcgaggagttcatcgttttcacaccaacggaaaattggcaccgcgttttgtaggaccttataagattgtcagtcgaagaggagaggttgcttatcagttggagttacctcaatctttggcaggagtccataatgtgttccatgtgtcgcaactgaaaaagtgtttaagggtacctaccgaagaagctaatcatgaacagatagaagttcaagaggatctgacctatgttgagaaaccaatccgtattttggaaatagatgagagaagaaccagaaatcgagttatccgcttttgcaaagtccaatggagtaatcactcggaagaagaatcaacttgggaacgagaagatgaattgaagtcagctcatccgcatttgttcgccagttcttccgaatctcgaggacgagattctgtttaa

SEQ ID NO: 53119 - DNA, 292 bp, Oryza sativa
  unsure (1)..(292): unsure at all n locations
  Clone ID: PAT_MRT4530_5534C.1
gggcgttacgaccctcgtgaaggcgtcgtttttnantccctcgtgtcatggtggtgttgttggcccggtggcgatcggtctagcatagtgatggtcggttcgatgcttagcttctctctctgtancgtgtgtttggtcggttggcacatggtttggagcgtgctctggtgcacatccttcctcgacagccagccgtcgatgtaaaactttccttgtaacatttttctccctatcttaattatattgaatgacctcctttggtcattccggcaaaaaaaaaaaaaaaaaaaaa

SEQ ID NO: 53120 - DNA, 279 bp, Oryza sativa
  Clone ID: PAT_MRT4530_55350C.1
atggcggctgctgtagctcagcgcagggagaaggcgcggctgctcgacgtgtcaaggaggcgacagggaggaggacaacgggtcaataggagtggcggtggctcgatgagaagaggaggcgacaatggcagcttagcacggggagatgatattggtggcggctcgacgtgcggaggaggcagcggcagcttgcccgcatgggaggccacgctgccgctgccagccgctgctctcggctgccccgcacccgtcgcccgccgagcccgccgccacccgtga

SEQ ID NO: 53121 - DNA, 4423 bp, Oryza sativa
  Clone ID: PAT_MRT4530_55351C.1
atggcgccgcccttcgtcttcccctcgaccctccgggacctggagcgggacggagacggcggcggcgacgacgagccggccctccgcccgcagaaccccgtcgccgtcggcgcactccgcgccgccgacctcgaggagttcgtcaaaggcacatcgtttgacctgtctgacaaggaactcttctgcatcgaggagcaggacgtgtttgaccgcgtctattccctcgtgcgtgacttcacttgcttgccccctgccctcaagttcaaccttgttgagaccttgcgctccaatcttagtgttctcctcccaaacatagactccctttcacgagcttccatgtcatccccttctgatgggatcccagtaactgatcgcattgcttcgcatcggaatgcccttaagatctactccttcttcctcctctccattgttgttgctgaagaatcgggagctgatagttgcaatggccctaaggtggcagtacatggtcggaagaagaatgctgtatatgcttggaattgggaagcacaaagaggccgcatcatgaatcttattgctaattcacttgaagttgacctatcactattgtttggtccaggcggtgctgatgaacaatatctctcttttgtttcaaagtgtacttttgttctctgtgagaaccagaacgtgctgaaagatgaggaaataagaaatggcttgtgccgaataattggtgcaattgctacgaagcatcaaagagtatctcaaacaagtgcatctgtcttgcatttgattcataaatttgatttcactgtcgtgcttctagcggaatcagttgctgctgcagagaaaaggtttggtgatggaagccttgcgattttgctgataagggaaataggtcggactgacccaaaagattatgtaagagatagtgccggtgctgacaatgccgggagattcctagtagaacttgcagatcgcttgccaaagctcatgtcaaccaatattggtgttctgatacctcattttggtggggaatcatacaagattagaaattctcttgttggggtcttgggcaagctggctgcaaaggccttcaaagatgttgaaggcgatagtgacgcccattctttaaggctccgaagtaagcatgctatgctggaaattttgcttgaacgttgtcgagatgtgtctgcatacacgaggagtcgtgtgcttcaggtatgggcagagctgtgtgaagaaaatgctatttcaattggcctgtggaatgaagtggcatcagttgcttcgggcagactggaggacaagagtgcaattgtgagaaaatcagcactgcaattactcatcacaatgctgcagcacaatccttttgggcctcaactaaggactgcaacctttgaggcaactctagaaaggtacaaggagaaattgcaaggaatggagcctccttctcccgagaaggatgagctcttgaatgattcttcactgggtgaagtgattgcagggcaggatgaaagtgtcagtgatagctgtttaccttctagtcaagacccaaaggatcaagatcccacaattgtggatataacaaacttggaacagattagagctttagttgcatcacttgaggctggtctgagattctcggcatgtataacttcattaatgccaactcttgtccagttgttggcatcgtcttcagccactgatgttgagaacacaattcttctattaatgagatgcagacaatttcagattgaaggttcggaagaagccctccggaaaatgttacctctggtattttctcaggataagtcaatatatgaagctgtggagagtgcattcatcactatatacacaaagaaaagtcccacggaaacagccaaaagtttattaaaccttaccattgaatgcagcattggtgaccttgctgcccttgaaagcttagttagttcattgataacagccctgtgggattatttttgctttcacatcaatggtgtgaaaccagtgcaaagccgtggagctttatcgattctttgcatggcagcaaagtcatctcccagcattttgggtactcatttgcaagatattattgatattgggtttggacgctgggctaaggaggagcctctgcttgctagaactgcatgcattgccctgcaaagattatccaatgaagacaaagtcaaattaattagtactggtagtagggtattcgctgcattgcaaggcctgataactagcctctcacttcctgagaaaatatggtatggagccgcagataaagctataagtgccatctacgctttacacccagcacctgaaatcttcgctgctcagattgtaaagaaatcacttaattctgtattcggtgtcttaggaactgattgcatgtcaaatgaaaatgaaactcagaatggttccatgctgtcatcgacaccagccacaaatctgggcagatttcttttcattattagtcatatagcactgaatcatttggtttacattgagacttctgttaagaaaattcagaaacagaaacggaagaatgacaaatcagagcctactgccgaggatcttcaggcagatgcctccaaaaattcggaggcacaaggtataaatgctgagttgggaattggtgcatctgtagatattgcaatagagtccctcgctgaaaaggcagaaagggagattgtgtccaattctgaaaagaatcttattggatactgtgcaccatttctcgcaaaactctgcaggaacctggctttgcttcaaaagtttccagggttacaggcctctgcaatgcttgctctttgcaagctaatgattattgatgcagaattctgtgaagcaaatcttcagatcctatttactgctgctgagagcgcgccttctgaagttgtccgatcaaactgcactatagctcttggtgatttagtggttcgctttccaaacctcttagaaccttggacagagcacatatatgcacgcttacgtgatccttcggcatctgtgaggaagaacactgtgcttgtcatttcacatcttatattgaatgatatgatgaaggttaaaggctttattaatgaaatggccgtaaggatagaagatgaagacgagaggatctcaagccttgcaaaactcttctttcatgagttatcaaagaaaggcatgtccagcaaatgtgtcggaagcaatccaatttataatcttcttccggatatcctgggtagattgtgcaatcaacaactcaaggatgaaacgttctgcagcattatgcaattcttgatcagctctattaaaaaggacaaacaaatggaagctcttgtggataagctctgcaatagatttgctggtgtaaatgatgttagacagtgggagtatatatcctattgcctttctcagctgactttcacagagaagggtttgaaaaaactagttgataatttcaagatatttgagcatgcattatctgaagattctgtaatgaaccacttcagaactgtgatagcaaagtgcaagaagtttgccaagccagatctcaaagtttgcattgaggaatttgatgagaaactcagcaaggttcatcaggaaaagaaagagcaagaggccacgaccaggaatgccgaggcacacaaacaaagaattggttcacttgacaaactcatggtaactaagagaactgggaaggataagggaaaatctgctgaagtggcagaggaaactagtgaggtagttgatccatcaacggagagcaattctgaagataaggagaacatgccagaatgcagtgacaatatttgttcggaaaagagtcatacatcatccacgtttacagaatcagacggtgacagcacagaggttcaatcagcgagaacttcttgcaaaggtaacagatggtcacactgctgaaaaatgagagaaccggaagactcagaagacagtgctccaattagacgtgtgtctcgcagaagaccagttaggtgatgccgaactgtaatatggaccaggtggcaacaactcctctctgggaagatctcgccttgagatcttggagttctgaagcaaatggtctccctggcgcttgtcccaccagaaactctatctaacgccgataaatttgttgaatcataatgtttataagcctgcgttgacctgctaaatcttggtcagctccacacggaacggtttgctggatgctgatatttcatctagtaggttgcctctgattgataatccgtaattggagttcggtatctagtctccttgccccgtatgttgaattttttgttcgttacgatttgcgctgcttgaacaaatctatactcgcttggtcgaatccagaacttggtactactaaaaaaatgtacctgtatgttgtctgtaaactgtactgcctccattctcagtattggagtacatgttttaggtgtatgcaggt

SEQ ID NO: 53122 - DNA, 4842 bp, Oryza sativa
  Clone ID: PAT_MRT4530_55352C.1
gcggcggtgagggtgctcgattctcgtccgtcggaagtacacccttccttttcacagattcccagattctgtggggggcgaaaagggcaacaccaaatgtaggagcgtaggcttgaggtggaaaatcctgtgtcggagatcacttcgatcaaattcaacctcgtgaccaggtcacatatgggaaagtaaagtagggagattactatttaaatgtgtcctgtgaataacccaaagttggtcttacgagatggtgcatcacagtgaacagcctgtggggctcgttgcaggcgtgactgtgatgttaataagaaacaaactggtaaactgttacgtcaatgaggagttattaagctagcagaaactgtgcactattcaaattttatcgagaaacttctccaatttctaaatcagaaatgtcatggctgtctcactctgaagctgaatgggtgaacaatgaaagatgatgagacaacaattcaaggaacttgcaagtaatgctccaaggatggggcaaaactataccctagtataatctttaagatgctaacaagtccaagagtaacactatccaggagtaaacttcaccgtaacactagcgtgatggacaaaatgtcaattattgcagaagttgctggcggggtggcacataagtccaagaacaaggctccccatgaaacccttccccaagatttctgggatttcatacctgatgataaccagccacctatattcaatgtgactaagaaaatattgtcgccatatcaagtctttcacatgctaaaaaagcttgatcctgaacttatcaatcaggatgaccggacaaaagcttataagaggatggttgatttatactcaaaaaaatcagatgatgaatcttctgcatctacagatacatatggaaccaaatggctaaaagatatcatcctcagcaaaagatccgacaatgcatttaggagtataatggtcggggacccaaaaattaatttaaatgaaatcggtattcctatgggtttagctttgaacttggttgtttctgagcaagatggtgatcttgttttggtaaatagcccaccttcagttcatcaacattctctgattgccctatctgcaaaacttctgtcaactcagtcagctgtgtcaattaatccactatgttgtgatcctttcaagggagactttgatggggactgtttgcatggatatattcctcaatgtctgcaatcaagaattgagcttgaagaactagttggtttaagtggccaactcttgaatcaacaagatgggcgaagtttggtgtcattaacacatgactctctagctgctgcacatcagttaacaaatgcagatgttttcttggagaaagctgaatttcaacagcttcagatgttatcctcttccatctcattgacaccaatgccatcagtttttaaatctacaaactctcaaggtcctctttggactgatctctatctgttctcagaccattactcaaggagaaaactgagtgaggaagttcatctggcattggatgaagcggaagaggcttttcaaatcaagcaaatattgctaaattcagtatctataccaaatctgaagtattatgatggaggtgatgatagatcaaacactgatgaacaatctggttttactcaagtcagtctgccaatcatcagatcttcaatgacatcatttaagagtgtcttcaatgatctgttgaagatggtgcagcagtatgtgagtaaagataattcaatgatgacaatgattaactctggaagtaaaggtagtgttctgaagtttgttcaacagactgcatgtgttggtcttcaactaccagcaagtaaatttccctttagaattccctcacaactatcatgtgtttcctggaatagacataaatctcgcaattgtgaaatcactgacggcaccagtgaatgtgtgggaggccaagacatgtatgctgttgttagaaattcttttcttgatggactaaatccgttagaatgtctactgcatgccatatctggcagggcaaatttctttagcgaaaatgctgacgttcctgggactttgacaaggaaactaatgtatcacttgagagatacatacgttgcttatgatgggactgttagaagttcttatgggcagcaaatagtgcggttttcttatgatactgctgatggcatgtacagtgatcatgatcttgaaggtgaacctggggcccctgttggctcttgggctgcttgttccatttcagaagctgcctatggagctttggatcacccagttaacagtttagaggattcccctcttatgaacttgcaggaagttttgaagtgccacaagggcacaaattctctggatcatactggtttgcttttcctgtcaaagcatctaaggaaatatagatatggttttgagtatgcatcactagaagttaaggatcatctagaacgagtggacttttctgatatggttgacacggaaacaatgaagataaaaaggttacgactggaatttattgtaagagagattattgaccaatacaacaccttaagaaaacagttgaacaatgcgatcccttcagtttctatttcgaacagtgaaactcttcacttgaagatggaaaataaatctgggaagctagggaaaaacctgggcacgggcaatgagtgtgtcaagaatcagacctgttgcgtcactatggtagcccaggtggaatccaactccacgtcgcaattggacgttatcaaggaacgggtgattccgagcatcctggccacactgttgaaaggatttttggaatttaagaatgttaaggtgcaatgtcaagaggataatgaacttgttctgaaagtcgtctgtaagatccacaacagatgctattggaaggaatatccatcgacagcacttactggttgtggcagactgcctatctgtgagtgggcagttccatgggctaagcagtcaaggtttaaagcagcaaaggacttgaggcctgcacacagttttataaatgctgcaaagcgagattcagtggacaatctttctggtactctagatgcaattgcctggggcaaagaaccttgtgcagggtcgtcaggtcctttcaagattctatattctgggaagtcacatgagacaaaacaaaatgagcacatatatgactttctacataaccctgaagttcaggctcttgaaaagaatgtaatggatacctacagaaaaaggactgaaaaaacttccaagcggagatcagcactcaattctgaaggcaatgctaccatcaatggtggtgccatatcttttaatcagaagtttcttaatgctaaagttggtatatgggagaacatcattgacatgcgcacttccttgcaaaacatgcttcgggagtacacattaaatgaagttgtcacagaacaagataaatcatgcttaatggaggccttgaaatttcatcccagagggtatgacaagattggtgtgggaataagagaaatcaagatcggagtgaatcctggtcacccgagctcaaggtgcttcattgtactaaggaatgatgatactactgcagacttctcttacaacaagtttcagggtgtgtgttctaggggtgggtgtggggtactgcatattggaggcagtgggccaatgttgctagcgggacgtaggtacggcgacgaatgccgctgctacctccacgccggctccatcaacgacgggttctcgctgctcaccccgctccgcggacaccagaaggagccattgctatttgttggaattcctgatgctgtgaaggcctgggacttggcaaaattgcaatggactcaccctttctggtcatacaggagctataatgcccttgctctgctgggatcaatttctattatcttgttctctggatcaaacaatcaaggtctgggctgctatggaaagttggaaactggaagcctggcagtaacatatacacataacgaagatcatggtgcacttgctcttgctggtatgcaagatgcacaattaaaccctattctgctatggtcaacgaattacaacatagtccacctctatgagctcccatcaatggaggaacaggtcagaaaagccgttttcctgaacagagagacctttggcagccaatttgctctggcaatctctcgcattccttattcagtagttgaagaatatacaagcacaggcttggaagaattgtttgctgatgttggaacttggaagaaacaggttggtgatacatcattatctcgtggactggaaactgtcggaacaaaacatacattagctcaagttcaggaaaacggcctttctgacctcttcctccattttaaaatcacagggtccccttggaagaggaaaaacaagcatttgaaccaacaacaaatgtatgattatcaagccatgaccttgcggccaattcaagaaatgatgagaaacaatacggagcactatggctttaatttttttctttttgagaaattaggtcagcagactggaacctgtacatctgatcatctgaacaagaaggttgcagtttgttcaaacttaggtatggagataaatagaaatgaactgggatacactcatctactcctagctagccgcctgccacttgatgtgggtgcctatctggagcgtacgtgtaacggtgtaagtagcaagagatttgttgggaatcacttcaccgcacacatccctctcagggaatcctccgctgaccggcggccacgtgaaaacaaacgccgggaaagaaagagcaaggcaaccatgcccgtttccaccctagtcactgtcctgcatatcacatactctgccataccttcttag

SEQ ID NO: 53123 - DNA, 2549 bp, Oryza sativa
  Clone ID: PAT_MRT4530_55353C.1
ttgctactgactagcactaggcttaacaggtactgcatttgctccagtgaccctgatattgtggtcatgtcttcttcgtgcataacgaccggaatgatggcgcgggttacgctttggttgtggacaatttctggagtaatgtctttcttcactgcagttgtaacaaacaataactttcttacgcccaagttcttcatcaagtacttaatttctcggctgctgtactggaacatccaaaggtacaacgcagatattggcctctgtcttgtcaactggtggctggggctgaaattaagcattgacacctttgtggtagtgcactcagttgttgcaactcaggctatacgactgcttcgggatgcatggatgacaattcgctaaggaacaagcttctgattgtggggagttgcatggactgacatgctggcagctatgtttctcagtttcgggcacctggcggcgaaatgacccaatttcttgacaatttaagcaactgatatcttgccgaactcgggatttgcttttcccattttgattcctctgtcctactctggagttaggctgaaaactgtattcttgtcgaggatttacgtggtcttgatgcttctctttgttggaactggcggggtggttggccatcttcttcgtcagcagaaaactgaattgacaatcttttggtacatgatcagttccttcacacaagaaacaagtgatcctgctcattggacactcgccgggtggatggtctttctcacaatgaaggcaggtagtgacacatgagctagcaacatgaccgatttctccacaacgagagcatgccttatgttccattttattctgcttgaaaccttagggagacttctcatcttcatcccctgaggagacttgatctgaatcttcactatcagacactctacctccattagctaaaagatgttgggtcaactgtggtgcaccacgaaagaaatttcctatctgacgttttgtcattcctggtggaggccattctgtgccggtaatggtcatcttacggacttcatcatcggttcgcattggtgcttttcttttctgctgaggacagttccttgcatagtgcccttgttcatcgtagataagacaaatgattatagcttcttttgagtccacatgtggcatggcacaatgggcctgttgggatgctagtggcacgttgtctggcgatgtgggtgcttgatctgcctcaaattgcacttgaggttgcatctgactcgggttcagaattggcgtctgatgatgttgtaatagatctatgagcaatttgttctggttaattaggtgttggaccactaccacacaactggtgtctggtgctttattcacttgggagcatgaggcacccttgtcctgatttctgaccttactgcctttttcattgtcagccatctgttaccaggtttggagagggagagagggaaaacaaaaggggagggacagatcagaaactaaggatagcaccttaacagatctaatctttttctcctgcttcacagctggcttcacagcttcctttgcttcgctagcggacccaacagtcttccggagctttggcagacaattgacggcatcttcttcttcgcaaagatgaccatctagtactgccttaaccaaaggcctacgatgattcagaccaaactggtaacccgacctgggtcccagctcgtcccaagccaaccaaggccaacccacaagacacatctttactccgcattccatggccttggaacccgtcgtaaacatgtgacataacccttcacccatcctagccgtgaacaaaagtaccgacccaaccttgcctacggtaggtatcccgaacaggcaggctaggattgagcccggacaccggcccgtgcagccttcatttgcctagacatctcgattaccgagccgcagctcacgtagccttcatttgcctcagagatatccatcgtcgcaacgacttcatctatctctatccgtgtccttttgttcaggactagacttgtcggtgatatgggaccgggggtatcgtgaccagaggcttgaggcagacacaatcgcccacgcggcctggcaccttcggggacgtcgggcccgagggtgaggtgtctgccctcctcctgatttcccccgaggggggggggggtcgggttgcgcttgccccggccccgagggccgaggcaccccgaccccttaaggaaatcggtcagatcacgggttaggtggcaactggcggtctggcgcacgccttgccccgtcccgtcaagacgaaagcctctaggcactcgtctcaagccggagttaagcgtgttatctcttagagatgacacgttagccccgatcgatatatgccaggcttcatcccccggcggaagtggaggtaggtatgggcagtcccatcggagtgtcattcgaacagcaaccgtgctgatctccgcccattgcttctcagcggcccgaaccctaagcccccggccgaactggcaaaggggggcctgcgcggtctcccggtgaggagccacgagctccgtcat

SEQ ID NO: 53124 - DNA, 3408 bp, Oryza sativa
  Clone ID: PAT_MRT4530_55354C.1
atggagataaggaatggttcacgcgactcgaacaacgcctgtggcagcgaagagccgatcgatggagcacgtgccaacagtgcatctggcaacagtccgtccccaccgcccgagaacccaacaattgctcaggtgttggacaatcagactcagatgatgacaatgatgatgcaacagatgcagcaacagtaccatcagtccaaactgttagaatttcttcgtgtcaagccgcccactttctcaagcaccaccaacccaatcgaggcccacgactggcttcatgccattgagaagaagctgaatcttttgcaatgcaacgagcaggagaaggttgcttttgctacacaccagctacaaggtcccgcttctatttggtgggacaactacatggtgacccgtccagctggggcagaggttacttggacagagtttcgtcatagtttcaataaagcacaggttcccgagggaattgtggcacaaaagaagagagagttccgttccctgcaacaaggaaccagaacagttatagagtatttgcatgagttcaaccgcctcgcgcgctacgcccctgaggacgtgcgtaccaatgccgagaggcaggagaagtttttgtctggtcttgatgatgaattgactaaccagttgatctctagagattatgaggactttgagaagctggtggataaggctatccgtcaggaggagcacggtaacaaaataaaccgtaagaggaaggcagctcagttcaggactccccaggggaagagtcagaagcctcgtttcacgatgggacgtcacggtggaccttccaccatgattatccgacagcaccgtccctaccacccgggtagcttcaacaagaaccaccataatggcagtcacaacaacagtgagcagcacagtctcaaccctactccgagttcactaaagattccagctcaatcagttcagccagctctgccagaacagcccaagaggttgggagaaaaacccgaactctgcttcaattgtaacaaacccggacacacggttggaaagtgcccgaagccaagacgtgctggacccaagttcgttcaggcccgtgttaatcatgcatctgcagaggaggcgcagtcagcaccagagcgttttgctggtgcacatgggttatctttagtgaagcttaagataccaatgcgagttaatactcctggaggtggcatgaccacaactcactactgcccatctgtgacagttgaaattcaagggttgatttttccagccaacctcattcttctcgaatccaaggacctagatgtcatacttggaatggattggttgacaaggcacagaggagtgattgattgcgccagccgcaccatcaagttaacccatgcaaaaggagaggtggtaaccttccagtctctagtgccgcggaagccagggatcagtttaaaccaggctgctggtgaagaacaagaggtagcagtggagaaaaccactaagaagctggaggatattcccatagtcagagagtatccagaggtttttccggacgatctgacaacaatgccaccaaagagggatatcgagttccggattgacttggtacctggaactgcaccgatccacaagaggccttacagtatgggagccaacgagttggcggaagtcaagaagcaagtcgatgaacagttacagaagggatacatccgcccgagcacgtcgccttggggtgctccggttatctttgtggagaagaaagacaaaaccaagagaatgtgcgttgactaccgcgcactcaatgaggtcaccatcaagaacaagtatcctttgccaaggattgatgatctgtttgatcagttgaaaggagctactgtgttctctaagatagacctgcgatcaggctatcaccagttgaggatccgcgaagaggatattccaaagacagcattcatcactcggtacgggttgttcgaatgcacagttatgtctttcggactcactaatgcacctgccttcttcatgaatttgatgaataaggtgtttatggaatttctagacaagtttgtcgtggttttcatcgatgacatacttatctattccaagtccgaggaagaacatgagcagcatcttcagctggtacttgaaaagttaaaagagcaccaactatatgccaagttcagcaagtgcgacttctggcttaaggaagttcagtttcttggtcacatcgtgaatgctcaaggagtagctgtggatccagcaaatgtggagtcagttaccaaatggaccccaccaaggacagtcactcaggttcggagtttcttaggacttgcgggttattaccgccggttcattgagaacatctctaaaattgctaagccaatgacacagctattgaagaaggaagaaaagtttatctggtctgctgaatgcaataggagttttgaagaactcaaacgacggttggtgtctgcaccagtcttaatcctgcctgatcagacgaaagatttccaggtctattgtgatgcatctcgccaggggctaggatgtgtgttgatgcaggatggcaaagtggtttcttatgcttcacggcagttgcgtcctcatgaaggcaactacccgacgcacgatctggaattggccgcagtcgttcatgctttaaagatttggcagcactatctcatcagtaaccgttgtgaggtatatacagatcacaaaagtctaaagtacatcttcactcaagctgatttgaatctcagacagcgaagatggttggagctgatcaaggattatgatatgggaatacattatcatcccggcaaggctaatgtggttgcagatgctttgagcaggaagagctactgcaatgttgcatgggtagagcaactatgttgtgaggttcaacgcgatttggaacatctgaaccttggtatagttgagcacggattcgtggctgccctagaggcacagcccacactggtggagcaggttcgcatagctcaagcaagtgatcctgaaatagcagagctcaaaaagaacatgagagttggaaaagcccgaggttttgttgaggatgaacaaggaacaatctggatgggagaaagattcactgtatggacgaaggtgtcgtactccgctcttctgggatcagacagggtgacggagctcgtggctcctcaccgggagaccgcgcaggcccccctttgccagtccggccgggggcttagggaggagggcggacacctcaccctcgggcccgacgtccccgaaggtgccaggccacgtgggcgattgcgtctgcctcaagcctctggtcacgatactcccggtcccatatcaccgacagtagcccccggcgttatgccagagcaatttcccttcccaagggaagcggtcaggtgtgacgccacccctaaagcctggtga

SEQ ID NO: 53125 - DNA, 981 bp, Oryza sativa
  Clone ID: PAT_MRT4530_55355C.1
cctttttttgttttgtttttttttgggcaaacagccacgatacggctcatttttattccaatccaacagaaccacatgcgcatgccaacagtatgaatcaaaagctgtttcgaggtgaagcacaatgcgcatcactccctggccgatacgtatccatcagcaataacagaggaatcagtagatgtacgggacgaacgccttgcgcgacgccgggtacttgtcgccgaacttgccgacgtaccaccggcggtgatccctggccctcggcccgaggttggagcaggtgtagaggaagaaggcccaggccgccggcgtccacgccaccagcgcgtagccgagccactccacggcctcgccgaagtagttggggcaggtgaccacgtcgaacagcccgccgcggggaatctggtaccctttcccggcctccttcagcctcaggagcgccttgtccgccgcgatgttggtccgcatcccccacgcgaagagggctagcccgacgaggcagcgggcgacggccgcgggcgtggcggtggcggtggcggtgctgtggggagcggcggcgtcgagcgcccaggagcgcgcctggacgtaggcgttgaggaggttgaagccgaaggcgaaggcggcgacgaggatcggaacgggcgccggcgcgcggcggaggcggaggagccggagcgggtggacgagcgtgcggttcacgtagtggagcgcgtacagcgcggccgggaggagagcggcggcgcgcagcgccgacgaggaggcggcggcggagaggacgaggggcgggaggcacatggtggggctctccatgaggaaccacgcgagcgccgccggcacggcgggaccccacccggggcgggagagcttcccgtacggcgccgacacgaaccggagcaggaacacggtgatcgggctgatcaggtacaggatcaccaggcatcgcgcgtacagcgcgtcgtcgccgccgccgccgcccat

SEQ ID NO: 53126 - DNA, 316 bp, Oryza sativa
  unsure (1)..(316): unsure at all n locations
  Clone ID: PAT_MRT4530_55356C.1
cccacccgtccgccttcttacctcttaaacctagccattttatttgtttataccgaaacctagacattcaattttgtccggtacttttactataagtggttaggagatgatgccatgtatgatatcttgggacaaaagtaagataattcagtggcttgatgaaactgtacaggaatatgcccttctttaggaatctattgtgaaatcagttgctagatgtttcactaatcatnacnnnnnnnntagaaatatgcgcggagtattaccgggaaatacattaatccacatactgatcatatttaagaggaacaaaata

SEQ ID NO: 53127 - DNA, 351 bp, Oryza sativa
  Clone ID: PAT_MRT4530_55357C.1
atgccactccatcacaatttccgtcctcttcgtcacattcagccgtctccgtgttatcttcttgtcgtcttcgtcttcgtctcgacggacaaaccggcgccggaggaggagagcacggcggcggatggggaacgacggcggatggggaagggcttcaccggcgcggccgtgcccgtgcgctgcgcctccgctatagcacatcgtcttcaacctctatacgaagtcccgtgcggccgtgcctgtacgcagtgcctccgcctcccgttcgaatacgacctcccagttgctcttcttcttaaattgattgcaaaaacgaaattcatgggtctcctcttcctttcccaactttag

SEQ ID NO: 53128 - DNA, 1607 bp, Oryza sativa
  Clone ID: PAT_MRT4530_55358C.1
gcggcgctacggcacgaacggaggacaccaacgggtagcggacggcacggcgaactcaccgacgaccaaagcgacggcggacgaccaacggacggcgacggcgacgaggttgaaacggcggcggtcttcggcttgacgacggcgacgatgctccggtggtctccgacggcagcgaaagagcggacgaggacggcgacgacttggcgacgacgacggcgaccttcccgagcgacggcgactgtcgcgaccgggaaaattgccttttcccgaacgctagtgtattaatccccgtcccaggaaaagccggggaatgtccatcgacgcccgacttcatccatctccaatccgtgtacttttgtttatgactagactgagccacaaactaagccttacccattagacatgtggaagtacggtagtgctttgcaacagaggcccgagcttaatccttatagtggccggggtgctacttcccacaactggcatgcacccaaaccccaccgaaaacaggttttaggggttttgaaagaggaagagagggtgacttgccttgctcgctttcccaaacgccggcttcaacttccacgaagagcggatcttccgaagctgcagcgtcgggcgcacgcggctggcggcggtcggcgccgtgggtcccgcgcgtcagccgcacccgcgggcgcgggcggctgacggccgggcccacttggcagccgcgagggcgcacccgagggcggcctcgccggcgcggccgacgggagtggcgcgcacccgcgccccgatggtcgccgccggcgaccaccggcgcggcggagcggcgcccgagagagaggagggaagggggaaacgaaggggacggtccacggctcaccccgggacaacgacgacgacgaaaacggcggccggagcggaggaagacggcggcgcggttcgggatgacgatgacgacggtgctccggcggtcggcgggcgaagcggaggcgcggacggagtcggcaaccactcggcgaagcggacggaggggtcgccgagtcggaaggaggaccggagcgacgtcggcggcgaaccgaaggtcgacggcgacggcggagagagaggagcacggcgcgagcacgaaaccgacggcgagagcgaggcggcgagcggcggaaacggaagagcgaagcacggggatcgaatatatagcaacgggagggggagagcgcggccggggagagaggaaaccgcgcgcggagatctcgggcgccattgaagacgccggcgaacttcgcgggatgaatccggacgaatccgagggagagagagagggaaaagagggggaatcgggagagggaaacgcggggagtaattcccccctcattaaggcgcgcggggaaggcgggatgcggcggattcagcggcggcggcggcgctagggcacgggcgggcggcgggagcggcgggaggaaggcgatgacaggtgggccccacccgtcagcgagagtggcgggcgggcccgcctgtcagcggcgcgcgcgcggggaggaggccgatgggccgcggggagaggagagagagggagggactgggccgagtcggcccaagaaggaagggggggaaaagaggacttc

SEQ ID NO: 53129 - DNA, 4299 bp, Oryza sativa
  Clone ID: PAT_MRT4530_55359C.1
atggagacaaggaatggttcacgcgactccaacaatgccagtggcagcgaagagccgatcgatggagcacgtgccaacggtgcatctgacaacaatccgtccccaccgcctaagaacccaacaattgctcaggtgttggacaatcagactcagatgatgacaatgatgatgcaacagatgcagcaacagtaccatcaggtgttgcaacaggtgcagcagcaagcacagcagcagcaacagaacctgcagtttggtcctccacctcctcagtccaaactattagaatttcttcgtgtcaagccgcccactttctcaagcaccaccaacccaatcgaggcccatgactggcttcatgccattgagaagaagctgaatcttttgcaatgcaatgagcaggagaaggttgcttttgctacacaccagctacaaggtcccgcttctatttggtgggacaactacatggtgacccgtccaactggggcagaagttacttggacagagttttgtcatagtttcaataaagcacaggttcccgagggaattgtggcacaaaagaagagagagttccgttccctgcaacaaggaaccagaacagttatagagtatttgcatgagttcaaccgcctcgcgcgctacgcccctgaggacgtgcgtaccgatgccaagaggcaggagaagtttctgtctggtcttgatgatgaattgattaaccagttgatctctagagattatgaggactttgagaagctggtggataaggctatccgtcaggaggagcactgtaacaaagtaaaccgtaagaggaaggcagctcagttcaggactccccaggggaagagtcagaagcctcgttccacgatgggacatcacggtggaccttccaccatgattatccggcagtaccgtccctaccacccgggtagcttcaacaagaaccaccatagtggcagtcacaacaaccgtgagcagcacagcctcaaccctactccgagttcactaaagattccagctcaatcagttcagccagctctgccagaacagcccaagaggttgggagaaaaacccgaactctgcttcaattgtaacaaacccggacacacggttggaaagtgctcgaagccaagacgtgctggacccaagttcgttcaggcccgtgttaatcatgcatctgcagaggaggcgcagtcagcaccagaggttatattgggcacattccccgtcaactcgacaccggcagtaatattgtttgattctggtgcaacccattccttcatttccaagcgttttgctggtgcacatgggttatctttagtgaagcttaagataccaatgcgagttcatactcctggaggtggcatgaccacaactcactactgcccatctgtgacagttgaaattcaaggaggagtgattgattgcgccagccgcaccatcaagttgaccaatgcaaaaggagaggtggtaaccttccagtctccagtgccgcagaagtcagggatcagtttaaaccaggctgctggtgaagaacaagaggtagcagtggagaaaaccactaagaagctggaggatattcccatagtcagagagtatccagaggtttttccggacgatctgacaacaatgccaccaaaaagggatatcgagttccggattgacttggtacctggaactgcaccgatccacaagaggccttacagaatgggagccaacgagttggcggaagtcaagaagcaagtcgatgaacagttacagaagggatacatccgcccgagcacatcgccttggggtgctccggttatctttgtggagaagaaagacaaaaccaagaggatgtgcgttgactaccgcgcactcaatgaggtcaccatcaagaacaaatatcctttgccaaggattgatgatctgtttgatcagttgaaaggagctactgtgttctctaagatagacctgcgatcagactatcaccagttgaggatccgcgaggaggatattccaaagacagcattcatcactcggtacgggttgttcgaatgcacagttatgtctttcggactcactaatgcacctgccttcttcatgaatttgatgaacaaggtgtttatggaatttctagacaagtttgtcgtggttttcatcgatgacatacttatctactccaagtccgaggaagaacatgagcagcatcttcggctggtacttgaaaagttaaaagagcaccagctatatgccaagttcagcaagtgcgacttctggcttaaggaagttcagtttctcggtcacatcgtgaatgctcaaggagtagctgtggatccagcaaatgtggagtcagttaccaaatggaccccaccaaggacagtcactcaagttcggagtttcttaggacttgcgggctattaccgccggttcattgagaacttctctaaaattgctaagccaatgacacagctattgaagaaggaagaaaagtttatctggtctgctgaatgcaataggagttttgaagaactcaaacgacggttggtgtctgcaccagtcttaatcctgcctgatcagacgaaagatttccagttgcgtcctcatgaaggcaactacccgacgcatgatctggaattagccgcagttgttcatgctttaaagatttggcggcactatctcatcggtaaccgttgtgagatggcaccatttgaagcactgtatggacgaaggtgtcgtactccgctcttctgggatcagacaggggaacgccagttgtttggtacagaagttttaaatgaggcagaagagaaagtcagagctgttagggaaagattgagaatcgcgcaatctcggcagaaaagctatgcagacaaccgccgaagggagctcgttttccaagcaggggattatgtgtatctccgtgtcactccgctcaggggagtacaccgcttccaaaccaaaggaaagttggcaccacgctttgtgggaccatatcgaattttggaacgcaggggtgaagttgcttaccagcttgagcttccctccaacatgcttggcatccataatgtgttccacgtctcccagttgaagaaatgtttgagagttcctgaggaacaggcaagtccggatcaaatcgaaatccaggaagacttgacggtgtcgccgccgcccgtccgtgcctccgcgtcgccggtcatcgccgccgtcttcatccttcgcgccggccgccgtgctcacagtgaggagctcctctcctccatccttccatctgtcccgcacgcgctgccgctccctgcgctcgccatcgccttcgtccgccgccgccggtctgtgcgccgcccgccgccgcctcccacgccgctggttgccgtcaccggcgaccgcatgccgccgccgttcgccatgcttgccggccggcttgaagccgaggccgagcccggcaccggtggcgagggtgggcgtgatggagttgggtcggccggggtgtccggttgtccagctgccggattcaccgtggcgcaagaggggaccgcccactgccttttgaggggtggggcctctcatggtctacttgtccatcagatgaatgttaagacagctttcctcaatggagagttggaggaggagatctatatggatcaaccagatggccttaatgtgattgaggaggtcaaggactttctatccaaaagctttgaaatgaaggatttgggagtggctgatgttattcttcacattaaactactgagaggagatgagggtgggattacacttgtgcaatctcactatgtggacaaggccacaagtgggtatgtgttcacacttggaaggggcgccgtttcctggaagtcttgcaagcagaccatcttaacgaggtcaacaatggaagcagaactcgcatctttagatactgccacagttgaggccaaatggcttcgtgagctcctgatggacttgccggtggttgaaaaactagtaccagcaatcctgatgaactgtgataatcaaacagtgattattaaagtgaacagttcaaaggacaacatgaagtcatccaggcatgttaaaagaagactgaagtctgtcagaaagcagaaaaactccggagtgatagcattggactatgtccagatggctaaaaatttggcagatcagtttaccaaggggctaccaccgcgactgctctgcatcatcttcactaacatgttgacaaccggcgacaacaacaacactagagacaaggagaaggagcttcccgtcaacaccaacggaggcaatactgtctcaaactccagcggagggccattctcaggggttctgtag

SEQ ID NO: 53130 - DNA, 1917 bp, Oryza sativa
  Clone ID: PAT_MRT4530_5535C.1
tcagctcaggtgctcctcaatccaatcgaacatttcatcagtgtgcaagctcgtcatctcatggtatccatatgcaagattaagctcttcctggatgtgatcagcccacccagccacctcctcccagaatcccctcttcaccactgcatccttccatggcgttgcgcggccatccttcctcatgaaccctctctcatcgacgaatccatcctccgtgaacaccctccagatcctctcggacaatccccggttcagccccgggatcctgtcggacagcatcgtcggggttagagggagctccaggctccggagctcattcacctcaacgccattgctccgcagcatcttggaattcctctccaccaatgccgccctccgctggtcctttggcatgtggaggaacatggcgggagggtatccggccggcgcgccgcccggcccgaaggagccctcggcgatcataagcacgacggcggcgagcttcatctcggccgcgagcctggagacgaagtacccgccggaggacgcgccgagggcggccaccggaaggtccgcgaggccgttctcggtggcccaggaccggatcccacgtttcgcggcgctcacctccttccccatcgaccagcactccctcgcgctcgccagggccagcaccgcgaaccgcctccgtagcgcgcgttccgtgatggcgacgtcctccggcaggccgacgcacccggggcagcgcggggacggcggccagaagttctccgggcggcagtggcacccgtgggcgacgaagaggaccgccctggccggcgccgcggggagctcccagatggcgcgcgcaccacctatggaccccaccgtcggggacagcagagcatggcccccgccacgtgcttcgtttacgcggccagcggaggtgacggcccgggacggcgtggtggtggtgccggagtagaggaatacgccggcggcaaggatcaggaggaaggccagagcaagaaccgccgggacggaggtgatcagagctgatctcctcggaggcgacgacgacgtccggctcggcgggtgaaccgcgccgcgcatctgcttccaggagaacctggtcctctggagtcgggacggggaggcgtcgcgcaagagcacgagtggcatgaggagatctggccgccggggcacgtcttgtgcacgaaccagctgctgcataggaggattcggctcgtcggggcctccgccgaggaatccggtcatgtggagcacggcgttgcggacggcgcggaggtcccggcccttgagcgtgcgcccgtgccccacgcacaccgacgaggcaaccgtcctcccctcggagccccgcctcgccgccgcgacgtaaacgtgagggggcacaatcctcgacgacgcgccggcgcccgcggagtagtccgtcctcgtgccgtcgtcctcgtagtagcctctgcgcgcgcccgcaaacgtcgtcgtcgtcggcgcggggatgcgcacgggcgccgacgacgatgaaggccgcagcggcgccaccgggcacaccgcgggttgcgcggcatggtgatggtggcggcagcgctcgtagtcgcggtggtgctccgccggccacagcacgtcggcttcctgcagctcttccatatatgcgtatcctccttcgtccggctgcggcgccgtgtccggccacagcacgtccgcctccatcaactcctcctcctcgtcgtcgttgctcgcgccggccgtggacgaggcgccggagaggaactcctccgatcgcgagcaggggccgaataacgacgcgccgctcgacgacgcggagcagcaggacgccgcctgcagctcgtagcgcatccccgacgacggcgcgccttcctgtgacgacaccgccgccgtgtcaggccacaggatgtccgcttcttggaactcttccat

SEQ ID NO: 53131 - DNA, 501 bp, Oryza sativa
  Clone ID: PAT_MRT4530_55360C.1
ggtgttgcgtttgggaattcaacccccagttgtgggtgtaggaaagatgcgttctttttggatttgggtgaagcctttgcacccatcccaacccaggatccttgttgggatgcccccaccaagaaactttgcgccaatttggtttgttgaaagggcttctgaaccgtggaaaggaatttttcccatgggggtatccactgtgcaagcaccagaatgcaacaaatggcctgttccgagatgagtcaagatccccagggaagcgcactccaatgtcttcgtggctctacccgttggacagtggtcacccaaatgcttataggctttcaagggaggactgctaaggcagtggtaaagttcaaccagcggcgatggagatggcctgtctttggctccgaggcatgggcccacaccagtgatctgagtgcagatcaacgagaagtaaactaaaggtgtaacgatcttactgtaatgaataatgtgaagaagttcgcctaaaaaaaa

SEQ ID NO: 53132 - DNA, 946 bp, Oryza sativa
  unsure (1)..(946): unsure at all n locations
  Clone ID: PAT_MRT4530_55361C.1
tttttgaaaaatattgttaaggcttgggaatctccagctcatcctaggtcaaaggggcttttaataccacttttcacgacgcgaaaataacccacgggcgttccntaagtgcgtgcataattctttgtcacagaaggcagggcccagcacacacaaagacaaccgagaaacagcggaagactagggcgacgaccacaggcgcttgacggcaggcacgagctagacaccaaagccttcatcatccaggggctcctcttctgggtttgggaaaaattgagcaagactgagtacaatcaccgtactcaacaagacacacccacaagtgccacaagacacatcttcctcacgtgtaaccacgtgccacataccaccacggtatacggacggaagacatgacatagtttccaacccatcctagccataaacaagagtaccgacccaaccccacctacggccggaacccccgggacaggtaggcaggactgagcccctagcagcaggacaccagccctgtgccatgacatctcgactaccgggccgcagctcgtgtagccttcatttgccctagagatgtccatcgacccccgactttgtccatctccatccgtgtacttttgtttataaccagactgagccacaaactaaaccttacccactagacatgtggaagtacggtagtgctttgcaacagaggcccgaagaccggtccttaggtggccgaggtgctactatcaaaaccatgcaccccgagcccagcctaaaaccattttgagggttttgaatacagggggagatgatgtgacttgccttgctcgctttcccaaacgtcggcttcaacctccacgaagagcggatctacatgaccaacggaaaagaaaaggcttttactctaataaactccatataacaagcaggaacaaagcacaaaaatggattcttgacttct

SEQ ID NO: 53133 - DNA, 2973 bp, Oryza sativa
  Clone ID: PAT_MRT4530_55362C.1
atggtgaagacaaggaatggttctcgtgtctccaacgacgccagtggcagcgaagagcagatcagtggagcacgtgccagcgatgcatctaacagcagttcatctccaccgcccaagaacccaacgatcgctcagcagcagcagcagcagaacctgcgatttggtcctccacctccccagtccaaactgctagattttctccgtgtcaagccacccactttctcaagcaccaccaacccaatcgaggccaacgattggcttcatgctattgagaagaagctgaatcttttgcagtgcaacgaccaagagaaggttgctcttgctacacaccagctgcaaggtcctgcttttgtttggtgggacaactacatggtgaccggtccagctgggacagagagggagttccgttctctgcaacaaggaaccagaacagttatagagtatttgcatgagttcaaccgcctcgcgcgctacgcccctgaggacgtgcgcactgatgccgagaggctggagaagtttttgtctggtcttgatgatgaattgactaaccagttgatctcccgagattatgaggacttccagaagctggggaacagtcagaagtctcgcttcatgacgggacatcagggtggaccttccaccatgattatccggcagcaccgtccctaccacccggttcagccagctcagccaacgcagccagaacagcctaagaggtttggagaaaagcccgaactgtgcttcaattgtaacgagctcggacacatggttggttcatgcccgaagccaagacgttctggactcaagttcgttcaagcccgtgtcaatcatgcgtctgcagaggtggcgcagtcagcaccagaggttatattgggcacatttcccatcaactcgacaccggcagtaatattgtttgattctggtgtaactcattccttcatttccaagcgttttgctggtgcacatgggttatctttagtgaagcttaagataccaatgcgagtttatactcctagaggtggcatgaccagaactcactattgcccatccgtgatagttgaaatccaagggttgatttttccagccaacctcattcttctcgaatccaaggacttcgatgtcatacttggaatggattggttgacaaggcacataggagtgattgattgcgctagccgcaccatcaagttgaccaatgcgaaaggagaagtggtaaccttccagtctctagtaccgcagaagcaagggatcagtctgaaccagtctactggtgaagaacaagaagaagcagtggagaaaaccactaagaagttggaggatattcctatcgtcagagagtatccagaggtttttccagatgacctgacaaccattccaccaaaaagggatattgagttccgaattgacttggtacctagaactgcaccgatccacaagaggccgtacagaatgggagccaacgagttggcggatgtcaagaagcaagttgatgaacagttacaaaagggatacatctgtctgagcacgtcgccttggggtgctccggttatctttgtggagaagaaagacaaaaccaagaggatgtgcgttgactaccgcgcactcaatgaggtcactattaagaacaagtaccctttgccaaggatttatgatctgtttgatcagtttaaaggagctacggtgttctctaagatagacctgcgatcaggctatcaccagttgaggatccgtgaagaggatattccaaagacagcattcatcacttggtacgggttgttcaaatgcatagttatgtctttcggactcactaatgcacctgccttcttcatgaatttgatgaataaggtgtttattgaatttctggacaagtttgtcgtagttttcaccgatgacatacttatctactctaagtccgaggaagaacatgagcagcatcttcggctggtacttgaaaagttaaaggagcaccagctatatgccaagttcagcaagtgtgacttctggcttaagaaagttcagtttcttggtcatgtcgtaagtgctcaaggagtggctgtggatccagcaaatgtggagtcagttaccaagtggaccccaccgaggacagtctctcagattcggagtttcttaggacttgcgggctattacagccgattcattgagaacttctctaaaattgctatgccaatgacacagctcttgaagaaggaagaaaagtttatctggtctgctgaatgcaacaggagttttgaagaactcaaacgacggttggtatctgcacctgttttgattctgcctgatcagacgaaagatttccaggtttattgtgatgcatctcgccaggggctaggatgcaactacccgacccacgatctggaattggccgcagttgttcatgctttaaagatctggcggcactatctcatcggtaaccgttgtgaggattatgatatgggaatacactaccatcccggcaaggccaatgtggttgcagatgccttgagcaggaagagttactgcaacgtcgcatggatagaggaactatgttgtgagaagctcatcaaactcagtatgccattcatcctggcagtaccaaaatgtaccaagacctcaaacaaaagttctggtgggggtgaagttgcttaccagcttgagcttccctccagcatgcttggcatccataatgtgttccacgtttctcagttgaagaaatgtttgagagttcctgaggaacagacaagtccttattacatcgaaattcaggaagatctgacatatgtggagaagccgactcgtatcctcgaaaccagtgtgccccacctgttggtcgtctcctacctccggcagttagagccggagccccaaccgcccgcgccaccgcctttcccgcctatccgcgcccccactccgcccgcacctcgcgcccacgtcgccgctctttccccgcgtctactgccccccgcgcgcgcatga

SEQ ID NO: 53134 - DNA, 3234 bp, Oryza sativa
  Clone ID: PAT_MRT4530_55363C.1
atggtcaccggcggcggccataggcacggcggagcggcggccgagagaggggagggaaagggggaaacgaagcggcggtccacggctcactccgggtcgacggcgacgacggaaacggcgaccgggtggacggggtcgacggtgctccggagggtcgttttgggacgtgacaatccacgacgagcgtatgatcgccggcaacctactgcccctggcggcgggtgtagggctttcactcctgctctgcgggatgttcgatggcctgagaagtttcaactgggagcaatagagaaatatgacggaagcaccgaccctgaagagtttcttcaggtctactccacagtactctatgctgccggagcagacgacaacgcattggcgagttatttaccggcagcgttgaagggatctgcacattcatggctggttcacctcccaccctactcaatttcctcgtgggcagatctgtggcaacagtttgtcgctaacttccaaggaacatacaagcgccacgcgattaaggatgacctacacgcgttgatgcagaattcgggcgaatcattgagggactatttttggcgctttaatgagtgcagaaatacgatcctcgaaatcaccgatgcttctgtaatccgcgctttcaagtctggtgtccgagatcgctacacaacccaggaattggcgacaagacagatcacaactgctcacaaactattcgagattgtcgatcgatgcgctcacgcggacgacgcactgagacgcaagaacgacaaggcaaagacaggaggagagaagaaatcagccaaggacgcacctgagtcaagcaagaaaaacagtcgcaggagtgggaaacggaaagctcaaacggaggtcctaacagcagaacctgttgacccacccaagtacccatacccacaaggcgacgacacgaagaaaatatggtaccctatacacaaattggacaagcactctctggagacttgtttcgtcttcaaaaaggcactcacgaagcaattggcgttggagaagggcaagcgagtacgtgtagtcgagaaggccgcagaagcggctactcaggactcagactcagcgtacccagacttcgacctccatgtttcgcatatcttcagaggttccacggcgtactcctcaaagcgagagtacaagaaagtggagcgcaaagtttgttcgacatggcagggggctgcgtccaagatgaagtggtcagagcagaagatcgagttctcagaggcagaccaccccaagactgtagtcgctccagggcgatatccgatcatggtcaagcccattattcggaatatcaaggtcgcacgggttttcatcgacggcggcagcttcatcaacttactcttcgccagtaccttggacgcgatggggatcccacgaagcgagttgacgcccactgatcaacccttccattggattactcctcagtcatcatccaagccattgggcatgatcacgctaccagtgacttttggccaagcaaacatctttgatgtcgctgagtttgacacagcatataacgccatcatcgggaggactgcactcgcgaagttcatagctgcttctcactatgcgtatcaagtgctcaagatgcctgggccgaagggaacaatcactattcagggaaacgcgaagctggcagtgcagtgcgacaagcagagcctcgacatggtcgagcacactcccaacccatccgccacagctgagctgctcaagaaagtgagcaaaaccaacaagacgccaaagccagatggcgcaatcaagatcattccgctctccaacgtgttcgcttggcagccgtccgacatgctgggagtccccagggaggtgatcgagcataaactcatggtgcgacacgatgccaagccagtaaaacaaaaactgcggagatttgcaccagatcaaaagcaagccatacgagaagagctcgacaagcttctcaaagttggttccatcaaagaagttctccatccagagtggctagcaaaaccagtcatggtgcgtatggccaacgggaagtggaggatgtgtgtcgacttcaccgatctcaacaaggcgtgtcccaaggatcacttccctctccctcgaatagaccaattggtggactcaacaaccggttgtgagttgttaagatttcttgacgcttactccggctaccaccagatcagcatggcaaaagaggacgaggagaagacatcattcatcacgcctttcggtgtattctgctatgtcaagatgccgtttggactgataaccgcaggaaacactttccagcacatggttcaaggggcactcaatgacaagctcggacacaatgtcgaggcctacgtcgacgacattgttgtcaagaccaagaccagcgactcattgatcgatgacctccgggaaacattcctcgtctccggaagagggatcgaagcaaatcctgagatgatcaaggcgatcgagaacatgaagtcgcccacaagactcaaggaagtccaaaagctaactggatgcatggcggcattgagcagagtcatagttgtttcctccttcccccttgaagaagtcgtgagaaacaaagacgttgtcggccgcattgcgaaatgggtagtcgagctaagccagtctgatgtccacttcgtgccacgaatagctattgagacccaggtcctcgctgattttgtagccgaatggactatgcctgaaaacatgtcaaacagtcaaaccgacagcgaaacatggacaatggcattcgacggcgcactcaacagccaaggagcaagggcagggttcatcttgacatcaccttcaggagatcagttcaagcatgcaattcacctcaacttcagggcaaccaacaacatagccgaacgagagccactcgaacctggcacttttctggacgtcctgacaaaaccatcggtgaaagaggcaaacgacgaaggtagcacggttgtccccgacatcagctcgggggctacagaggcggaacacgtcgttgccgatatcgagaccacagacgactggcggaccccgctcatcaagttcctgagtagcgacgagttgcccgatgacgacgcagaagctaagaagataacccgacaagccaagatctattcgcccacgggggaaatcaaggctgacaatgctatcaagtttatcaaagggatattctacagatatggattgcctaaccgcatcataacagacaacggctcctag

SEQ ID NO: 53135 - DNA, 4524 bp, Oryza sativa
  Clone ID: PAT_MRT4530_55364C.1
atggagacaaggaatggttcacgcgactcgaacaacgccagtggcagcgaagagccgatcaatggagcacgtgccaacggtgcatctgacaacagtccgtccccaccgcccgagaacccaacaattgctcaggtgttggacaatcagactcagatgatgacaatgatgatgcaacagatgcagcaacagtaccatcaggtgttgcagcaggtgcagcagcaagcacagctgcagcagcagaacctgcagtttggttctccacctcctcagtccaaactgctagaatttcttcgtgtcaagccgcccaccttctcaagcaccaccaacccaatcgaggcccacgactggcttcatgccattgagaagaagctgaatcttttgcaatgcaacgagcaggagaaggttgcttttgctacacaccagctacaaggtcccgcttctatttggtgggacaactacatggtgacccgtccaactggggcagaggttacttggacagagtttcgtcatagtttcaataaagcacaggttcccgagggaattgtgggacaaaagaagagagagttccgttccctgcaacaaggaaccagaacagttatagagtatttgcatgagttcaaccgcctcgcgcgctacgcccctgaggacgtgcgtaccgatgccgagaggcaggagaagtttttgtctggtcttgatgatgaattgactaaccagttgatctctagagattatgaggactttgagaagctggtggataaggctatccgtcaggaggagcactgtaacaaaataaaccgtaagaggaaggcagcccagttcaggactccccaggggaagagtcagaagcctcgtttcacgatgggacatcacggtggaccttccaccatgattatccggcagcaccgtccctaccacccggaggaggcgcagtcagcaccagaggttatattgggcacattccccgtcaactcgacaccggcagtaatattgtttgattctggtgcaacccattcctttatttccaagcgttttgctggtgcacatgggttatctttagtgaagcttaagataccaatgcgagttcatactcctggaggtggcatgaccacaactcactactgcccatctgtgacagttgaaattcaagggttgatttttccagccaacctcattcttctcgaatccaaggacctagatgtcatacttggaatggattggttggcaaggcacagaggagtgattgattgcgccagccgcaccatcaagttgaccaatgcaaaaggagaggtggtaatcttccagtctccagtgccgcagaagccagggattagtttaaaccaggctgctggtgaagaacaagaggtagcagtggagaaaaccactaagaagctggaggatattcccatagtcagagagtatccagaggtttttccggatgatctgacaacaatgccaccaaaaagggatatcgagttccggattgacttggtacctggaactgcaccgatccacaagaggccttacagaatgggagccaacgagttggcggaagtcaagaagcaagttgatgaacagttacagaagggatacatccgcccgagcacgtcgccttggggtgctccggttatctttgtggaaaagaaagacaaaaccaagaggatgtgcgtggactaccgcgcactcaatgaggtcactattaagaacaagtaccctttgccaaggattgatgatctgtttgatcagttgaaaggagctactgtgttctctaagatagacctgcgatcaggctatcaccagttgaggatccgcgaagaggatattccaaagacagcattcatcactcggtacgggttgttcgaatgcacagttatgtctttcggactcactaatgcacctgccttcttcatgaatttgatgaacaaggtgtttatggaatttctagacaagtttgtcgtggttttcatcgatgacatacttatctactccaagtccgaggaagaacatgagcagcatcttcggctggtacttgaaaagttaaaagagcaccagctatatgccaagttcagcaagtgcgacttctggcttaaggaagttcagtttctcggtcacatcgtgaatgctcaaggagtagctgtggatccagcaaatgtggagtcagttaccaaatggaccccaccaaggacagtcactcaggttcggagtttcttaggacttgcgggttattaccgccggttcattgagaacttctctaaaattgctaagccaatgacacagctattgaagaaggaagaaaagtttatctggtctgctgaatgcaataggagttttgaagaactcaaacgacggttggtgtctgcaccagtcttaatcctgcctgatcagacgaaagatttccaggtctattgtgatgcatctcgccaggggctaggatgtgtgttgatgcaggatggcaaagtggtttcttatgcttcacggcagttgcgtcctcatgaaggcaactacccgacgcacgatctggaattggccgcagtcgttcatgctttaaagatttggcggcactatctcatcggtaaccgttgtgaggtatatacagatcacaaaagtctaaagtacatcttcacccaacctgatctgaatctccgacaacgaagatggttggagctaatcaaagattatgatatgggaatacactatcatcccggcaaggctaatgtggtagcagatgccttgagcaggaagagttactgcaacgtcgcatgggtagaggaactatgctgtgaggttcaacatgatttggaacatttgaaccttggtatagttgagcacggattcgtggctgccctagaggcacagcccacactggtggagcagatggcaccgtttgaagcactgtatggacggaggtgtcgtactccgctcttctgggatcagacaggggaacgccagttgtttggtacagaagttttaaatgaggcagaagagaaagtcagagctgttagggaaagattgagaatcgcgcagtctcggcagaaaagctatgcagacaaccgccgaagggagctcgctttcgaaacaggggattatgtgtatctccgtgtcactccgctcagtggagtgcatcgcttccaaaccaaaggaaagttggcaccacgctttgtgggaccatatcggattttggaacgtagaggtgaagttgcttaccagctcgagcttccctccaacatgcttggcatccataatgtgttccacgtctcccagttgaagaaatgtttgagagttcctgaggaacaggcaagtccggatcaaatcgaaatccaggaagacttgacgtatgtggagaagccaactcgtatcctcgaaaccagcgagagaaagaccagaaacaaagtaataagattctgcaaggttcagtggagccaccactcagaggaagaggccacttgggaaagagaagatgagttgaaggccacccacccgcacctcttcgccagctcttccgaatctcgggggtgtcgccgccgcccgtccgtgcctccgcgtcgccggtcatcgccgctcgtctcttcccacgccggtcgccgccatcgcctcggtgaggaatcccctttcctccttcctttcctctcccccgtgagcgccgccgccctccgcgcgtccgccgtcgtcttcggctgccgccgccgccttcgcgccggctgccgccgtctccccgcgccgccggtcaccgccggcggcaccggtggcgagggtgggcgtgatggagttgggtcggccggggtgtccggttgtccagctgccggattcaccgcggcgcaagaggggaccgcccactgccttttgaggggtggggagctgaagatcttcctagttggagctgttttgtcaaagttggtttcgtcgctgccgtcaaggattgcctgtggagtggagtcgcccgctgctgaagtcaagcttcccggcggcggccacgtccgctgcatcatgggcaactgcgccggcgcgctgtcctgctccgtctccggcgagccgcccgccacgctgacagagtacacgctcggctcccgaccccgacctgtcgctcatcgatgggttcaacatgctggtgagcttccagctgaccaacggcggcgacgccgggtggttaagttcgagcacgtctgcccgctgacgagctactccatgttcttcaaggggctctgccccgacgcctacagctatgccaaggacgaccagaacagcaccttcacctaccccgtcgacaccaactactacgtcgacttctgcccgccgacgagcggcatgacggctggcgacgacaacggccgcggcggtggctggcggaggcagagcgcgcggtacgtgctcgatgaaatgctcagcgggaatccgtgcccattattgctagaagaaaaatcgcccccttcggagcccagtttgctcggcaggactgcgctgctgatgcgggcgctgctcagtttgtgccaggtgcgtctcctctcctacttcgattttcttgcttgttga

SEQ ID NO: 53136 - DNA, 253 bp, Oryza sativa
  Clone ID: PAT_MRT4530_55365C.1
acacatttaacatatatggaatcatatatcccacggtagagcatgggggagtcaactagttaagctaatactgtctctgtcctaaaatataataacttttggctataaatctagatacactgttgtccagatccatagctaaaaatgcttatattttggaacggagggagtataattgtataattaagctagttctcctcgtacgttacatatacatgcaagaacacacaaccccttaacttaacttgccttt

SEQ ID NO: 53137 - DNA, 504 bp, Oryza sativa
  Clone ID: PAT_MRT4530_55366C.1
atgcttgctaggataagccaggacgacgcactagagccatgggatgccacgctcaacagaatcaaggcagacaagacacgggccctgctcgagtccatcaatgtggcaagggcttccgcgagtgtggacgatgatgacggactcaaccttcaggcagcagcaacatgtcccaccagcaatttcgatgtcgtcgacgttgtgtctatcagccatcacatccaatatatcggcaacagtagcatcggcgacaaccagatgcagatgacaccgcgcctagcgccagcggctgacgccgagctgcagctgcccgagcaggagccaggagccgaggtcgcgaggaggtcaggaggagtcaaggagcagggccctgggcgtctcgccggctccgtggctggaccttggcaatggcggcctggccggctgcgagcggcgtcgggccgacggccgtcgggcgtcagccgtcgctacacgctagggcgccggatggcgggcggcggcagctag

SEQ ID NO: 53138 - DNA, 4428 bp, Oryza sativa
  Clone ID: PAT_MRT4530_55367C.1
tatgtaaaatttacataattgatcaatgttccaggaatttgctaactcgcgaccctcgccatctgcaatcttgaatgcgctcggccacaagacttgcgtgaccgtgtatggtccttcccacttgggtgagagcttgttgcgccctgcttggctttgaacccgtcagaggacgtaatcgccgatcgaaagtgtgcgtgttctaatgcacttctcgtggtatcggcgaagggcctgctggtagctggctgctctgacggcaactctttctcgatgttcctcgagtagattcacatcgtcgcttcgctgctcctcctactcttcgtcggagtacttctgtactcatgtgctctgatgtcgtagctccgtggggagcatagcttctaagctgtacacgaggaagaagggtgtctctttattcggtgttgtcagtatggtacggacagcccatagaacagaggggagttcttcgatccacttcttattgtgtgacatgagtctgtcgtagacgcgggtcttgatcccttgtagtactatatcgtttgccttttcgacctgtccattgctttgagggtgagaaaccgaggcaaaacaaatcttgactcccaatccaatgccgtaatcctggaagtcggcactgatgaactaggagccgttgtctgttatgatgcggttaggcaatccatatctgtagaatatccctttgataaacttgatagcattgtcagccttgatttcccccgtgggcgctgcttcaaaccacttggtaaatttgtcaatagccatgaataggaatttgtagccgccatgtcctcgtgggaatggtccgagtatatcgagcccccagcacgagaacggccaagtaagagggatagtctggagtgcttgcgttggcatttttgtgtgtttgctgtgaaattaacaggcttcacaccgctgcaccatgtcgcatgcgtctttgagcgcggttggccagaaaaacccttgtcgaaaagcttttcctaccaatgtccgtccgccggcgtgtgacccgcagaccccttcatgtatgtcgagtaggagatgtttgccgtcatcggacgagatgcatttgagacgtactccgtttggcgaatagatcttggcttgtcgggttatcttcttagcttctgcgtcgtcatcgggcaactcgtcgctactcaggaacttgatgagcggggtccgccagtcgtctgtggtctcgatatcggcaacgacgtgttccgcctctgtagcccccgagctgatgtcggggacaaccgtgctaccttcgtcgtttgcctctttcaccgatggttttgtcaggacgtccagaaaagtgccaggttcgagtggctctcgtctagaagcacgccgtgctacgtcatctggttcgatgttgtccttatggtatacgtgtcccatcaaaccttttctccagcttcctgacttctgcgaggtacttggataactcggggctagagcacttgtagtctttttgcacttggttcgcgactagttctcaatcccctttcacgattagtcgtttggctccaagtgcggctgctgctcttatcccggcaagtagtccttcgtactcggctatgttgttggttgccctgaagttgaggtgaattgcatgcttgaactgatctcctgaaggtgatgtcaagatgaaccctgcccttgctccttggctgttgagtgcgccgtcgaatgccattgtccatgtttcgctgtcggtttgactgtttgacatgttttcaggcatagtccattcggctacaaaatcagcgaggacctgggtctcaatagctattcgtggcacgaagtggacatcagactggcttagctcgactacccatttcgcaatgcggccgacaacgtctttgtttctcacgacttcttcaagggggaaggaggaaacaactatgactctgtgggcttggaaatagtagcgtagctttcttgatgtcataattaccgcataaagcaatttttggatgtagtaaaccggtctttgcactttctctctctcgacaacaatgacagtactcatagaatatggtgtggcggtgatatagaggaataattattcattaggttggggagcaacaagtacagggggatttgacaggtagcgcttgagcgcgatgaacgcgtcttcggcttcctatgtccatacaaatttgtcttgtttcttcaataaggcgaagaaaggttgtcctcgctctcccatcctagcgacaaacctgctcaatgccgccatgcatccagttagcttttggacttccttgagtcttgtgggcgacttcatgttctcgatcgccttgatcatctcaggatttgcttcgatccctcttccggagacgaggaatctgaggagcttgcccgatggtactccgaacgtgcatttctctgggttgagcatgaggcgatatcgtcagagattgtcgaacgtttcccggaggtcatcgatcaatgagtcgctggtcttggtcttgacaacaatgtcgtcgacgtaggcctcgacattgtgtccgagcttgtcattgagtgccccttgaaccatgtgctggaaagtgtttcctgcggttatcagtccaaacggcatcttgacatagcagaatacaccgaaaggcgtgatgaatgatgtcttctcctcgtcctcttttgccatgctgatctggtggtagccggagtaagcgtcaagaaatcttaacaactcacaaccggttgttgagtccaccaatttcttgagcagctcagctgtggcggatgggttgggagtgtgctcgaccatgtcgaggctctgcttgtcgcactgcactgccagcttcgcgtttccctgaatagtgattgttcccttcggcccaggcatcttgagcacttgatacgcatagtgagaagcagctatgaacttcgcgagtgcagtcctcccgatgatggcgttatatgttcgtgggatccccatcgcgtccaaggtactggcgaagagtaagttgatgaagctgccgccgtcgatgaaaacccgtgcgaccttgatattccgaataatgggcttgaccatgatcggatatcgccctggagcgactacagtcttggggtggtctgcctctgagaactcgatcttctgctctgaccacttcatcttggacgcagcccctcgcttgcccttctccaacgccaattgcttcgtgagtgcctttttgaagacgaaacaagtctccagagagtgcttgtccaatttgtgtatagggtaccatattttcttcgtgtcgtcgccttgtgggtatgggtacttgggtgggtcaacaggttctgctgttaggacctccgtttgagctttccgtttcccactcctgcgactgtttttcttgcttgactcaggtgcgtccttggctgatttcttctctcctcctgtctttgccttgtcgttcttgcgtctcagtgcgtcgtccgcgtgagcgcatcgatcgacaatctcgaatagtttgtgagcagttgtgatctgtcttgtcgccaattcctgggttgtgtagcgatctcggacaccagacttgaaagcgcggattacagaagcatcggtgatttcgaggatcgtatttctgcactcattaaagcgccaaaaatagtccctcaatgattcgcccgaattctgcatcaacgcgtgtaggtcatccttaatcgcgtggcgcttgtatgttccttggaagttagcgacaaactgttgccacagatctgcccacgaggaaattgagtagggtgggaggtgaaccagccatgaatgtgcagatcccttcaacgctgccggtaaataactcgccaatgcgttgtcgtctgctccggcagcatagagtactgtggagtagacctgaagaaactcttcagggtcggtgcttccgtcatatttctctattgctcccagttgaaacttctcaggccatcgaacatcccgcagagcaggagtgaaagccctacacccgccgccaggggcagtaggttgccggcgatcatacgctcgtcgtggacttctccgtcgccgccgtcgccccggggtgagccgtggaccgtcgcctcctttcccccttccctcccctctctcggccacctttccgccgcgccagtggttgccggcggcgaccatcggggcgcgggcgcgccgcctcccgccgaccgcgccggcgtggccgccctcgggcgcgccgagtggctaccgcgtggggcccggccgtcagccgcccgcgccctcgggtgcggctgacgcgtggggcccacggcaccggccggtgcgagccccggtgcgcccggtccactgtggaccgtgaggctggcgcgtgggccccactcccgtggacccgggccgcgcgcccctcccctcggcttgttcaccctagaataaacaaaaccccaactagtggacactctactcat

SEQ ID NO: 53139 - DNA, 4068 bp, Oryza sativa
  Clone ID: PAT_MRT4530_55368C.1
atggagacaaggaatggttcacgcgactcgaacaacgccagtggcagcgaagagccgatcaatggagcacgtgccaacggtgcatctgacaacagtccgtccccaccgcccgagaacccaacaattgctcaggtgttggacaatcagactcagatgatgacaatgatgatgcaacagatgcagcaacagtaccatcaggtgttgcagcaggtgcagcagcaagcacagctgcagcagcagaacctgcagtttggtcctccacctcctcagtccaaactgttagaatttcttcgtgtcaagccgcccaccttctcaagcaccaccaacccaatcgaggcccacgactggcttcatgccattgagaagaagctgaatcttttgcaatgcaacgagcaggagaaggttgcttttgctacacaccagctacaaggtcccgcttctatttggtgggacaactacatggtgacccgtccagctggggcagaggttacttggacagagtttcgtcatagtttcaataaagcacaggttcccgagggaattgtgggacaaaagaagagagagttccgttccctgcaacaaggaaccagaacagttatagagtatttgcatgagttcaaccgcctcgcgcgctacgcccctgaggacgtgcgtaccgatgccgagaagcaggagaagtttatgtctggtcttgatgacgaattgaccaaccagttgatctctagagactatgaggactttgagaagcttgtggacaaggctattcgtcaagaggagcagtgtaacaaaatgacccgtaagaggaaggcagcccagttcaggactccccaggggaagtgtcaaaagcctcgttacacgatgggacgtcacggtggaccttccaccatgattatccgacagcaccgtccctaccacccgggtagcttcaataagacccaccatagtgatagtcacaacaacagtggcagtcacagcagcctcaacccgactccaagtccattaatgattccagctcagtcagatcagccagctctgccagaacagcccaagaggttggtagaaaaacccgaactctgcttcaattgtaacaaacccggacacacggttggaaagtgcccgaagccaagacgtgccggacccaagttcgttcaggcccgtgttaatcatgcatctgcagaggaggcgcagtcagcaccagaggttatattgggcacattccccgtcaactcgacaccggcagtaatattgtttgattctggtgcaacccattcctttatttccaagcgttttgctggtgcacatgggttatctttagtgaagcttaagatacctatgcgagtgcatactcctggaggtggcatgaccacaactcactactgcccatctgtgacagttgaaattcaagggtcgatttttccagccaacctcattcttctcgaatccaaggacctagacaaagacaaaaccaagaggatgtgcgttgactaccgcgcactcaatgaggtcaccatcaagaacaagtatcctttgccaaggattgatgatctgtttgatcagttgaaaggagctacggtgttctctaagatagacctgcgatcaggttatcaccagttgaggatccgcgaagaggatattccaaagacagcattcatcactcggtacgggttgttcgaatgcacagttatgtctttcggactcactaatgcacctgccttcttcatgaatttgatgaacaagtccgaggaagaacataagcagcatcttcggttggtacttgaaaagttaaaagagccccagctatatgccgagttcagcaagtgcgacttctggcttaaggaagttcagtttctcggtcacatcgtgaatgctcaaggagtagctgtggatccagccaatgtgcagtcagttaccaagtggaccccaccaaggacagtcactcaggttcggagtttcttaggacttgcgggctattaccgccggttcattgagaacttctctaaaattgctaagccaatgacacagctattgaagaaggaagaaaagtttatctggtctgctgaatgcaataggagttttgaagaactcaaacgacggttggtgtctgcaccagtcttaatcctgcctgatcagacgaaagatttccaggtctattgtgatgcatctcgccaggggctaggatgtgtgttgatgcaggatggcaaagtggtttcttatgcttcacggcagatgcgtcctcatgaaggcaactacccgacgcatgatctggaattagccgcagttgttcatgctttaaagatttggcggcactatctcatcagtaaccgttgtgaggtatatacagatcacaaaagtctaaagtacatcttcactcaagctgatttgaatctcagacagcgaagatggttggagctgatcaaggattatgatatgggaatacattatcatcccggcaaggctaatgtggttgcagatgccttgagcaggaagagctactgcaatgttgcatgggtagagcaactatgttgcgaggttcaacgcgatctggaacatctgaaccttggtatagttgagcacggattcgtggctgccctagaggcacagcccacactggtggagcaggttcgcatagctcaagcaagtgatcctgaaatagcagagctcaaaaagaacatgagggtcggaaaagcccgaggttttgttgaggacgaacaaggaacaatctggatgggagaaagattgtgtgtacccgaaaacaaggaattaaaagacctgatactaaccgaggctcatcaaactcagtattccattcatcccggtagtactaagatgtaccaagacctcaaagagaagttctggtgggtcagcatgagaagggaaatagctgaattcgtagcactctgtgacgtctgtcaacgagtaaaggcagaacaccaaaggccagcaggtttgctacagccacttcagattccagaatggaagtgggaagaaatcggaatggatttcgtcaccggtttgcccaggacgtcatcggggcatgattctatttgggtagtccgtgaccgactcaccaaagtggctcactttcattcggtgcacactacctactcagggaagaaattagcagaactctatctggcaagaattatgtgtttacatggagtacctaagaagatcgtgtctgatcgaggaagccaattcacttcaaagttctggcagaaattacaagaagaattgggaacccggttgaatttcagcaccgcttaccatccacaaacagatggccagaccgagcgagtcaatcaaatactagaggatatgttgagagcctgtgcgcttgactttggtggggcatgggacaaaagcttgccgtatgctgagttctcgtacaacaacagttaccaagctagtctgcagatggcaccatttgaagcactgtatggacggaggtgtcgtactccgctcttctgggatcagacaggggaacgccagttgtttggtacagaagttttaaatgaggcagaagagaaagtcagagctgttagggaaagattgagaatcgcgcagtctcgggagaaaagctatgcagacaaccgccgaagggagctcgttttccaagtaggggattatgtgtatctccgtgtcactccgctcaggggagtacatcgctttcaaaccaaaggaaagttggcaccacgctttgtgggaccatatcggattttggaacgtagaggtgaagttgcttaccagctcgagcttccctccaacatgcttggcatccataatgtgttccacgtctcccagttgaagaaatgtttgagagttcctgaggaacaggcaagtccggatcaaatcgaaatccaggaagacttgacgtatgtggagaagccaactcgtatcctcgaaaccagcgagagaaagaccagaaacaaagtaataagattctgcaaggttcagtggagccaccactcagaggaagaggccacttgggaaagagaagatgagttgaaggccacccacccgcacctcttcgccagctcttccgaatctcggggtcgagattccgtttaa

SEQ ID NO: 53140 - DNA, 2046 bp, Oryza sativa
  Clone ID: PAT_MRT4530_55369C.1
ctgcggcctcctcctgctgctgctgctctgactcgatgcgtcgccctggcgttttcccatttagtatttaggcagccatggtgtaggtggaggtggaggtggccggcagaaagcgccattgcccacctgcccacctcaggtctagccgggtagggtagggtagggtaggctcgtcgtcggcgaggcattccgccattgttgctgcttgcttgctttgccgggatggagatgaggcggtttcttggtgggctatgcttcttggctctgctgcggctgggcggcgccgcggaggccgtggtcggggtcgccggcgttgacgggcggcgcgccattgccgccaccgacgaggacttcgtgtgcgcgacgatggactggtggccgccggacaagtgcgactacggcacctgcagctggggcctcgcctccctcctcaacctggatctctccaacaaaatcttgctcaatgccattcgagccttctcgccgttgaagctgcggctgggcgggtcgctgcaggacaagctggtgtacggcaccggcgacggcggagggccgtgcgcgccgttcgtcaagaacacgtcggagatgttcggcttcacgcagggatgcctgcctctccaccggtgggacgagctcaacgccttcttccaaaaatccggcgcgagaatcgtgttcgggctgaacgctctcaacggccgggttccgttgccggatgggtcgatgggagggccatgggattacaccaatgctgcatcgctgattcgttacaccgcgagcaagggttacaaaattcatggatgggagcttggaaatgaactcagtggcagtggagttggaacaaaagttggggctgaccaatatgctgcagatgtgattgcactgaaatcactagttgacactatctaccaaggcaatccatcaaagccacttgttcttgctcctggaggtttctttgatgcaggctggtttactgaagttatagtcaaaaccaggccaaacctactgaatgtggtcacccatcacatctacaacttagggccaggagtggacacacatctgattgagaagatcctgaatccatcttatcttgatggaatggtgagcacattcagcaatcttcaggggatactgaaatctgccgggacttcggctgtcgcatgggtcggagagtccggaggcgcgtacaacagcggccgccatcttgttaccgattcatttgtgttcagtttctggtttttggatcagcttgggatgtcagcaaagtatgacacgaagagttactgcagacaaagtttgattggtggcaactatggcctgctaaacaaagaaacattccaaccaaatcctgactattacagcgctctactatggcatcgcctcatgggaaccaaagttctatctgcaacattcaatggcaccaacatgattcgcacttatgcgcattgcgcaaaagattctccaggaataacactactgctgatcaacctcagtggcaacaccacaagccaagtttcagtgacaagtgaaggtgctcatgcaaacactgtgaagaagcatagcagaaagaccaggcatcttgcagctggatcaatgagagaagaataccatcttactgccaaagatggcagcttgcagagccaagtgatgctgctgaatggcagggcattggttgctgatgaaaatggggaaatccctaggctggagcctgtcaaagtggatgcagcacagccaatagctgtggctccttactccattgtgtttgctcacatacacaatttccctgcccctgcatgtagttagattagggcaagattgtttttatttttgggtgatttggtgtgattgttattgttgttataggaaaggtgaagttaggatgggtagctaagcttgcccatctcaagatgaagtaaagctgcaaggctgaaaagtttgtgatttttttttttttttggggttgttcaattgtgtaagattgggaaaaaaatgatatgatgaagaaaaggaaagggaaaagctctttcccattgaagatctttctgagat

SEQ ID NO: 53141 - DNA, 475 bp, Oryza sativa
  Clone ID: PAT_MRT4530_5536C.1
gttcatatcaggcctacaacaacatggcatccatagatcgccccatagttttcttcacagcttgcttgttcctcttgtgcgatggctccctagcccaggcagctattaagcacagagcactagtcaatggcagagttctcgtcgaggaagtccgagaggatgtagatttgataggttgcaagcatatgagccaattcggagtgtgaggtctcaagctggcacaactgattccttcgatgtctataatgagttgcttcaatgtaccggagtatgtgacgtccgccaaggtattgaacctagaggcctactactaccccattacactaatggcgcatctctagtatatatcattcaggggagagcgataacagggccgactttgcgaggctgacctgagacctaccagcagcaggaccaatcttcagggcctgcgcaattgaccgaaagaaaagccgataccgtaagtggaaggaag

SEQ ID NO: 53142 - DNA, 651 bp, Oryza sativa
  Clone ID: PAT_MRT4530_55370C.1
atggggatcccacgaagcgagttgacgcccactgatcaaaccttccatggaattactcctcagtcatcgtccaagccgttgggcaagatcacgctacctgtgactttcggccaagcaaataacttccgaacagagcagatcacctttgatgttgctgagtttgacacaacatataacgccatcatcgggaggaatgcactcgcgaagttcatggctgcatctcactacgcgcatcaagtgctcaagatgcctgggccgaagggaacaattactattcagggaaacacgaagctggtagtgcagtgcgacaagcggagcctcgacatggtcgagcacactcccaacccgcccgccacaactgagccgcccaagaaaatcagcatggcaaaagaggacgaggagaagacaacattaatcacgccgttcggcgtattctgctacgtcaagatgccattcggactgataaccgcaggaaacactttccagcgcacggttcaaggggcactcaatgacctacttggacacaatgttgaggcctacgtcgatgacattgttttcaagacaaaaacaagcgactcattgatcgatgacctccgggaaacgttcgacaacctccgacggtatcgcctcatgctcaacccggagaagtga

SEQ ID NO: 53143 - DNA, 3750 bp, Oryza sativa
  Clone ID: PAT_MRT4530_55371C.1
atggccgccgccgccgccgcagcagcagaccacgatgccgcgccgcgcgcgcacgcgctcatcctcccgtacccggcgcagggccatgtcatcccgctcatggagctcgcgtactgcctcatcgaccgtggcttcgccgtcaccttcgtcaacaccgagcacaaccaccgccgcgtcgtggccgccgccgctggcgcaggcggcgtgcaagcaccggggagccgggcacggcgcctgcggctcgtggcggtggcggacgggatgggcgacggcgacgaccgggacaacctagtccgcctcaacgccgtcatggaggaggccatcccgcctcagctggagccgattcttgatggcgccggcggcgaggggcagctgggcaaggtgacgtgcgtggtggtcgatgtcggcatgtcgtgggcgctcgatgccgtgaagcggaggggcctcccgggcgccgcgctctgggcagcgtcggcggcggtgctcgccgtgctactcggagcgcagaagctgatacgcgatggcgtcattgatgacgacggtggggcccacctgtcggtcgtcccctacctccggtcgttggagccggagctccaaccgcccgcgccgccgccttctccgctccacgtcgcgcctccactccgcgcccgcacctcgcgcccacgtcgccgccctctccccgcatctcccgcagttgaagttcttctcagttggagccgtctcagagaggttggttccgttgctgccgtcaagatggagataaggaatggttcacgcgactcgaacaacgccagtggcagcgaagagccgatcaatggagcacgtgccaacagtgcatctgacaacagtccgtccccaccgcccgagaacccaacaattgctcaggtgttggacaatcagactcagatgatgacaatgatgatgcaaccgatgcagcaacagtaccatcaggtgttgcagcaggtgcagcagcaagcacagcagcagcagcagaacctgcagtttggttctccacctcctcagtccaaactgttagaatttcttcgtgtcaagccgcccactttctcaagcaccaccaacccaatcgaggcccacgactggcttcatgccattgagaagaagctgaatcttttgcaatgcaacgagcaagagaaggttgcttttgtttggtgggacaactacatggtgacccgtccaactggcgcagaagttacttggacagagttttgtcatagtttcaataaagcacaggttcccgagggaattgtggcacaaaagaagagagagttccgttccctgcaacaaggaaccagaacagttatagagtatttgcatgagttcaaccgcctcgcgcgctacgcccctgaggacgtgcgtaccgatgacgggaggcaggagaagtttctgtctggtcttgatgatgaattgactaaccagttgatctctagagattatgaggactttgagaagctggtggataaggctatccgtcaggaggagcactgtaacaaaataaaccgtaagaggaaggcagctcagttcaggactccccaggggaagagtcagaagcctcgtttcacgatgggacatcacggtggaccttccaccatgattatccggcagcaccgtccctaccaccctggtagcttcaacaagaaccaccatagtggcagtcacaacaacagtgagcagcacagcctcaaccctactccgagttcactaaagattccagcccaatcagttcagccagctctgccagaacagcccaagagaggaggcgcagtcagcaccataggttatattgggcacattccccgtcaactcgacaccggcaacaagtttgtcgtggttttcatcgatgacatacttatctactccaagtccgaggaagaacatgagcagcatcttcggctgttgcgtcctcatgaaggcaactacccgacgcatgatctggaattggccgcagttgttcatgctttaaagatttggcggcactatctcatcggtaaccgttgtgaggattatgatatgggaatacattatcatcccggcaaggctaatgtggttgcagatgccttgagcaggaagagctactgcaatgttgcatgggtagagcaactatgttgtgaggttcaacgcgatttagaacatctgaaccttggtatagttgagcacggattcgtggttgccctagaggcacagcccacactggtagagcaggttcgcatagctcaagcaagtgttcctgaaatagcagagctcaaaaagaacatgagagttggaaaagcccgagaagttttaaatgaggcagaagagaaagtcagagctgtcagggaaagattgagaatcgcgcaatcacggcagaaaagctatgcagacaaccgcagaagggagctcgttttcgaaacaagggattatgtgtatctctgtgtcactccgctcaggggagtacatcgcttccaaaccaaaggaaagttggcaccacgctttgtgggaccatacaggatcttggaatgtagaggtgaagttgcttaccagcttgagcttccctccaacatgcttggcatccacaacgtgttccacgtctctcagttgaagaaatgtttgagagttcctgaggaacaggcaagtccggatcacatcgaaattcaggaagatcttacgtggggcccacctgtcggtcgtcccctacctccggtcgttggagccggagctccaaccgcccgcgccgccgctttctccgctccacgtcgcgcctccactccgcgcccgcacctcgcgcccacgtcgccgccctctccccgcatctcccgcgtgcgcgcgcccgcaagtggtgcaccactcaaattagagaacaactcattccgtctctccgagttcacgccacccatggacgcgaccttccttgcatggaacttcatgggcaaccgtgatgcagaacgtatggtgttccattaccttacctcctccgcacgggctgctgcggccaaagcagacattctcctctgcaactcattcgtggagttggagccagccatctttactctaaaatccccagccaccatcctccctattggaccacttcgtaccgggcagcgttttgctcatcaggtagaagtggttgggcacttttggcaaaccaatgatgacacatgcctctctttccttgatgaacaaccctatggttctgttgtatatgtggcatttggcagtcttactatcatgagcccaggacaactaaaggaacttgcactagggctagaggcttctggtcatccatttctatgggtagttaggcctggacttgctggtaacctccctacctcattcttggacgccaccatgggacaaggaaagggtatagtggtggagtgggctccacaggaacaggtgctagcgcaccctgcagttgggtgctttgtaacgcattgcgggtggaactcaacggtagagagcattcgtaatggagtgcccatgctatgttggccatatttcaccgatcagttcacaaatcaaatatacatttgtgatatttggcggattgggctaaagatggtgcaaacctgtggtgaggggatcgtgaccaaggagataatggtagagaggttgaaagagctactactagatgagggtatcaaggaaagggtgcaaaggttgaaggagtttgcagaaacaaacatgagcgaagagggtgagtccaccagtaatttgaacgcagttgtcgagcttatgacaaggccaatgtcatag

SEQ ID NO: 53144 - DNA, 149 bp, Oryza sativa
  Clone ID: PAT_MRT4530_55372C.1
ttcttatctaaattgtcagcttctataccacgggggggatgttcatggaagagtgggtctttcctctagaagatatcagaacagcctgcgactgagttccagattagatcagatgaactaaacaaggtgcacatgaacctacagcatat

SEQ ID NO: 53145 - DNA, 536 bp, Oryza sativa
  Clone ID: PAT_MRT4530_55373C.1
cacgctttggttttcgccgcggcggcggcgcccttccccgaatctcctcgtcgtcgttcgcggcggcgccgccacatccccgcagcgttgcgccaaggaagtgatccctactcaacccgccatcggcgagaccgataaaccctagccctagctaggtaggccgcctgggccgattcccgatggagaagaagaagacgacgagggcggaggatgcgggtgcggatgtggatgcacagttgccggcgcgtcgggtggcggcggcggcggagccgaagcgagcccccggcgccgacgcctacgccgccgccaggtacaggctgttcaggaacaacttcgtggcggccgccgtcgcggtggccctgtgcctcggcgcgctggtccacaccatcctctgccgcgacgacccgacggtcgtccctaggtacgtcttgcctctgctcgtcatgtgctgtgcaaccgcggaagtcgttcgcaactatgtccagatgtacgggtggtctgtccccatgggagttgccaggttcaggatgaagtga

SEQ ID NO: 53146 - DNA, 2709 bp, Oryza sativa
  Clone ID: PAT_MRT4530_55375C.1
atggtgaagacaaggaatggttctcgtgacttcaccaacgtcagtggcagtgaagagcatatcagtttagcacgtgccagcgatacatctaacgacaattcatctccaccgcatgagaacccaacgatcactcaggtgcagcaacaagcacagcagcagcagcagcagaacctgcggtttggtcttccaccatcccagtccaaactgctagagtttctccgtatcaagccacccactttctcaagcaccaccaacccaatcgaggccaacgattggctccatgcgattgagaagaagttgaatcttttgcaatgcaacgatcaggagaaggttgcttttgctacacaccagctgcaaggtcccgcttctgtttggtgggacaactacatggtgacccgtccagctaggacggaagttacttggtcagagttttgtcagagttttaataaggcacaggttcccgagggaatcatagcacaaaagaagagagagttccgttctctgcaacaaggaaccagaacagttatagagtatctgcatgagttcaaccgcctcgcgcgctacgctcctgaggacgtgcgcactgatgccgagaggcaggagaagtttttgtttggtcttgatgatgaattgaccaaccagctgatctccaaggattatgaggactttgagaagctggtggacaaggctatccgtcaagaggagcagtgcaacaaaatgaacctgaagcttaagataccaatgcgagttcatactcctggaggtggcatgaccacaactcactactgcccatcagcgacagttgaaattcaagtggtgatttttccagccaacctcattcttctcgaatccaaggacctagatgtcatacttggaatggattggctgacaaggcacagaggagtgattgattgcgctagccgcaccattaagttgaccagtgcgaagggagaagtggccacaggtgaagaacaagaggtagcagtggagaaaaccactaagaagttggaggatattcccatagtcagagagtatccagaggtttttccggaggatctgaccacaatgccaccaaaaagggatatcgagttccgaattgacttggcaccgggaactgcaccgatccataagaggccgtacagaatgggagccaacgagttggcagaagtcaagaagcaagttgatgaacagctaccgaagggatacattcgcccgagcacgtcgccttggggtgctccggtaatttttgtggaaaagaaagacaaaaccaagaggatgtgtgtcgactaccgcgcactcaatgaggttactattaagaacaagtaccctttgccaaggatcgatgatctgtttgatcagttgaaaggagctactgtgttctataagatagacctgcgatcaggctatcaccagttgaggatccgtgaagaggatattccaaagatagcattcatcactcgttatgggttgttcgaatgcacagttatgtctttcggacccactagtgcacctgccttcttcatgaatttgatgaacaagttaaaagagcaccagctatatgccaagttcagcaagtgtgacttctggcttaaggaagttcagtttctcggtcacatcgtgaatgctcaaggggtagctgtggatccagcaaatgtggagtcagtcaccaagtggaccccaccaaagacagtcactcagattcggagttttctaaggctagcgggctattaccgccggttcattgagaacttctctaaaattgcgaagccaatgacacagctattgaagaaggaagaaaattttgaagaactcaagcgacggttggtatctacaccagttttaattttgccagatcaggcgaaagatttccagttgcatcctcatgaaggcaactacccgacccatgatctggaattggccgcagttgttcatgctttaaagatctggcggcactatctcattggtaatcattgtgagcgaagatggttggagctaatcaaagattatgatataggaatacactaccatcccggcaaggctaatgtggttgtaaatgccttgagcaggaagagttactgcaacgtcgcatgggtagaggaactatgctgtgaggttcaacgtgatttggaacatctaaaccttggtatagttgagcacggattcgtggctgccctagaggcacaacccacactggtggagcagcgagtaaaggcagagcaccaaaggccagcaggtttgctacaaccccttcagattccagaatggaaatgggaagaaatcggaatggatttcattacggttttaaatgaggtagaagagaaagtcagagctgtcagggaaagattgagaatcgcgcaatctcgacagaaaagctatgcagacaaccgccgaagggagctcgttttcgaagcaggggattatgtgtatctccgtgtcactccgctcaagggagtacatcgcttccaaaccaaaggaaagttggcaccacgctttgtgggaccatatcggatttcggaacgcaggggtgaagttgcttaccagcttgagctcccctccaacatgcttggcattcataatgtgttccacgtctctcagttgaagaaatgtttgagagttcctgaggaacaggcaagtccggatcacatcgaaattcaggaagatctgacgtatgtggagaagccgaccgtatccttgaaaccaacgagataa

SEQ ID NO: 53147 - DNA, 252 bp, Oryza sativa
  unsure (1)..(252): unsure at all n locations
  Clone ID: PAT_MRT4530_55376C.1
aaccgaataggccacaagtttgaattacgatgctcattagggtgattgtaaggttgctctttttgaaatgtatagtgatgctctgaataccatgtccctgtttctaaattgtaatgatgcatttcaaatgtgccatgtctaattcagtttatgtttttcacatgtttaattatttcagaccttaattgaacttatatggtcgttcgaagtcctgtttgtatagaaattncagtttaattccaaaaaaaaaaa

SEQ ID NO: 53148 - DNA, 4173 bp, Oryza sativa
  Clone ID: PAT_MRT4530_55377C.1
atggcagttaaggaccggttcacgggaaaccctgggagacttaccgtgctgaccacaagcgggagtggctgttttactgctttcaactactggtttgaaatgcctgctttttgcaaaagaacacctagcttcctttggttatatcctgcatcatacctccttttccgtggcagcgaagagccgatcaatggagcacgtgccaacagtgcatctgacaacagtccgtccccatcgcctgagaacccaacaattgctcaggtgttgaacaatcagactcagataatgacaatgatgatgcaacagatgcagcaacagtaccatcaggtgttgcagcaggtgcagcagcaagcacagcagcagcagcagaacctgcagtttggtcctccacctcctcagtccaaactgttagaatttcttcgtgtcaagccgcccaccttctcaagcaccaccaacccaatcgaggcccacgactggcttcatgccattgagaagaagctgaatcttttgcaatgcaacgagcaagagaaggttgcttttgctacataccagctgcaaggccccgcttctgtttggtgggacaactacatggtgacccgtccagctggggcagaggttacttggacagagttttgtcatagtttcaataaagcccaggttcccgagggagttgtggcgcaaaagaagagagagttccattccctgcaacaaggaaccagaacagttatagagtatttgcatgagttcaaccgcctcgcgcgctacgcccctgaggacgtgcgtaccgatgccgagaagcaggagaagtttatgtctggtcttgatgatgaattgaccaaccagttgatctctagagactatgaggactttgagaagcttgtggacaaggctattcgtcaagaggagcagtctaacaaaatgaaccaggaggtgcagtcagcaccagaggttatattgggcacattccccgtcaactcgacaccggcagtaatattgtttgattctggtgcaacccattccttcatttccaagcgttttgctggtgcacatgggttatctttagtgaagcttaagataccaatgcgagttcatactcctggaggtggcatgaccacaactcactactgcccatctgtgacagttgaaattcaagggttgatttttccagcccacctcattcttctcgaatccaaggacctagatgtcatacttggaatggattggttgacaaggcacagaggagtgattgattgcgccagccgcaccatcaagttgaccaatgcaaaaggagaggtggtaaccttccagtctctagtgccgcagaagccagggatcagtttaaaccaggctgctggtgaagaacaagaggtagcagtggagaaaaccactaagaagctagaggatattcccatagtcagagagtatccagaggtttttccggacgatctgacaacaatgccaccaaagagggatatcgagttccggattgacttggtacctggaactgcaccgatccacaagaggccttacagaatgggagccaacgagttggcggaagtcaagaagcaagtcgatgaacagttacagaagggatacatccgcccgagcacgtcgccttggggtgctccggttatctttgtggagaagaaagacaaaaccaagaggatgtgcgttgactaccgcgcactcaataaggtcaccatcaagaacaagtatcctttgccaaggattgatgatctgtttgatcagttgaaaggagctactgtgttctctaagatagacctgcgatcaggctatcaccagttgaggatccgcgaagaggatattccaaagacagcattcatcactcggtacgggttgttcgaatgcacagttatgtctttcggactcactaatacacctgccttcttcatgaatttgatgaacaaggtgtttatggaatttctagacaagtttgtcgtggttttcatcgatgacatacttatctactccaagtccgaggaagaacatgagcagcatcttcggctggtacttgaaaagttaaaagagcaccagctatatgccaagttcagcaagtgcgacttctggcttaaggaagttcagtttctcggtcacatcgtgaatgctcaaggagtagctgtggatccagcaaatgtggagtcagttaccaaatggaccccaccaaggacagtcactcaggttcggagtttcttaggacttgcgggctattaccgccggttcattgagaacttctctaaaattgctaagccaatgacacagctattgaagaaggaagaaaagtttatctggtctgctgaatgcaataggagttttgaagaactcaaacgacggttggtgtctgcaccagtcttaatccagcctgatcagacgaaagatttccagatttggcggcactatctcatcggtaaccgttgtgaggtatatacagatcacaaaagtctaaagtacatcttcactcaacctgatttgaatctcagacagcgaagatggttggagctgatcaaggattatgatatgggaatacattatcatcccggcaaggctaatgtggttgcagatgccttgagcaggaagagctactgcaatgttgcatgggtagagcaactatgttgtgaggttcaacgcgatttggaacatctgaaccttggtatagttgagcacggattcgtggttgccctagaggcacagcccacactggtggagcaggttcgcatagctcaagcaagtgatcctgaaatagcagagctcaaaaagaacatgagagttggaaaagcccgaggttctgttgaggatgaacaaggaacaatctggatgggagaaagattgtgtgtacccgaaaacaaggaattaaaagacctgatactaaccgaggctcatcaaactcaatatttcattcatcccggtagtacaaagatgtaccaagacctcaaagagaagttttggtgggtcagcatgagaagggaaatagctgaattcgtagcactctatgacgtctgtcaacgagtaaaggcagaacaccaaaggccagcaggtttgctacagccacttcagattccagaatggaagtgggaagaaatcggaatggatttcatcaccggtttgcccagaacgtcatcggggcatgattctgtttgggtagtcgttgaccgactcaccaaagtggctcacttcattccggtgcacactacctactcagggaagaaattagcagaactctatctggcaagaattatgtgtttacatggtgtacctaagaagatcgtgtctgatcgaggaaaccaatttacttcaaagttctggcagaaattacaagaagaattgggaacccggttgaatttcggcactgcttaccatccacaaacggatggccagaccgagcgagtcaatcaaatactagaggatatgttgagagcctgtgcgcttgactttggtggagcatgggacaaaagcttgccgtatgctgagttctcttacgacaacagttaccaagctagtctacagatggcaccgtttgaagcactgtatggacgaaggtgtcgtactccgctcttctgggatcagacaggggaacgccagttgtttggtacagaagttttaaatgaggcagaagagaacgtcagagctattagggaaagattgagaatcgcgcaatctcggcagaaaagctatgcagacaaccgccgaagggagctcgctttcgaaacaggggattatgtgtatctccgtatcactccgctcaggggagtacatcgcttccagaccaaaggaaagttggcaccacgctttatgggaccatacaggatcttggaacgtagaggtgaagttgcttaccagcttgagcttccctccaacatgcttggcatccacaacgtgttccacgtctctcagttgaagaaatgtttgagagttcctgaggaacaggcaagtccggatcacaccgaaattcaggaagatctgacatatgtggagaagccgactcgtatcctcgaaaccagcgagagaaggaccagaaacaaagtaataagattctgcaaggttcagtggagccaccactcagaggaagaagccacttgggaaagagaagatgagttgaaggccgcccacccgcacctcttcgccagctcttccgaatctcggggtcgagattccgtttaa

SEQ ID NO: 53149 - DNA, 1692 bp, Oryza sativa
  Clone ID: PAT_MRT4530_55378C.1
tttttctatagctaagctctgagctccatggccatgaagtgcttcttcctcttcttcaccttcctcggggccttcttccccggcgccgccgtcggcgccgggctgaaggtcgggttctacaaagacgtgcccgtcggcggagcgcctggtgcagcaggcggtggccaccgcgttcaagaacaacagcggcgtcgcccccggcctcatccggctgcacttccatgactgttttgtcagaggctgcgacgcctcggttttgatcgacgggaacgacaccgtgaagaccgcgcccgtggccaagcggaagcagcacacacgaacactcgaaacaccgctcctgcttcaaattcgcatggctccgagaggcagctcctgcacggcgggtgatgggcgtggccgtcgccgtggcggcttgcgcgctgtgcctcctgccggcgacgaccagcggcgcgctccgcgtcgggttctaccagagcagctgccccaacgccgaggcgctcgtccgccaggccgtcgccgcggccttcgccagggacgccggcgtcgccgccggcctcatccgcctccacttccacgactgcttcgtcagggggtgtgatgcatccgtcctcctgaccaagaaccccgccggtggccagacggagcgcgacgcgacgccgaacaacccgagcctccggggcttcgaggtgatcgacgccgccaaggccgccgtcgaggcggcgtgcccgcgcaccgtctcctgcgccgacatcatcgcgttcgccgcccgcgacagcgtcaagctaaccggcaacgtcgactaccaggtccccgccggccgccgcgacggcagcgtgtccaacggcaccgaggccctccacaacctgcccccgcccaacgccacggcgcagcagctcgccgacacgttcttcgccaacaagttcctcaccctcgaagacatggtcgtcctctccggcgcccacaccgtcggccgctccttctgcgcctccttcttcaaccgcgtctggaacggcaacacccccatagtggacgccgggctggacccggcgtacgcggcgcagctgcgggcgctgtgccccacaagggacacgctggcgacgacgccgatggacccggacacgccggcgacgctggacaacaactactacaagctgctgccgcaggggaaggggctctgcttctccgacaaccagctgcgggtgaacgccaccatgaacgcgctggtgacccggttcgcggcgaacgaggcggagtggaagcagcggttcgccgacgacatggtgaagatgggtcacctcgaggggcagaccaggcggtgcggccagatcaaggtcgactgcgacgtcgtcaaccccgccgccttcgatcaggaggtagagctggccggcgaggatcaggagtccggaggcggcgtcgcggcatgctagccacgtgtcctttctgatcatgcatgtcgaccattttatgtatcgtgtgttcttacttgttatatttatgctgcttgtatgatctattaattttagtggttgcgtgtcgtcatgtcttgtcgatcgatctttcgtacaagaaattgctcttggaatgttttaggtcggattccagtgatgaagaataagtactacgtatgtacaaggaaaattggcgaaaaaaaaaaaaaaaaaaactttgtgttaaaaaaaaaaaaaaaaaaaa

SEQ ID NO: 53150 - DNA, 2106 bp, Oryza sativa
  Clone ID: PAT_MRT4530_55379C.1
atggagataaggaatggttcacgcgactcgaacaacgccagtggcagcgaagagccgatcaatggagcacgtgccaacggtgcatctgacaacagtccgtccccaccgcccgagaacccaacaattgctcaggtgttggacaatcagactcagataatgacaatgatgatgcaacagatgcagcaacagtaccatcaggtgatgcagcaggtgcagcagcaagcacagctgcagcagcagaacctgcagtttggtcctccacctcctcagtccaaactgttagaatttcttcgtgtcaagccgcccactttctcaagcaccaccaacccaatcgaggcccacgactggcttcatgccattgagaagaagctgaatcttttgcaatgcaacgagcaggagaaggttgcttttgctacacaccagctacaaggtcccgcttctatttggtgggacaactacatggtgacccgtccggctggggcagaggttacttggacagagtttcgtcatagtttcaataaagcacaggttcccgagggaattgtgggacaaaagaagagagagttccgttccctgcaacaagaaaccagaacagttatagagtatttgcatgagtttaaccgcctcgcgcgctacgcccctgaggacgtgcgaaccgatgccgagaagcaggagaagtttatgtctggtcttgatgatgaattgaccaaccagttgatctctagagactatgaggactttgagaagcttgtggacaaggctattcgtcaagaggagcagtgtaacaaaatgaaccaggaggcgcagtcagcaccagaggttatattgggcacattccccgtcaactcgacaccggcagtaatattgtttgattctggtgcaacccattccttcatttccaagcgttttgctggtgcacatgggttatctttagtgaagcttaagataccaatgcgagttcatactcctggaggtggcatgaccacaactcactactgcccatctgtgacagttgaaattcaagggttgatttttccagccaacctcattcttatcgaatccaaggacctaaatgtcatacttggaatggattggttggcaaggcacagaggagtgattgattgcgccagccgcaccatcaagttgaccaatgcaaaaggagaggtgaagaaagacaaaaccaagaggatgtgcgttgactaccgcgcactcaatgaggtcactattaagaacaagtaccctttgccaaggattgatgatctgttcgatcagctgaaaggagctactgtgttctctaagatagacctgcgatcaggttatcaccagttgaggatccgcgaagaggatattccaaagacagcattcatcactcggtacgggttgttcgaatgcacagttatgtctttcggactcactaatgcacctgccttcttcatgaatttgatgaacaaggtgtttatggaatttctagacaagtttgttgtggttttcatcgatgacatacttatctactccaagtccgaggaagaacatgagcagcatcttcggctggtacttgaaaagttaaaagagcaccagctatatgccaagttcagcaagtgcgacttctggcttaagaaagttcagtttctcggtcacatcgtgaatgctcaaggagtagctgtggatccagcaaatgtggagtcagttaccaaatggaccccaccaaggacagtcactcaggttcggagtttcttaggacttgcgggttattaccgccggttcattgagaacttctctaaaattgctaagccaatgacacagctattgaagaaggaagaaaagtttatctggtctgctgaatgcaataggagttttgaagaactcaaacggcggttggtgtctgcaccagtcttaatcctgcctgatcagacgaaagatttccaggtctattgtgatgcatctccccaggggctagaatgtgtgttgatgcaggatggcaaagtggtttcttatgcttcacggcagttgcgtccccatgaaggcaaccaccccacgcacgttctggaattgaccacaaaaatacatgctttaaagatttggcggcactgcatggggatcctctag

SEQ ID NO: 53151 - DNA, 458 bp, Oryza sativa
  Clone ID: PAT_MRT4530_5537C.1
agcttcaaatcaactatagtcaatttaataaccaattcatatacaatagttatctataaacatatatactacactaattaatatatagtcccacctgtcatacaaacattgtgtcttggagtccgtgctgcagctggctacaaatctgtagcccgctactcttctctctcttcttttatcttctggatatgtgtttatagctggtttatagatgcagagtagtcattcagactatttcagctaaatacaataccaaaatcaaggaaagatgactacaccattgaactccgtttgtctcagttgtttagcatctttgtccattgcgccttattttctgtcatcctttgctgctgaatcccccatccctttgaacagaaacctgtcaggagagctgcttgcttggaaagctaagaagaaatttatttcagatgtgtgttttttacttcatcttttgttca

SEQ ID NO: 53152 - DNA, 322 bp, Oryza sativa
  unsure (1)..(322): unsure at all n locations
  Clone ID: PAT_MRT4530_55380C.1
ggtgtgatccttctttctttacgtcgcgctgtcttttttttttttattaacaaatgaaccgtttagttgattctgagcagtatctcaccaatgaagaccactcatcggcatgagatatgatgttcccgtagtgtttgacagaagcgcaccttgtacataatttttctttctgngctcccccccaaaagcctaggcccctacttgacgcagccgagaccaacaacccccccccccaagctgcctcaggggggggcattttttaccccccccccgagagcgacaaaaacaccactccccgggggggcctcacccgaagcccctc

SEQ ID NO: 53153 - DNA, 3510 bp, Oryza sativa
  Clone ID: PAT_MRT4530_55381C.1
atggcagttaaggaccggttcacgggaaaccctgggagacttactgtgcttaccacaagcgggagtggctgttttactgctttcaactactgctttgaaatgcctgctttatgcaaaagaatccctagcttcctttggttatatcctgcatcatacctcctcttccggtatgacttgttgagtacagtgggtagtactcagtcttgctctcttttcccccacaccagagttgaagttcttctcagtggagccgtctcagagaggttggcttcgttgctgccgtcaagatggagacaaggaatggttcacgcgactccaacaacgccagtggcagcgaagagccgatcaatggagcacgtgccaacagtgcatctgacaacagtccgtccccaccgcccaggtgttggacaatcagactcagatgatgacaatgatgatgtaacagatgcagcaacagtaccatcaggtgttgcagcaggtgcagcagcaagcacagcagcagcagcagaacctgcagtttggtcctccacctcctcagtccaaactcttcatgccattgagaagaagctgaatcttttgcaatgcaacgagcaagagaaggttgcttttgctacacaccagctgcaaggtcctgcttctgtttggtgggacaactacatggtgacccgtccaactggggcagaggttacttggacagagttttgtcatagtttcaataaagcacaggttcccgagggaattgtggcacaaaagaagagagagttccgttccctgcaacaaggaaccagaacagttatagagtatttgcatgagttcaaccgcctcgcacgctacgcccctgaggacgtgcgtaccgatgacgggaggcaggagaagtttctgtctggtcttgatgatgaattgactaaccagttgatctctagagattatgaggactttgagaagctggtggataaggctatccgtcaggaggagcactgtaacaaaataaaccgtaagaggaaggcagctcagttcaggactccccaggggaagagtcagaagcctcgtttcacgatgggacgtcacggtggaccttccaccatgattatccggcagcaccgtccctaccacccgggaagcttcaacaagaaccaccatagtggcagtcacaacaacagtgagcagcacagcctcaaccctactccgagttcactaaagattccagctcaatcagttcagccagctctgccagaacagcccaagaggttgggagaaaaacccgaactctgcttcaattgtaacaaacccggacacacggttggaaagtgcccgaagccaagacgtgctggacccaagttcgttcaggcccgtgtcaatcatgcatctgcagaggaggcgcagtcagcaacagaggttatattgggcacattccccgtcaactcgacaccggcagtaatattgtttgattctggtgcaacccattccttcatttccaagcgttttgctggtgcacatgggttatctttagtgaagcttaagataccaatgcgagttcatactcctggaggtggcatgaccacaactcactactgcccatctgtgacagttgaaattcaagggttgatttttccagccaacctcattcttctcgaatccaaggacctagatgtcatacttggaatggattggttgacaaggcacagaggagtgattgattgcgccagccgcaccatcaagttgaccaatgcaaaagaagaggtggtaaccttccagtctccagtgccgcagaagccagggattagtttaaaccaggctgctggtgaagaacaagaggtagcagtggagaaaaccactaagaagctggaggatattcccatagtcagagagtatccagaggtttttccggacgatctgacaacaatgccaccaaaaagggatatcgagttccggattgacttggtacctggaactgctccaatccacaagaggccttacagaatgggagccaacgagttggcggaagtcaagaagcaagtcgatgaacagttacagaagggatacatccgcccgagcacgtcgccttggggtgctccggttatctttgtggagaagaaagacaaaaccaagaggatgtgcgttgactaccgcgcactcaatgaggtgtttatggaatttctagacaagtttgtcatggttttcatcgatgacatacttatctactccaagtccgaggaagaacatgagcagcatctccggctggtacttgaaaagttaaaaaagcaccagctatatgccaagttcagcaagtgcgacttctggcttaaggaagttcagtttctcggtcacatcgtgaatgctcaaggagtagctgtggatccagcaaatgtggagtcagttaccaaatggaccccaccaaggacagtcactcaggatggcaaagtggtttcttatgcttcacggcagttgcgtcctcatgaaggcaactacccgacgcatgatctggaattggccgcagttgttcatgctttaaagatttggcggcactatctgatcggtaaccgttgtgagcgaagatggttggagctgatcaaggattatgatatgggaatacattatcatcccggcaaggctaatgtggttgcagatgccttgagcaggaagagctactgcaatgttgtatgggtagagcaactatgttgtgaggttcaacgcgatttggaacatctgaaccttggtatagttgagcacggattcgtggttgccctagaggcacagcccacactggtggagcagtattccattcatcccggtagtactaagatgtaccaagacctcaaagaaaagttctggtgggtcaacatgagaagggagatagctgaattcgtagcactctgtgacgtctgtcaacgagtaagggcagaacaccaaaggccagcaggggaacgccagttgtttggtacagaagttttaaatgaggcagaagagaaagtcagagctgtcagggaaagattgagaatcgcgcaatctcggcagaaaagctatgcagacaaccgccgaagggagctcgctttcgaaacaggggattatgtgtatctccgtgtcactccgctcaggggagtacatcacttccaaaccaaaggaaagttggcaccacgctttgtgggaccatacaggatcttggaacgtagaggtgaagctgcttaccagcttgagcttccctccaacatgcttggcatccacaacgtgttccacgtctctaagttgaagaaatgtttgagagttcctgaggaacaggcaagtccagatcacatcgaaattcaggaagatctgacgtatgtggagaagccgactcgtatcctcgaaaccagcgagagaaggaccagaaacaaagtaatcagattctgcaaggttcagtggagtcatcactcagaagaagtggccacttgggaaagagaagatgagttgaaggccacccacccgcacctcttcgccagccattccgaatctcgaggtcgagattccgtttaa

SEQ ID NO: 53154 - DNA, 469 bp, Oryza sativa
  unsure (1)..(469): unsure at all n locations
  Clone ID: PAT_MRT4530_55382C.1
atttgtgcttcttggatactgaagtactgagagaaggaagaatagcttcccatactttttttntgtgataaaaggagttntttttaacagtttgggacatacaagggaaatagatgacgggtactaacaaggccaggagagttgagagagtgtgccagcttttttttgaaggcatatacaaaaacataaaattctttttggatttcatttttgttcttccggcgatgatggctgctagtggttaatctgctgcataccatgtacaatgatgagtgtttacagcgtttttttcctccttatattcattcttttatcacatagatggaccttgtgtattttgaacacacttccttttcccccttgttgtagagtggacatgatacatgctgttggttccctttgtaataatagaatgttcaagcttagttccactctgttttgaaaaaaaaaaaaaaaaaaaaaaaaaaaa

SEQ ID NO: 53155 - DNA, 527 bp, Oryza sativa
  Clone ID: PAT_MRT4530_55383C.1
tctggcgccgtctccctgccgacgtggcggggcgatgctgaggtggctagggggagcgcgccagagtggctggcgcccctcccccctacctcagcagctgaagcagaatctttaacatgcttagaagggctaaaagaagcaatgaagtggattcatatgtcgattattctggaactagacaacgctgaagttgttcaggcgttaacaaagcaggtggcctcaagatcctcttgggcgatgacaattgcagaaatcaacagtgtgatacaatgtatctaacgggtgcaagtgcacaagattaagagagaagcaaatagggttgctcatgttttagcgcaaatggcaatgagtattaggtcgtgtggggagtggaggttgtgtgccccctcaccaatcctagacttgttaaaccagaaatatttagccggagaagtcgatttaattacacccccgcgcctgtgcagatcgaggagaggtcccccggctccgtatattcgtctaatgacttgctgggccgccctttgcca

SEQ ID NO: 53156 - DNA, 216 bp, Oryza sativa
  Clone ID: PAT_MRT4530_55384C.1
atgttgtgttgggaaatcaaggttaattggcaaaaggaaatcagttttgctttgttcataagagcacctgcaatggtaaaatgctgggtgtatgtggagaaaacactctgcaaacagccacatgttaccgagtttctcaaagcactaggtaacatcctaaccatgccgttccacagattgggacggcaacaggtaacggtagcggaacggaaacag

SEQ ID NO: 53157 - DNA, 618 bp, Oryza sativa
  Clone ID: PAT_MRT4530_55385C.1
atataaatggcactctgcatagattcaatcggtgtagtattcttttcttcatatgtacagcaaattcttttctattctctgtctgtcaaacatgatgtattcatgtacacgaagaatgaaaaatgtatatactactagtagtagtatttttacaagcagatcaactcagggagggaaccaagattctgctaactgcaaagttggttgcagagttggttgatcttatcttgcgtggcatccgctataaggtagctccggtgtacgtttgtgccttcacatgtcaagtttaatgtattcgcttgttgcattacctgcaaaggggaacaatttggtcataccatgaactgtcaagagatatgtccttcatagccattttcagaatctagccaaagcaatttcgatgcaattaaatgcttcagatttcaacaattcagattccaacaatttagttgagcttcgattagataccaaaaactgtagtattatgcaggagcaatagtctattactcagcaagaacaacacatttcttgtctacattatacttcaaatttctttagcttggttctattcattctttgctgatggcactatcacttaaaaaggtaaacaaataatga

SEQ ID NO: 53158 - DNA, 528 bp, Oryza sativa
  unsure (1)..(528): unsure at all n locations
  Clone ID: PAT_MRT4530_55386C.1
gattcggtcgagtggaggaggagtcgggttcttgccgcggcggaatcgcacgcatgaagctgctgtgcagcgcgtgcgaagcggcggaagccagcgtcctctgctgcgccgacgangccgccctgtgcgcgcgctgcgaccgcgacatccacgccgccaaccgcctcgccgggaagcacctccgcctccctctcctctcccccgcctcctcctcctcccctccgccgccgccctcgcgccgccgccgccgtcgccgcccaagtgcgacatatgccaggagagccacgcgtncttcttctgcctcgaggaccgcgcgctgctgtgccggagctgcgacgtggcggtgcncncggccnacgccttcgtctccgcgcaccgccgtttcctcctcnccggcgtgcnngtcgggcaaggaacangacgagcactcccctgacccgcctgaccgtctcctcctccgccgccgccgccgcctgcatccaagagcgacacccggcgccgctctacggcgaaggcggaagaaggttc

SEQ ID NO: 53159 - DNA, 250 bp, Oryza sativa
  Clone ID: PAT_MRT4530_55387C.1
cggactcgtgggttttgacagtcccatccatcaaaaaacgggagtactggtgctagatgtgtgattaattagatgcattgaaacattatatggttactttcataccgacccaagcttgaactgtgctccattcaggcaatgaccttgctatcatattgcgaccattgtcattgttactgataaattgctgtaagaacattaagatcttgaccaggcagctctaacagatttaaagtggtatatctacacg

SEQ ID NO: 53160 - DNA, 1053 bp, Oryza sativa
  Clone ID: PAT_MRT4530_55388C.1
atgggggccgtcctcggcaccgggagggtggggactctgactcgggtggcgctgacgatcgtcgtcttcctgctgctgttgccgtcgcacgccctcgccgcggccgtcgcgaaggacacctccgccacactggtcgagacgctgccgctgcccacgacgctggtcggcccagagagcgtcgcgttcgacaagttcggcgatggcccctacagcggcgtctccgacggccgcatcctccgctgggacggcgccgacaaaggctggacgacgtactcccacgccccggggtacaacgtcgccaagtgcatggctcccaagctccatcccgcggagctcaccgagagcaagtgcggccggccgctcggcctccggttccacaacacctccggtaacctctacatcgccgacgcgtacaagggcctcatgcgtgtcggcccgcgcggcggggaggcaacggtgctcgccacggaggccgacggcgtgccgttcaagttcaccaacggcgtcgacgtcaaccaggtcaccggcgaggtctacttcaccgacagcagcacgcgcttccagcgatcccagcacgagatggtcacggccaccggcgactccacgggccgcctgatgaagtacgacccgacgacgggctacctcgacgtgctccagtccggaatgacgtacccgaacggcctcgccattagcgccgatcggagtcacctcgtggtggcgctgacggggccgtgcaagctggtgaggcactggatcgagggccccaaggccggtacgtcggagccgttcgccgagctgccgggctacccggacaacgtgaggcccgatgggaagggaggctactgggtggcgctgcaccgcgagaagaccgagacgccgtatggctcggacacccacctcctcgccgtaaggatcggtcgcaaggggaagatcttgcaggagttgagggggccgaagaacgtcaggccaacggaggtgattgagagaggcggcggcaagctttatttgggttcggtggaattgggtcatgtggctgttgttaaagctacttag

SEQ ID NO: 53161 - DNA, 606 bp, Oryza sativa
  Clone ID: PAT_MRT4530_55389C.1
atggacgcgcctccgcccgcgcaaccggacgccgccgcggcggcgccggcggcgccgcccacttcgacctcggcttctgccccctcatccgcgccacagcctaatcccaccccttccgcctccaccgccgcgccgcccacccccgacaccacccttgccccggcccccaatcccaccccagcccccgtccaaaccctagaaaccccagctccaagccccgccagtgcgcggccgccggtgccccgcatgaggcctccgtacactcacctggcctcgcccatcacgatgtcctcctctccggccacgggcgcggcctcttcctcctctgcttccgctccggccgccacctctgcgtcctcatctgccatgccacggggaggtgtagcccttgggctaccagcgcacccgcgtgcgccgcagacgcccgtcggctacaccgggttcgtgccgccgccgacactcgccgcgcagttcggctcgatgcatcggggtcctgaccagcccccaccatcctctacacaggaaataactgatctggatgacagcaagaattacattcttttatataataatgacacgatatctgatcccatcatgggggtctga

SEQ ID NO: 53162 - DNA, 331 bp, Oryza sativa
  Clone ID: PAT_MRT4530_5538C.1
ggggaggcccaaaacaaatgttttgaaaggtttgaattatgaaacataaagaaaagaatagaggtgaagatatgatgggatcgaatgagttaacacagactatgaatgcacccggaaatgagcattagaatccgcaaagaagagtgaaaagtgaattgggtttgggggatgtattcagggtgattgagtaaacgtaaacgtagaaagatggatccgttggaaataaattatgcagaattagaggggattggcgggagcgttgtcagaactaaagggaactgggagatgtggatatcctgacttaaagatggtgagttggggggggaagaga

SEQ ID NO: 53163 - DNA, 414 bp, Oryza sativa
  Clone ID: PAT_MRT4530_55390C.1
atgtcggtgttagctgggttactagctcaagatcaggatggtgatgatcaagaggttactagtcatgcagcagctgcctccacgcagggggacgcgaacttcaccggcggcctcgacggcgtcgatgatgcagccagcctttgggtgcagccgaaggcgaagaaccctcttgttgatgaccccgacttgatacgctttgctgacgacctcctcaacttaaccgggaagaagaaggtcaacaataagaagaagaagaagaagaagaagaagatcagtggcgccggggaggtgtcctgggcatgcggcggcggcggcggcgctgtctcggaaggggagcgcagatttggcgctgctgctactgcggtggtggcaggcgtcggctccggatccgcaagctccctgcctcgccggtga

SEQ ID NO: 53164 - DNA, 6524 bp, Oryza sativa
  Clone ID: PAT_MRT4530_55391C.1
atggtcgccgccggcgaccaccggcgcggcggagcggcgcccgagaaaggggagggaagggggaagtgaaacggcggtccacggctcaccccgggtcgacggtgacgacgggacggcgaccggagcggaggaaggcggcggcgcggctcgggtcaacgagggcgacggcgttccggcggtcggcgggcgaaacggaggggtggacgaggtcggcgaggttgcggcgaacccgaaaaaagcgacgccgaaacgggagagggtccggggcgacgacggcggcggaccggagctcggcggcgacggcggagagagggagtgacggcgcgagctcgattccgacggggagagagagcggcgagtggcggaaacggtggagggaggcacggggagcgtttatatagtgttgggagggggagagaacggccggaggggaaggaaaccggcgcggcgatctcgggctccatcaatggcgccggcgaggtttgcgggagtgtttccaaacgaatccgagggagagagagagggaaaaattaaatgatgatgttaatgtcttgtttaactcctggtttggaatggttaattcctagtttggagatagcactgtgcagccgatgccgcgctacaagcctgagtatttgttcggtactgaaggttttgtccaagagttgcgtacgatgtccttcctcataggatttgggattgcccctttgtatgcccagatccctcatgaccgtgatgaagagaagtgccgggtcaaagttaccttgaacagcaatcgtgaagatattccatcagtgatgttcgaggctggaggaggaagctacatccatgcttgtcaggaggtagcaaggatcgccataggagagctccgtgaaagctacaatgatcggttggccgacaccgagtatcgctaccatcctcgtcaaccccagggaagtgatcatggcagctaccttgaaccggctgggatcgagaatgatgctaccacaaggcacttggttgagatgctatgggctatggatgaaacccgcgctgagatcgtgatagccgctcaagatcgtgaagaccagaatcggggaaagatctgcaagctagaagacaagctggatcgtttggagaaagagctagcagcattgaagggagaagcaccaccgcagaaggccagggttcgtcttaccgcaaggaagagagctctattcgtccctcgctaccagttggcaccaaaggttcgtgtggtggaaaaagaagctaccctagccccagcggatcctccggtcgtcaatgtaagtgatgatgatgaagaggaatccaagcgcacccattccaagatcgagtggggaccaactcaagatgatggggacgtgccgaacgagccttcaatcaactccgatgcccggaagacctagacaacgggaatggccccaacaacaacaacaataacaacaatgcggagaatcccacgctcgctcaagtcctggcccaacagacacagttgatgaatctgatgatgcagcaacttcaaaaccagcagaaccaagggaacaatcatgcgcctcctcagaacaagcttgcagagtttcttcgcgtgaggccacctgttttctctagcaccactaatcctgtcgaagctagtgattggttgcacgccatagagaagaagttggatctgctccagtgcagagaccaggagaaggtctcttttgcgtcacaccagctgcatggccctgcttcggaatggtgggatcactcctgccttaacaggactactgctgaacctatctcttggcttgagttcaccgctgctttgcgcaagacgcatataccatcgggagtggtgtccctcaagaagaaggagttcaggtcgctcacacagggttctcgcacagtcacggagtatctgcacgagtttaatcatctggctcgttatgctccagaggatgtgcgcaccgatgaggagcgccaggagaagttcttggaaggacttaatgatgagctttcttacccactcatgactggagattatcacgatttccagaagttagtggataaggctattcgtcaggaggacaattataatcgcatggagcagaagaaacaccggattgctcacttcaaggcacagcagggaaatagtcagaggccgcgtattgcttcgggacccctgtccatgccacagggaggttcttcgtctgttgttcgtccgcagcgacaattctttaacaacaacgcgggcaacaacaaccgcaagccagctccatgtccggtggcaactccgtcgcagcaatagcctgccaagagggagcaaggcagcaagcccggtgtgtgcttcaactgtggagacccaggacattatgctgacaagtgtccgaagccctgccgcgcgaaggtcgtccctgcccagaacaactcctccgcaccagcagccaaggctcgtgtcaaccatgttgctgctgcagaagctcaaggtgctccagatgtgattttgggtacgttccctgttaactcagttcctgcaacagtgcttttcgattctggtgctacacattcgtttttatctatgagttttgcggaaaatcatgggatggaggtagaggagcttagacgtcctttgatggttagtactccgagtaaccaagcactctcctcacaacgtagcccctctgtcagaatagagatccaaggtgtacctttcctgtttaaccttattctgttagaatctaaagatcatgatgtcatcctagggatggactggttagccagatataaaggtgtgatagattgttccaatagaaaagtaactctcaccagcaatgatggtcaagttgtaactgttcatgcattgccctctgaacctcgaaggtcaagtctaaaccaaataactttggaagagattcctatagtccgggagtaccctgatgtgttccctgatgatttacctggtatgccgcctaaaagggatatagagttcagaatagatctggtgccaggaacaactctgatccataagcgaccatatagaatggcagccaatgaattggaagaagtcaagaggcaagtagatgatttgcttcagaaaggatacatcagaccgagttcatcaccatggggagctcctgttatctttgtagaaaagaaagaccatacccagaggatgtgtgtggactatcgcgcacttaacgatgtgactatcaagaataagtatccactgcctaggattgatgatttgtttgatcaacttaaaggtgccaccgttttctccaagatagatcttcgatcagggtatcaccagttaaggattaaggaggaagatatacctaagatagcttttactactcggtatgggctgtttgaatatacagttatgtcttttggacttaccaatgcccctgctttctttatgaacttgatgaacaaggtgttcatggaatacctggataagttcgtggttgtctttattgatgacattctcatatattcccgaactaaagaagagcatgaagaacatcttcgtcttgcattagagaagctgcgagaacatcagttgtatgccaagtttagcaaatgtgaattctggttgtctgaagtgaagttccttggtcacgtcatctcagcaggaggagttgtcgttgatcctagtaatgtggaatccgtaaccaactggaaacaaccgaagacagttacagagattcgcagtttcctaggtctcgcaggatattaccggaggttcatagagaatttttccaatattgccaagcccatgacacgactgcttcagaaggatgtgaagtacaagtggtcagaagaatgtgagcagagttttcaagagttgaaaagtcgcttaatatcaactcctattttgattttgcctgatccaaagaagggtttccaagtgtactgcgacgaatccaagcttgggctaggttgtgttctgatgcaagatgggaaggtggttgccaatgcatctcgtcagttacgtccgcatgagaagaactaccctacttatgatcttgagttagctgcagtggttcatgcgttgaagatttggcgtcactatcttttcgggactcgaacagaggtgtatacggatcacaaaagtttgaagtatatctttacccagccggatctgaacatgaggcagcggagatggttggaattgattaaggattatgacctgggaattcattatcacccgggaaaggctaatgtcgtagcagatgccgttagtaggaaaggctattgtaatgctatggaaggacgacagttgccattggaattgtgcaaggaatttgaaagattgaatctgggaattgtcagtagaggctttgttgcagctttagaagcgaagcctactctcattgagcaagtcagagaagctcaaatcaatgatcctgatatccatgagatcaaaaagaatatgagaagaggaaaagctattggatatttggaagatgagcaaggaactgtatggttgggtgagagaatctgtgttccagagaacaaagatttgaaagatgcaattctgaaggaagcccatgacactttatactccattcaccctggtagtactaagatgtaccaggatctcaaggaaagattttggtgggcaagtatgaagcgtgagatagcagagtatgtagctgtgtgtgatgtttgtcagcgattcaaggcagaacatcagaaacccgcaggtttgctgcaacctttgaagataccagaatggaagtgggaggaaatcggtatggatttcatcactggtctacccagaacgtcatcgggccatgactctatttgggtgatagtcgacagacttaccaaagtggctcatttcatcccgacagacggacaaactgaaagggtaaatcagattttggaatacatgttgagagcttgtgctttagacttcggtggaagttgggataagaatctgccttacgcggaattctcgtacaacaacagttatcaagctagtcttcaaatggctccttatgaagcactgtatggtcggaagcgccgcactccgtttttgtgggatcaaacgggagaacgtcaggttttcgggactgatatcttaagggaagcagaagagaaggtaaagatcattcaagaaagattgcgtatagctcagtctcgtcataagagttatgccgacaatcgccgcagagatttaagttttgaggaaggagatcatgtgtaccttcgtgtcacgcctcttcgaggggttcatcgttttcacaccaaaggaaaattggcaccgcgttttgtgggaccttataagattgtcagtagaaggggtgaggttgcttatcagttggagttacctcaatccttggcaggtatccataatgtgttccatgtgttacagctgaaaaagtgtttaagggtacctactgaagaagctaatcttgaacagatagaagtccaagaggatctgacatatgttgagaaaccaatccgtatcttggagatagatgagagaagaaccaggaatcgagttatccatttttgcaaggtacaatggagtaatcactcagaggaagaatctacttgggagcgagaagatgaactaaagtcagctcatccgcatcttttcgccagttcttccgaatctcgaggacgagatttggggccggcttcgtctacctcgcaccgccgccgcagccgaaccctagccgagccgcgccgccgtctccttccaaatttgatcgcgtctttccttctccggtcgaatcaatagaggggaaatgatctccgggacctcctctaccttttctcttttggaatccccggctaaaatcgtttggaaagtgttggattcgaggtcgattcggattggtctctctctctccgagccctaactttccttctcgtcgccggtcgccgtgggccctcgccgccgcctccttgcccctataaaaggacccccggtgtctcctctacccgccgccacccttgctttcgtctctcgccgtcggaagcgccctaacgccgtgcaaccttgagccgccgtcgtcaccgtcgctccagccgtgcgccaccgccgttccggtcatcgtcgtcgctcggggaggtcgccattgtggtcgccaagtcgtcgccgtcctcgtccgccccttcgccgctgccgaagaccgccggagcaccgtcgccgtcgtcaagccgaaggtcgccgccgcttcttcttcgtcgccgtcgccgtccgttgctcttccgccgacgttttggtcaccggtgagttcgccgcgtcgccctctacgtcctggtgtcctccgttcatgccgaagcgccgttgttcgccggcgagtttgcgccgcccgagccgccgccggtggtgacgtcatcgccgatgtcatcggggccgtctgccgtgagccgctgtagacccgatcgatctcggccgtccgttttggatggatcgatctcggccgttcgtttccgtgaaccgcttttgtatagcatggtttattgcggggcaccagactgagaagtggcggagataagcccacaggggtcgctggggagtccat

SEQ ID NO: 53165 - DNA, 133 bp, Oryza sativa
  Clone ID: PAT_MRT4530_55392C.1
acgcttcctttttttttacacagtaccacaccctatctgctggggggtggggcctctttaagaattgcgggcctttggcgaacgctgtactcgttcagtccatgatgctcgacccccggctcacacttccctc

SEQ ID NO: 53166 - DNA, 1158 bp, Oryza sativa
  Clone ID: PAT_MRT4530_55393C.1
atggccgagaaacagccaccaccaccatctagcccaggctccgttaaaggcaaggcgttgaagctgggattgactgacatcattgatgacaacgtcatgccgatcgatccagagaaattcacacctgagcagaaggaggagtttgaagcaacgctgcagcaggcacgggatcagtttctgaactcattcatgcagacccgcaaggggacacttgttcagaagtataaaataaaagtggttgctgatagtcctgggactggttcttccaaagatggagaagtgaaacaagctccaggtggctcagctcagccgagtactaaaggtgctaccgacgactccccgagcgatcaaggcgacaattctcaaggagttcatggcgttcaagccgattcagtagacgccaccaaggcagcagcctcagcagccgatccaacagactccgttgagacagcagatcgttcagccgattcagcacccgggccggacggcacagtgatgcctcagatggttcctgaacacttggtgcgcaacatccagccgaatcttcataattaccaaggggccccacagtccacggtggaccgggcgcacccgggctcacaccggccggcgccgtgggtcccactcccgcggggcgcgcccgaaggcggccacgccggcacagccgacgggaggcggcgcacccgcgccccgatggtcgccgccggcgaccaccggcgcggcggagcggcgcccgagagaggggagggaaaggggaaacgaatcggcggtccacagctcaccccgggtcgacggcgacgacggaaacggcgaccggagcggaggaaggcggcggcgcagctcgggtggacggggtcgacggtgctccggcggtcggcgagcgaaacggaggggtggacgaggtcgccggggatgcggcgaagccgaaggaggcggtgccgaggggagaggtggtccggggcgacaacggcggcggaccggagctcggcggcgacgacggagagagagggcgacggcgcgagctcgattccagcggggagagagagcggcgagtggcggaaacggtggagggaggcacggggagggtttatatagggttgggagtgagagagggcggccggatgagggggaaacgggcgcggaagatcgaccgccatt

SEQ ID NO: 53167 - DNA, 984 bp, Oryza sativa
  Clone ID: PAT_MRT4530_55394C.1
atgccggaggacgtgacaacagctcccagtctcgcgggggtccagcagcactccgccgtcccgggggcggaccgcgactttttcttctccaactcccgtgggtatggagccactcctgcaggtgctcgccgccgcctattccaccgtccgggaggggtcaacgcccaagttcaagccctgacggacgagcgggcggccctggaggcggagtgggcgcagctcgcggcggactgcgcgcgggttgacgaggggcgccacgccatggacgacatggtggaggtggggcgcaaaatgcgccaagcccaactggcagagatccagtcgcgcgagcagatgctgcactcggtcatacgggagacggaggaggagcggcaggcggcgatcatcgcttcaagcgtcctgcaagaggcgctgggcgagatccccttgcagtacgaggcccacgccgaggatctggcgaagagggtcgaagacgcatgtggagacctcgacgcggctgccgcccaagagcagcgggcatcggaggtcgacgcctcgctgcgggctcggatggcggcgctcgaggccgagtgcaaggccttagacgagcatgcccgctccatgcaggagttcgaggccacgatccgtcgactgatcgagctcctcgaccgtaaccagcgcgaacaggatgagcgcggccgggaacaggcgcagcgagcccgggagctggaggagcatgctcgggcgctagaggagcatgcccgggcgctggaggagcgagcgcgcatgctagaccatggcgagaccaccttggccgcccacgagagagtggtggccgaggcggaatcctcccttcgcctccgtgaggaggccgcagccaagcgcaacctgaccaccctcaccgcagaggctttggtggctcgccgtgcggaggagctgcggcttcgagaggacgcatgccaggaacgggaggccgcgcttgccgaacgcgaggccgaggcatga

SEQ ID NO: 53168 - DNA, 2499 bp, Oryza sativa
  Clone ID: PAT_MRT4530_55395C.1
ttaggtggcaacaggcggcctgtcacacgcctcgccccatcccgtcagaatgatgagagcttcctggctctcgtccctagccggagtcggcgtgctaactcctggagttggtatgtcagtcccggtcagatccagtccaggcttcggcgcaagcatggcaaggaagtcactggccattgaatgaaggttgaaatgggcgtccaccggtaaagctggcgagcggggcaggaggcgtgtgctctgcttgtcagaggtagcttccggcaagatggcgacctcgccggagattggatggtcggctgcgactttggaggacatgtacacgtagaggacgacgagacgaacccaacgactgagccacaaactaagccttacccactagatatgtggaagtacggtagtgctttgcaacagaggcccgaagaccggtccttatatggccgagggtttattgcgtcagccgagggaagggggcgcggaccgggtccatgggagtggggcccacgaggcagcctcacggtccacggtggatcgggtgcacccgggctcacaccggccggcgccgtgggtcccacgcgtcacccgcacccgtgggcgcgggcggctgacgaccgggccccacgcggcagccactcggcccgcccgaaggcggccacttggcgcggccggcgggaggcggcgcccgcgcccctatggacgccggcggcggccataatcacggtggagcggcggccgagagaggggaagggaagggggaaaagaggcagcggtccacggctcaccctaggtcgacggcgacgacgaaaaaggcggccggagcggaggaaggcggcggcgcggctcgggtcgacggggtcgacggcgttccggcggtcggcgaactcggcgagggggtggacggggtcgacggcggcgacggaggaaggagagagcgacggcgcgagctcgattccggcgaggaggaagggcggcgagtggcggaaacggacagaggagagaagatggttagagctcatcaaggattatgatgtgggaatccactatcaccctagtaaggccaacgtggtcacagacgcgctgagtcgaaaaagccgttgcaacactcttggcatccgtggcattccaccggagcttaatcaacagttggaagccctgaacctaagcatcgttagccatggattcttggctacgctagaagccaagcctaccttgctcgatcaaatccgtgaggctcagaagaatgatccagatatgcatgggatcctcaagaatatgaaacagggtaaagccgctggtttcacagaagatgaacaaggaaccctctggaacggaaatcgtgtatgcgttccggacgacaaggaacttaaacagttgatacttcaggaagctcacgaaagtccttattccatccaccctagcagcacgaagatgtacttggacttgaaagagaaatactggtggcgtgtcaaagcagagcaccaacgatcggccggacttcttcaacctctccaagtaccagaatggaaatgggatgaaattgggatggatttcatcaccggacttccaaaaacccaaggcggatatgattctatatgggtagtcgtggaccgactaaccaaggtagctcggtttattcctgtgaagaccacctatggagggaacaaactagctgaactctacttcgctaggatcgtcagtctccatgacgttcctaagaaaattgtatctgataggggaagccaattcacctctcacttctggaagaagatccaagaagagttgggtacccgattaaatttcagcaccgcgtatcacccgcaaaccgatggacagaccaagcgtctaaatcagatcctagaagatatgctccgtgcctgtgttctagattttgggaagacctgggataagagtctcccctatgccgagttctcctacaataacagctaccaagccagcatacaaatggcaccttatgaagcgttgtatggccgcaaatgccgaacaccactattgtgggaccaagtcggggaaagccaagtgttcgggactgatatcctgagagaagctgaagctaaagtcagatccattcgggataatctaaaggtggcacagtcccagcagaagagttatgcagataaccgacgccgtaacctggaattcgcagtggacgattttgtgtaccttcgggtcacgccattgcggggtgtacacaggttccagacgaaagggaagctcgcacctaggtttgtgggtcctttccgcatcattgctcgacgcggagaagtagcttaccagttggagctgcccacctcattgggcaacgtgcatgatgtgttccatgtgtcgcaactcaagaaatgtcttcgaatgccatccgagcaggccgattcagagcaaattgaagttcgcgaagacttgacctatgtagagaagccggtgaagattctggacaccatggagctgggaattggaccgttcaagtctctaatttttccttaa

SEQ ID NO: 53169 - DNA, 4720 bp, Oryza sativa
  Clone ID: PAT_MRT4530_55396C.1
ccacgccgtccgaaaattgttaaaagttgtgtttttaaaataaattttgaaccacgggagaatttaattttaggaacattaattttgtgctatgatgttgtaattttctgaccaacgttgataattgcaatgttatagttatggctctgtgttatatctatttttacccaacggtgatgtaggtctaatgcataatattttaatgttaattttgttctcacagctactccttgattggttgcattaaagatattccgacctgaaaggagataactacgaagaatggaaaagagaactcgaccttgcttttatcttgggagaggtggactgggtgttgactaccccatgtcatatagaacctgctgaacttgacagaggtgaaaaagagtcagatgctgaatggcaaaagagagagagggaccatgttcccctcatcttgtcgtatgacattgagcatgcgaaatggtccttagccaacaagaactgcttggctgaggtaaagaacacgattgagccaaccatattgggctcaatcccagagtgtgacaccgtctctgagtacctcaaaagaatttgccaactcgcgaccatcgctgtctgcgattttgaatgcgcctggccgcagaacttgtgtgatcgtgtacggtccttcccatttggctcggtggggagcatggcctctgagccgtacacgaggaagaagaatgtctccttgttggaagttgtcggtgtgtactatgccgtttgccctctagacttgtccattgctttgagggtgagaaaccgaggcgaagcagatcttgactcccagcctgatgcagtaatcctggaaatcggcactgatgaactgggagccattgtctgttatgatacggtggggcaatccgaacctgcagaatatccctctgatgaatttgatggcgttgtcggccttgatttcccccgtgggtatcgcttcaatccacttggtgaatttgtcgatcgccacgaataggaacctgtagccgccctgtcctcgtgggaatggcccgagtatgtctagcccccagcacgagaacggccaagtaagagggatagtctggagtgcttgcgctggtagctttgtgtgtttactgtggaattgacaggcttcacaccgctgaaccatgtcgcaggcgtctttgagggcggttggccagaaaaacccttgtcgaaaagcttttccgactaatgtccgaccggcggcgtgtgccccatagatcccttcatgtatgtcgaggaggaggtgtctgccatcgttggacgagatgcattttaggagtaccccatttggcgccttcttgtatagatcgttgccgatcatacagtagatttttgctttacgggttattttctcagcttctgcgtcgtcctcgggcaactcttcgctgcctatgaatttaatgagtggggtgcgccagtcgtctgtggtctcgatatcggcaacggcgcactctgcctctgtagcccccgagctgttgttgagggcgactggactatcttcgtcgcttgcctctttcactgatagccttgtcaggacgtccagaaaggtgccaggttcaagtggctctcgtttggacgcacgccgtgctagatcatccggctcaatgttatccttgtggtatacctgtcggacctcgatcccatcgaaccttttttctagcttcctgacttctgcgagatacttgaataactcggggctagagcacttgtaatctttatgcacctggttcgcgactagtttggaatcccctttcatgaccagtcgcctaactccgagtgcagctatagctcttatcccggcgagtagtccttcgtactcggctgtgttattggtcgccctgaagttgagttgaattgcatgcttgaattgatctcccgaaggtgatgtcaagatgaatcctgcccctgctccttgactgttgagtgcgccgtcgaacgccattgtccatgtttcgttgtcgatttggttgtctggcctgttattaggcatagtccaatcggctacgaagtccgcgagtacctgggacttgatggctgttcgtggcacgaagtggacatcaaattggcttagctcgactacccatttcacaatgcggccgacaacgtctctgtttctcatgacttcactgagagggaaggaggatacaactatgaccctgtgggcttggaagtagtggcgtagccttcttgatgtcatgattaccgcgtaaagcagtttttggatctgtgaatatcttgtctttacgtcgtggagagcttcgctgacgtagtagactggtcgttgcaccctctctctctcgacaacaatgacagtgctaacggaatatggcgtggcggcgatatagagaaataattcttcattaggttggggggcaacaagtacagggggatttgataggtagcgcttgagtgcaacgaatggctcttcggcttcttccttgagtcttgtaggcgacttcatgttctcgattgccttgatctcctcaggatttgcttctattcctctgccagagacgaggaaaccgagtagcttgcccgatggtaccccgaacgtgtacttctctggattgagcatgaggcgatatcgtcggaggttgtcgaacgtttcccgcagatcatcaatcaatgagtcgcttgtcttggtcttgacaacaatgtcatcgacgtagccctcgacattgtttccgagttggtcacaaagtgcgccctggaccgttcgctggaaagtgtctcctgcggttattagtccgaacggcatcttaacgtagcagaataccccgaacggcgtgatgaatgctgttttctcctcgtcctctttcgccatgctgatttggtggtagccggagtaagcgtcgagaaagctcaacaattcgcaaccggctgttgagtccattagttggtctattcgaggaagagggaagtgatccttgggacacgccttgttgaggtcggtgaaatcgacacacatcctccatttcccgttggccttccgcaccatgactgggttggctagtggcttggcgtcgggtcgcaccatgagtttgtgctcaatcacctccctaggtactcccggcatgtcggacggctgccaagcgaacacgtcagcattgtcgcggaggaaggtgatgagcgtgagttctttcttgggtggttcagctgtggcaggtgggctgggcgtgtgctcgaccatgtcgaggctccacttgtcgcattgcactgccagcttagcattcccttggatagtgattgtttcctttggtcccggcatcttgagcacttgatacgcgtagtaagatgcggccatgaacttcgcgagtgcagttctcccaatgatggtgttgtattctgtatcgaattcagcgacaccaaaggtgatctgctccgttcggaagttatttgcttggccgaaagtcacgggcaacgtaattttgcccaatggtttggacgatgactgaggggtgattccatggaagggttgatcggtgggtgtcaacttgcttcgtgggatccccatcacgtccaaggtgctggcgaagagaaggttgattgagctaccgccgtcgatcacaactcgcgcgaccttgatattccgaatagtgggttcggccacaatcggatatcgccctaggatgatagcagtcttggggtggtcctcttcagagaattctatcttctgttcagaccacttcatctttggcgcagctccctgccacgtcgaacagacttcacgttccactttcttgtattctcgctttgaggagtatgccgtggaacctccgaagatgtgcgagacatggagatcgaagtctgggtatgctgagtctgattcctgagtagccgcctcagcgtccttctcgaccacgcgtactcgcttgcctttttccaatgccatgtgttttgcgagcgactttttgaagacgaggcaatcttctagagagtgtctgtccgatttgtgtatagggcaccatgttttcttcgtgtcgctgccttgtgggtctgggcacttgggagggtccgcgtattctgttgcgagaactttcgcttgagctttccttttcccactcttgcgatttttctttttgcttgactcaggtgcatacttggttggtttcttctcttctctggtcttcagtttgtcgttcttgcgtctcagtgcgtcgtccgcgtgagcgcatcgatcgacaatttcgaacaatctccgagtagtcgtgacgcgcctcgttgccaactcctgggtagtatagcgatctctgacaccggacttgaaggcgcggattacagaagcgtcggtgatttcggggattgtatttctgcactcattaaagcgctgaacataatccctcaaggattcacccgggttctgtgtcaacgcatgtaggtcgtcttcgatcgcgtggcgcttgtaagttcctttgaagttggcgacgaactgttgccacaggtccagcgctaggggcggtgggttgtcggcgataatacgtccttcgtggatgtctatctgatgatgaggatgaggaagatgacgacgatgatgatgggtcacttggttccagtgtacgattacgaggacgtcggccgggttctcgagaatcctgtcgtcgtctcccgttgttgtcctggtgccgatccccatcgtcgtcgtcattatggcggcgtcctcgactagtatcgcccagcacccgtcgttcgcgatcgtcat

SEQ ID NO: 53170 - DNA, 2802 bp, Oryza sativa
  Clone ID: PAT_MRT4530_55397C.1
atggccgaacgggcagtggcgcacaacctctctccgagcgctagcggtgacgatggggagcagaacccgcgctgtcgagctcgtactccaccgtccccctctcgccgaagtcttgggcgggaggaggcgctcgagggggtcgaaaaatccgcgacttcgccgctcgcgggcgatggagaaggacggcgggacggggagcgtcgcctcctcgtctacggcgacggcagcacgccccagggcatgctccaggctgcgggcgcgctcctgcgtcacccgcccgtcgtccccgatccagagactccagcccgacgttggctggatgacgtggccaacttggtcatgacggcgcagcagcacctaggcaccggcaggcggtcctccgccaccaaggcctctggtgttgctaccaccggctccgcgtcgtcgaggcggagagcgcggcgagcggcggccgttacccgctgttcgtccgccattccctcatcaacgcttctgacccaagaagacgtgcgtggggggccggatgcccgcctcaatgtcgagcgccggcgcaatggtcgtcgtgctgcccacgcaacagagggcgcttcctcgtccggagcgccactttggtccgggcacgggggccagccccccatgtccccggttggcggtgccggctgttgtcacgcccagaaattcccgaatagaattccaagcagaatgtgcattaaaatccccgtccaggaccagccggggtacacaaacgacaatcggaaagaaagaaagacaacaggagctaagcctcgacttgaactgcagcgggaacaccactccacaggcatcctcgacggcacggacaaagcctactcctcggagaaaccttcatctgacccgaactcgaactctgagaggtgtacaactgtacccacaagacacagccccacgacacgtttccgtgcgccgacatgccaccacgacataccggaaagaggccgtgacaggacccttcgcataaccccctctagccaagcacaccacacctcaggtttcacccccgtccccagcgggcaacgggcagtcccctctcgtgcctaggtgaatccggaagcgacagaggccgtcgcagggcccgccccgctccatcacgcccacccttgcctggatgcgtcgactcgctgacgtcagcaaggggaaaccagcgccgacaggcgggccccgcacgtcagcggcacaaaggggcggcgcacggtggaccaagtccacacgtggcctcgggtgcgcgtccaccacgtggatggcccagatcggcccgaagccgatcggacggccacgaggcggcgcggctagggcacgggcacggcatgaaaccggctcggccgagcgatagcgcgcggcggcgtgcggccagacgaccgccggcgacagcggcgcgtcgcggcagcgggcacggggagcggcggaggaggaaaaaaaggagaagggacggtggggattctcaccgaggacggcgacggcgagacgaccacagggaggcggctggcggcggaaagagatggtgaacgcggcggcggcgttccaggggcagggaggggaaacggagtaggggccggggtgcggcgaggaacggcgatgccgatggcggtggtagcgcagcgcggcagcgacgggagcggtggtggcgcgcgactggaggtgacgaaaggcggctgtggctcggtgcacggtgggaatggtgctgcgggggtggaaggggaggacggagtggatgccggggtgcggcacgacgcggcgaagccgttggaggcaaaagcacggccgggcgaggcggcgctcgccggcggggagcggatggaggcggctaaaggcgaaggtggctcggggtggcggtggaagcggcgttgcggcggtggattggcgaagaggagcggtggacggggtgcgcacggcgactgcggtgccggggagggcgacggcgcagtgcggggcggacgggagcggcggcgcggcgctgctggagttcgccggagagcggcggtgcgtgggctcggcgcggggagagcgagggagggcgcggcgggtggaggggatcgtgcccacgtcgttggatgcgagctcgggtgcgggagggcgccggattttgcggcgacgtggacggctatggcggttgggatcggccggcgagaggtaggaggaggagctgacgggtgggaccgccggtcccacagtccgcttgcgctcgaaggcagagccgctgacggcagccgtcagctcgccgcccccaccttgacccagcgccagctcgccccgcgccagccggcgctgctcctcccgctcccgcggttcaatttccgccgcacgatccaccgccttcgccgcccaatgcatccacgtcgtcgccgctttcgcatcgcccacgaaaacgccgctgtcgccagccgagcgcctcttcgcccccgcctccttcgtcgccacggccaagaacgccgcaccgacaccaagccgttccaccccgtgtcccctccttcctcggagcgcccgcctcggcgtcgcgttcgccaccgtgcgccgccgctcggccaagcgccgccaacggagtccctcgcgcccctccttgctttcccggccgcgccatctccgcgccgtgccgcccagccgtcgcgtctgcctcgccgcgactccatccgccccgccgttcccgctcgtgggtgagctccccgcccaaatcctctcgtctatatcctctagcgactccttgagctccaatgaaccaccccaaaccgccaattccgccgccggcctcctcttttgctcccgcgccat

SEQ ID NO: 53171 - DNA, 264 bp, Oryza sativa
  Clone ID: PAT_MRT4530_55398C.1
atggcactggaccacaactgcgccggcgatagagagctcggttgggctatccgaagacaccaacacgaagaggacgacgacgcgaactcaccggtgcaaagaacaacgacgaacgacgacaaacgacggccggcgacgagattgaagcggcgacgggctcggcttgacggcgtccgcggcgctccggcgggcttcggcttcggccgaggggtggacggaattgagctccgaaaaatccgagaaaattccaaagattataattaa

SEQ ID NO: 53172 - DNA, 2235 bp, Oryza sativa
  Clone ID: PAT_MRT4530_55399C.1
atggagccgagatcgccgcgccggtttccttcccctccggccgccctctctcactcccaacactatttaagcactccccgtgcctccctcctccgtttccgacccttgccgctttctctccccgtcggaatcgagctcgcgccgtcgtcctctctctccgccgtcgccgccgagcttcggttcgccgccgtcgtcgccccggacctcctcccgcttcggcatcgcctccttcggcttcgccgcgtcctcgtcgacctcgtccaccccttcgtttcgcccgccgaccgccggaacgccgccgtcctcgtcgacccgagccgcgccgccgcctctctccgcttcggtcgccgttcccgtcgtcgccgtcgacccagggtgagccgaggaccgccatctcgcttcccccttccctcccctctctcgggcgccgctccgtcgcgccggaggtcgccgccggcgaccatcggggcgcgggcgcgccgcctcccgtcggccgtgccggcgaggccgccttcgggcgcgccccgcggctgccatgtggggcccggccgtcagccgcccgcgccctcgagtgcggctaacgcgtgggacccacggcgccggccggcgcaagccgcgtgcacccggtccaccgtggaccgtgaggctgccgcgtgggccccactcccgtggacccgggcaaatgaaggctacacgagctgcggcccggtagtcgagatgtcatggcacagggccggtgtcctgctgctaggggctcagtcctgcctgcctgtcccgggtgttccggccgtaggtctgagcggcgaagccgtgagacatcgtgtcggccaggtgatgatcagtggcccgacgacggcgagcaatgtccccgttcccctttgcgagaagggggcggccaaacgcaacgctgccatcaatgttgttcctctgactgatatcatcgagccgctcgcggaccatcaggtggcggcgtcactgaaagagaaagtcgccaaggaggtgtccgatgctgctgctgttgctgccacaacaagtggtggcgacgttccaacaaaggggaggaaattctcctctgtaatcggacatcgtcgaaaggcacctaccccctcggcctcggacgcgtctcccccgcctccacgacggcagcggcttgtgacactcggcgagaaggcggcgcgggcgaaggcggcgcaagacgagtctggagggacttccggcgcgcctccttctgtaacctcgacggatgtcgtggtcgtgcccggaagccgcgaggcgacaccaagcggcccagccagcgatctcgcggctggtcgtggtccaccggctgccgtcctcacctgggaggagctccaggttgaaatggggcgcctcctcgaggctagtgctcgcggcattggtcacgagattatggaggcgaggtcggcggcggcatcggcgaacgagcgcgccgaccggctggcgcacgacttggcggaggctcgtgaggacctcaagaagataagggagttggtggctggcaatgagcgacaacggcaggggcttgagcaccgcatgtcggagctcgggaacaacttgtcggaaatccgtggctcgttgcgggtcacctatactggtctgcaccaactcgctggggaatgcggtatcaagtctactatcccggcgaatcccgatgagttcttgctgacatcttctcttgcggagctggcggcggtgatggaggagattccctccaagcatgcggccagcatcggagaggagacatccaacgggatctacaccggggcgtgccacgtccttgcgtgtttgaggctgacgcaccctgaactcgatctgcgcgagatcttggatcagggggcggctagcgacacgcgtaaggaggtgatggaagaagtcggtgacctgggggaatatgttctccccctttttaaagaagatgttgatgacgaggatgtccagcagcgtgggcagcctaagtcgccggcgatcattccggctcttgcgtttgagccacacgcgtcgccggacgatgaggactccgacggagatagaccacctagcgaagtcgatggcgccgttggcggagaagttaatcgtttgagtcatacactctccccagcccccagccttgtcgtcggaggattcttctcggagggatctgacaaggccttatcggctctgggcgtccccagccgaagatcccttaggttcctcgaaggccttgttaagacggcgtaa

SEQ ID NO: 53173 - DNA, 254 bp, Oryza sativa
  Clone ID: PAT_MRT4530_5539C.1
acgcggcacaggcgtcgtcacagccaccgcaacccaccggcgccagcgaccgcggcggctccggacatcggtgccgtagagctccagctctctctcgctcgcgtacgtgcatcattcgattgtgacatacacacacacctagcaaaaacgtgaatagtagatacgtgttccgagagatttttttcttgtactacgcagcaatgcaactgtagtagatacatgtgttctgtaaatacatgcatgtacacatctct

SEQ ID NO: 53174 - DNA, 3255 bp, Oryza sativa
  Clone ID: PAT_MRT4530_553C.1
aacacatgcttccttaagggaatatattattttccagaacacaaatggacgccgccgccgccgccgccggccggggcggccccgcccctccccgctgcgcccgcgccgagacggattcggaggatgcggtcgcgacgacaagctcgccgcactccgccgaggccgcgggcgcggcggagcaggggaacggggccccggccccggtggcggatgccgccgacgtcgagggggttgacgggataaggatccggaggcgccccgtgaccgggccgccggtgcactacgtggggccgttccagttccgcctcgagaacgaggggaacacgccgcggaacatcctcgagaggatcgtgtgggacaaggaagccgaggtttcacaggcacggttcatgcttttttttttcctactctccgaggagcaaacaatgtgtgacagtatgaaggagagaaggccactgtacatgctgaaggggccgctggagaatgctcctccggtgagggatttcgttggggtgttgaaggcgtcttttgatcggactggtctgcctgctctgattgcagaggtcaagaaggcttcaccgagccgcggtgtcctgagggaggacttcgagccggttcagatcgcccaaacatatgagaaaaatggagcagcatgcttaagtgttctcacagatgcaaaatactttcagggaagttttgactatttggatgctatacgcaatgctggagtacagtgtcctctgctgtgcaaagagttcattgttgatgcctggcaactttactatgcgcgtttgaagggagcagatgctgttcttctgattgctgctgtcttacctgatcttgatatcaagtatatgttgaaaatatgcaaaatacttggcatggctgctttagttgaggtgcatgatgaaagggaaatggaccgtgtgttagggatagatggtgtccagctcatcggcatcaataaccgtaacctcgagacttttcaagttgatatttcaaacactaaaaatcttcttgagggtgaaagaggacaaactatagctcagaaaggcataattgttgtaggggaatcagggctgttcacaccagaccatatttcattcgttcagaatgctggggttaaagctgttctcgttggggagtctctcatcaagcaggaggatcctggcaaagcaatcgctgggcttttcggcaaagacatctcacctatgagcggcgtgacgagcgcgccgtggagggacaccctcgatctcgaccgcgccgacgtccgctacctcaagctccgcgactccgcggagcggttcgcggccctgcagctcggcgtctgccccttccgctgggaccccgccaagtccgccttcgtcgcccacccaacacaagaagaagaggcacttcagaaattatatacattgatcataataatgaaacatctgcatatccaaacacttccgaggaggaagaagatgcgccattaaagagtgctgcggatgttcttttcacagaaagaatgaagatcaaattcaatgagtggcgcaattcaatagtcagcaatcaaagagtcgatgaccataggtcagaaaacttcaaattcgcagaccagttccagactgttttcttcaaaatgcgtcctgctatcatgcttaatggattcacgtcacatcagttaaagttaatccgacagattttaagaacacattttagggaccttgtgtatgtgtgtacatttttggaggatggcgtatcagagaagagagtagtttatacagacaccaatgaagacaagatatccttgatgaaaaatgttcgggaagatctactaaaaagcagggaagcaaaagtcaaatcagcagtagggatccgtcatgtcattgatcttcttgcctcagaaaggaaattgattgttggtcatagttgtttcctagatattgcacaaatctacagcaaatttgttggtcctcttccttcatccatggaggaatttgccttgagtatcaacagaatgttcccacatatggcagataccaggcatcttatgtctgttaatgacgcggttcagtatcgttatcttgcttcacttcaggtgctaagcatgaagcagctctgtgcttatcatggcattaaatttgagcaactctctcccctggaggacctagcaacaaacattaatctgaagaaacacatcaatctgctgcccccatgctggaacagtggaacagtgcttgatttgagtactggcacggagagaccagatgcaggttataagcgtagatatcctgctgccgtgtatgacaacgtcattcttatctggggattccagtctaaggtgagaccaaaggatataaaggactgcatctgcaaagtgtttggtcgagcttctgttacatcagtcttcccgattgattccactgcggttcttgttcaattcagcaaacaagagtctgtaaacgatttcttggatctgaaggctaccttagagagtgcagatagtgctatttcagtcttgcaccctttgtcaactatactggaaggaggcaaaacacgagcggcaaaatatgatacctacagagatatttgccgctcctctgtatcaaagttctccttcgcggatcaagctgaagcggtttgttcaacttcaaacagcgagtccaagttcaaggagtgcaatgctgctgatggatccggagcatacgggagtgctcttgatggaactgtgcctgcctcggtgcagcagtcaggaggagcgaagtctggctccaagaataaaggcgacgatgatttttcataccaggatatcttagatgcgctacaggatggcaaaacatcagttggcaaacgaatgagtaacgcatgacttacatttttgccttctccttgggcctgtctgctctgaataacaattgttttgatgggtatcttatttcattaatctacttggcaggatgccaagattgctgtttattgtgtgcacatggtgcactgtaggctacagaaccttttactgatgaaagggaaaaaaaaaactttctgatctcaaaaacgcctcctcctcccctcagttagagttcatccctcacgggctacgagcacaatatcaggccctagtgtatgtgtgtgcacgtctggaggctgccgtgtaagaggagaaagtagtgttcgacggccctccatgaccgccggctccgtagggtggagactgggcaaaacagatcgcctgggtcgcaccggagcttccggcccggcacctgcaggggt

SEQ ID NO: 53175 - DNA, 997 bp, Oryza sativa
  Clone ID: PAT_MRT4530_55400C.1
atgaagaaaattaccaactacagtagaatagtagaggaattccataggtataggtatattatcttcatagttccaggagtaatcggctgccttcaagcattagaggctataaaggttgcaactgctgttggtaaacctctctgtggaagaatgctagaccgccataaacggttacacaaactcctgatcgtcaagatcagtaggagttcaccaacttgcaaggtctgtggagaaaatcctgttttcaccaaagaggacttcgtgaactttgattacgagagcttcacacaatctccaatgtccaaaaattcgacgacgcggagcctgaatcttctcccggagaacgcccgggtgagctgcagagactacaagaaggtgctcgacagcggcaggccgcacctgctggtggacgtgcggccgtcgcaccattttcagatagcgtccatggctcactccatcaacgtcccgctctcgctgctggaggagaagctgccactgctgcgggactcggcgagggaagtgtcgtcgcggcgcgacgggcggcagcactgccctgtgtacgtcatctgccggcgaggcaatgactcccaggtcgccgtgcagatcctccgcgagaatgggttcctgtatgcgagcgacgtcgccggtgggtttgagtcctgggccaaggaagtcgaccccagcttccttctctactagccagatgctttacatagttgatagttgcaacttgcaagtaacttgtactagagattagagaaaaggacatatgtagttgccttgaaggttcaaacatgagtcaggtgcctaatgttaaatgtaatccatttccagtgtataaaagaaaaaaaaatgaaggctcaaatagatgtgattgataatatgattgtatttaccactcctcttaatacaaaaatgtgcgtctcgcgtattcaaaaaaaaagtaccattctggatgttgcagcggccgcaacctcttcctcccctagggttattt

SEQ ID NO: 53176 - DNA, 1323 bp, Oryza sativa
  Clone ID: PAT_MRT4530_55401C.1
atggatgaagtcgggtgtcgatggacattctccagggcaaatgaaggctacacgagctgcggcccgatgtttaacagagaaaaaggaaagaatgtcagcgggtatgcctcaagtaacttaagtttccaactcaatccaccactggcctcaagagagttaaccagggcacacccttggtccattccaagcatgctgcttagttcacagctatcattggttggaagtcaagaccaaaatcagtacgtgtttgatcgagcctttggcacccaggtcaatgagcttccaatgccagaagagcaggtccccttttgtcatgattgtagagagcaaggacactatgccctgaattgtccatgggtatatgtcaaagaagccccttcccttggtttagcagggcagacatcgctaaaccagcctcctcacaccaagtcaagcttgcagcctagtgtgcaaagtagagagctcaacggagagaatccattgaatccaaggaaatgctttcctcctagcctttcgcaccacgtggggtcacgtactaagcaagccaaaggcaagaagagtaagaatcagaagagaaaagcaccgatgcgaactgaagaagaagtacgtaagatgactattaccagcaccgaatggcctccagcagggataactattcctagacgtcaaagaggaaataccttccgaggtgcacgacagttgacccagcacctcctaagccatggtggcagagtatctgatagtgaagggtcagatcaagtctcctcggatgttgaagatgagtctccccgacatctcggcgaggaagggatggaatcaaaggcatgcacccgttgtggagaaattggacacgttgctagcaggtgtctcacactctgccctcattgtgaagaagaccatccaccaggggagtgtcccacccgcaaggtcacatgttttctgtgcgaaggtacaaaccatgtgcccaaggattgccaactcagtgtgttgttgaccaagaccgcagaaatccaacgaacaaccctacgattgtctcatcagctagtcagctccaacagcaacatcgacgatatcatccccagcaccaatgctcctcctgctccacctgactctgcaataaatcatagcaataataccttcagcaccaaccattctctgcaccgacagcctcagcaaagaattgtcgtcgatggaagaagttgtgtctctccccgacctactccaggccgagcaaagggcaatcaacctccggagggcgataccaagcagaagaccgtcatccgcctcaaacagcaatcagaaggaagcttctcctgtgaatga

SEQ ID NO: 53177 - DNA, 1834 bp, Oryza sativa
  Clone ID: PAT_MRT4530_55402C.1
ttcttttttttccttttcttttctgatttttttttggtgcggctttttttttctttttcctctccctcctctcctcctgggccgatcgcccggcccaagccgcgccccccctacccgagccgctcccctcccgcgtacgcacgcgcgttgcacgcgcgctgaccgcgcgcccgcgtgccggccgtgtttcccatcgccgttccgccctctcccatgcccggctccctccccgcgcctataaaatggagccctccaaccgcccctgccgcagtgtcagcacgccggtcggccgtgcagtcgccttccccggtgtagcagccgcctcctcttccccggcgtcgcctccgtttcgcagggaaaacatcggagccacctcctcgccgacgaccagtgatgtcgccaccactccaccgcctccagccggctgtgccacctcgccggtgcggcggctgtcgtcgtcgccatcctccctcgacgtcgccacatcgccctctaccccggcctgccctcgatttcgccggaacactgccgtgccgcgccggcctctccatccgcctcgccggaatttccccggtcggcccttcctccacccgtgcgccgtcggccgcgccaccaccacctccggcatcgcagcggcaaggtcgccctcggcctcgcctcccctccacccgagccttgtcggtgttcgttgtcgtcatctccgttcgtactcgtcgacgactcctctggtcggtcgttcctcctcgctggctcgtcatctcgttgtgccacctccgtcgtgtcccacgccgtcctcgtctccgtgcagctgctgccggctgccctcgtcgcctcctcgccggtcccggtcgtcgtcctcatcatcgtggtgttcgtccctccgtcaagccgtgctcgtcttcatcctcggctccgcgtcgtcaagccttgtgccggccgcgtctcgccttcgtccaaggatcgccgccgaagtgtcccctcaccgttcgtctccgtcgttctcgtccgtatccgccgcgcccgttcgtcgttgtcgttcccacgcctcgtcgcatggaggtaaggatccctctccctcgctgccccgtcctcgtcctttcggtgtcagcccgtgcccgttgtgcggatgtcggccccggtacccgtgtaccggtgtcggtagtcgtccctgtgtgcgtgtttgcttgtgtgcttcgcgtagctttcgtcgttctggaggttcccgaagcgtggttcgtggtcatcgccgaagttataaacaaaggtacacggatggagatggacgaagtcgggggtcgatggacatctctagggcaaatgaaggctacacgagctgcggcccggtagtcgagatgtcatggcacagggctggtgtcctgctgctaggggctcagtcctgcctacctgtcccgggggttccgcccgtaggtggggttgggtcggtactcttgtctatggctaggatgggttggaaactatgtcacgtcttccgtccgtataccatggtggtatgtggcacgtggttacacgtgaggaagatgtgtcttgtggcacttgtggttttgtcttgttgagtacggtggttgtactcagtcttgctcaatttttcccaaacccagaagaggagcccctggaagataaaggcttttgtgtctagctcgtgcctgccgtcaagcgcctgtggtcgtcgccctagtcttccgctgtttttcgtttgtcttcttgtgtgctgggccttgcctcctgggacaaggaataatgcacacacgtaaggaacgcccgttgggttatttccggtcgtgacaatcttctttcccaatgccgatattacaaa

SEQ ID NO: 53178 - DNA, 6120 bp, Oryza sativa
  Clone ID: PAT_MRT4530_55403C.1
atggagacaaggaatggttcacgcgactccaacaacgccagtggcagcgaagagccgatcaatggagcacgtgccaacagtgcatctgacaacagtccgtccccaccgcccgagaacccaacaattgctcaggtgttggacaatcagactcagatgatgacaatgatgatgcaacagatgcagcaacagtaccatcaagtgttgcagcaggtgcagcagcaagcacagcagcagcagcagaacctgcagtttggtcctccacctcctcagtccaaactgttagaatttcttcgtgtcaagccgcccactttctcaagcaccaccaacccaatcgaggcccacgactggcttcatgccattgagaagaagctgaatcttttgcaatgcaacgagcaagagaaggttcccgagggaattgtggcacaaaagaagagagagttccgttccctgcaacaaggaactagaacagttatagagtatttgcatgagttcaaccgcctcgcgcgctacgcccctgaggacgtgcgtaccgatgacgggaggcaggagaagtttctgtctggtcttgatgatgaattgactaaccagttgatctctaaagattatgaggactttgagaagctggtggataaggctatccgtcaggaggagcactgtaacaaaataaaccgtaagaggaaggcagctcagttcaggactccccaggggaagagtcagaagcctcgtttcacgatgggacgtcacggtggaccttccaccatgattatccggcagcaccgtccctaccacccgggtagcttcaacgagaaccaccatagtggcagtcacaacaacagtgagcagcatagcctcaaccctactccgagttcactaaagattccagctcaatcagttcagctagctctgccagaacagcccaagaggttgggagaaaaacccgaactctgcttcaattgtaacaaacccggacacacggttggaaagtgcccaaagccaagatgtgctggacccaagttcgttcaggcctgtgtcaatcatgcatctgcagaggaggcgcagtcagcaccagaggttatattgggcacattccccgtcaactcgacaccggcagtaatattgtttgattctggtgcaacccattccttcatttccaagcgttttgctggtgcacatgggttatctttagtgaagcttaagataccaatgcgagttcatactcctggaggtggcatgaccacaactcactactgcccatctgtgacagttgaaattcaagggttgatttttccaaccaacctcattcttctcgaatccaaggacctggatgtcatacttggaatggattggttgacaaggcacagaggagtgattgattgcgccagccgcaccatcaagttaaccaatgcaaaaggagaggtggtaaccttccagtctccagtgccgcagaagccagggatcagtttaaaccaggctgctggtgaagaacaagaggtagcagtggagaaaaccactaagaagctggaggatattcccatagtcagagagtatccagaggtttttccggacgatctgacaacaatgccaccaaaaagggataccgagttccggattgacttggtacctggaactgcaccgatccacaagaggccttacagaatgggagccaacgagttggcggaagtcaagaagcaagtcgatgaacagttacagaagggatacattcgcccgagcacgtcgccttggggtgctccggttatctttgtggagaagaaagacaaaaccaagaggatgtgcgttgactaccgcgcactcaatgaggtcaccatcaagaacaagtatcctttgccaaggattgatgatctgtttgatcagttgaaaggagctactgtgttctctaagatagacctgcgatcaggctatcaccagttgaggatccgcgaagaggatattccaaagacaacattcatcactcggtacgggttgttcgaatgcacagttatgtctttcggactcactaatgcacctgtcttcttcatgaatttgatgaacaaggtgtttatggaatttctagacaagtttgtcgtggtttttatcgatgacatacttatctactccaagtccgaggaagaacatgagcagcatctctggctggtacttgaaaagttaaaagagcaccagctatatgccaagttcagcaagtgcgacttctggcttaaggaagttcagtttctcggtcacatcgtgaatgctcaaggagtagctgtggatccagcaaatatggagtcagttaccaaatggaccccaccaaggacagtcactcaggttcggagtttcttaggacttgcgggctattaccgccggttcattgagaacttctctaaaattgctaagccaatgacagctattgaagaaggaagaaaagtttatctggatggcaaagtggtctcttatgcttcacggcagttgcgtcctcatgaaggcaactacccgacgcatgatctggaattggccgcagttgttcatgctttaaagatttggcggcactatctcatcggtaaccgttgtgaggtatatacatatcacaaaagtctaaagtacatcttcactcaacctgatttgaatctcagacagcgaagatggttggagctgatcaaggattatgatatgagaatacattatcatcccggcaaggctaacgtggttgcagatgccttgagcaggaagagctactgcaatgttgcatgggtagagcaactatgttgtgaggttcaacgcgatttggaacatctgaaccttggtatagttgagcacggattcgtggttgccctagaggcacagcccacactggtggagcaggttcgcatagctcaagcaagtaatcctgaaatagcagagctcaaaaagaacatgagagttggaaaagcccgaggttttgttgaggatgaacaaggaacaatctggatgggagaaagattgtgtgtacccgaaaacaaggaattaaaagacctgatactaaccgaggctcatcaaactcagtattccattcatcccggtagtactaagatgtaccaagacctcaaagagaagttctggtgggtcagcatgagaagggaaatagctgaattcgtagcactctgtgacgtctgtcaacgagtaaaggcagaacaccaaaggccagcagaagttttaaatgaggcagaagagaaagtcagagctatcagggaaagattgagaatcgcgcaatctcggcagaaaagctatgcagacaaccgccgaagggagctcgctttcgaaacaggggattatgtgatcttggaacgtagaggtgaagttgcttaccagcttgagcttccctccaacatgcttggcatccacaacgtgttccatgtctctcagttaaagaaatgtttgagagttcctgaggaacaggcaagtccggatcacatcgaaattcaggaagatctgacgcagcctgtagtgaattgtgatgtgtatgcaatttgtggacctttcacaatctgcaatgacaataaggatccgttctgcgactgtatgaaaggctactccataagatcaccgaaggactgggagcttgatgatcgaacaggagggtgcatgaggaatactcctttaagttgtggtgctggtaaggacaggacaggtctcacagataagttctaccctgtgcaaagcattaggttgcctcacaatgcagaaaatttgcaggctcctaccagtcgagaagaatgctcacagcaattatctgatgcttctccaaatggggatgagggggttctttacattcgacttgctgcaaaagagttgcaaaattcacaaaggaagatgagtggaaaaataattggtgttgccattgattttggaatggcgaagatgttggggagagaatttagtcgtgctatgactacaatgagaggaacaattggatacatagctcctgaatggattagtggaacagttgttacatccaaagtagatgtttatagctacgggatggttttgtttgaaatcatatcaggaaggaggaaccgaagtcatgaacatttcatggatggtgattattccttctactttcccatgcaagttgcacgcaagcttctcaaaggagagattggatgtcttgtggatgccaatttggaaggtgatgttaacctcatggaggttgaaagagcttgcaaaattgcatgttggtgcattcaagatcacgaatttgatcggccaacaatggccgaggtggtacagtcccttgaagacagggataagccaattgatgatcccacagcagtggagctaacaatctccaggatgaacgtgcgagtgatacacagagctgagtggggaggattgagagataggttagctaatcacaacacggggcacgttttccttctccaccactcttcccccgtgttcatcttctgcttccccatgcttctcccttgtcatgtccttcttggcctcctgctcctctccctgcacactccggcgagctccgccgccgccacggataccgtgtcacccggccattcacttgccggcagtgacaggcttgtctccaataacagtaagttcgccctcggcttcttcaagccaggtaatgagtcctcctacaccaaccacaactcctaccttggcatatggttcaacaaggtctccaagctaaccccgttgtggaccgccaatggcgagaatccagtggtggaccccacttcaccggagctcgcaatctccggtgatggaaacctggccatcctggatcatgccaccaaatccatcatatggtctacccgtgccaacatcacaaccaatgacaccattgccgtgcttctgaacaatggcaaccttgtcctacgaagctcctcaaactcatccaacattttctggcagagcttcgactacccaacagatacacttttcgctggtgcaaagattggctgggacaaggtcaccggcatgaaccgccgtcttgtttccaggaaaagttcggttgatcaggctcctggtatattttccttggagttagggctcaatggggagggtcatctgctatggaactcaactgtggcgtattggtccagtggggactggaacggtcgatacttcggcctagcgccagagatgataggcgatgtcatgccaaatttcacatttgtccacaatgacaaagaggcctacttcacatacaccttgtatgatgacacggctatcgtgcacgctggactagatgtctttgggataggttttgtgggtatgtggttggaaggaaaccaagaatggttcaagaattacaggcagcctgtagttcactgtgatgtgtatgcagtttgtggacctttcacaatctgtgacgacaataaggatctgttctgtgactgtatgaagggcttctccgtaagatcaccgaaggattgggagcttgacgatcaaacaggaggttgcatcaggaatactccattaagttgtggaagtagcaaggacaggacaagcctcacagataagttctaccctatgcaaaattttggaatggcaaagattttggggagggaatttagccgtgcaatgacaacaatgagaggaactattggatatatggctcctgaatggattagtggaacagttgttacatcaaaagtagatgtttacagctatggaatggttttgtttgagatcatatcaggaaggaggaactcaagtcatgaatgtttcagggatggtgattattcattcttttttcccatgcaagttgcacgcaaacttctcaatggagacatcggaagtcttgtggatgccagtttgaaaggtgacatgaacctagtggaggttgaaagagcttgcaaaattgcatgttggtgcattcaagacaacgaatttgatcgaccaacaatggctgaggtggtacaggcccttgagggtctacttgaactcgacatgcctccattgccaagactactaagtgctatcacaggagactcacattcagtgacaccacaatattttgattcagtgcccatcgtcttcatcaccgtggccgaagaagcccaccacagcccacctaacttacggacaacgggacaatgccgcgacaggtccagcgatacataa

SEQ ID NO: 53179 - DNA, 3121 bp, Oryza sativa
  Clone ID: PAT_MRT4530_55404C.1
gacttaccaatgcccctacaatcttcatgaacttgatgaacaaggtgttcatggaatacctggataagttcgtggttgtctttattgatgacattctcatatattcccgaactaaagaagagcatgaagaacatcttcgtcttgcattagagaagctgcgagaacatcaactgtatgccaagtttagcaagtgtgaattttggttgtctgaagtgaagttccttggacacgtcatctcagcaggaggagttgccgtcgatcctagtaacgtggaattcataaccaactggaaacaaccgaagacagtttctgagattcgcagtttcctaggtctcacaggatattaccggcgattcatagagaatttctccaagattgccaagcccatgacacgactgcttcaaaaagatgtaaagtataagtggtcagaagaatgtgagcagagttttcaagagttgaagaatcgcttgatatcagctcctattttgattttacctgatccaaagaagggtttccaagtgtattgcgatgcatccaaacttgggttaggttgtgttctgatgcaagatgggaaggtggttgcctatgcatctcgtcagttacgtccgcatgagaagaactaccctactcatgatcttgagttagctgcagtagttcatgcgttgaaaatttggcgtcattatcttttcggtactcgtactgaggaatttgaaagattaaatttgggaattgtcagtagagattttattgcagccttagaagcgaagcccactctaattgatcaagttagagaagcgcaaattaatgatcctgatattcaagagatcaagaagaatatgagaagaggaaaagctatcggtttcttggaggatgagcacggaactgtatggttgggtgagagaatctgcgttcctgacaacaaagatttaaaagatgcaattctgaaagaagctcacgatactttatactctattcaccctggtagtatcaaaatgtaccaggatctcaaggaaagattttggtgggcaagtatgaagcgcgaaatcgcagagtacgtagcagtatgtgatgtttgtcagcgagtcaaggcagaacatcagaaacctgccagtttgctgcagcctttgaagattcctgaatggaagcgggaagaaatcggtatggattttatcactggtttacctagaacgtcatcgggtcatgactctatttgggtgatagtcgacagacttaccaaagtggctcatttcattccggtaaagacaacctattccgggagtcggttagcagaattgtatatggcaagaattgtgtgtttgcatggcattcctaaaaagatagtgtctgatcgaggcagtcagtttacttcaaatttttggaagaaacttcaggaagagatgggttctaagctgaactttagtactgcttatcatccgcagacagacggacaaaccgaaagggtgaatcagattttggaagacatgttgagagcttgtgctttagacttcggtggaagttgggataagaatctaccttatgctgaattttcgtacaacaacagttatcaagctagccttcagatggctccttacgaagcactgtatggtcggaagtgccgcactccgcttttgtgggatcaaacgggagaacgtcaggttttcgggacggatatcctaagggaagcagaagaaaaggtgaaaatcattcaagaaagattgcgagtggctcagtctcgtcataagagttatgccgacaatcgccgcagagatttgagttttgaagaaggagattatgtgtatcttcgtgtcacgcctcttcgaggggttcatcgttttcacaccaaaggaaaattggcaccgcgttttgtgggaccttataagattgtcagtagaagaggagaggttgcttatcagttggagttacctcaatctttggcaggagtccataatgtgttccatgtttcgcaattgaaaaagtgtttaagggtacctaccgaagaagctaatcttgaacagatagaagtccaagaggatctgacctatattgagaaaccaatccgtattttggaaatagatgagagaagaaccagaaatcgagttatccgtttttgcaaagtccaatggagtaatcactcggaagaagaatcaacttgggaaagagaagatgaattgaaagttcgattcggatcggcctctttcctccgaaccccgaagtttccttctcgtcgccggccgccgtgggctttcgtcgccgcctccgagcccctttaaaaggacccccggtgtctcctctacccgccgccaccctcgccttcgcctctcgtcgccggaagagctctagcgccccgtgcgccaccgccgttccagacgtcgtcatcgctcgggaagaccgccgtcgtggtcgccaagtcaccgccgtcctcgtccgccccttcgccgtcgccgaagatcgccggagcaccatcgccgccgtcgacccgaagaccgccgccgtttcttcgtcgtcgccgtcgtcgtccgttggtcttccgccgctcctttggtcaccgcgtcgccgttcgccggcgggcttgcgcgtccgagccgccgagccgccgccgccggtggtgacgtcatcgctgacgtcatcgtccccgtctcccattccgtcgtttccggagagtccgttttcgccggagaagagtttgaagagttccaaggccagtaaggcaaaaatagcagaatatgtggctctatgtgatgtatgtcagcgagtcaaggcggaacatcggaagccagccggtctgttgcaaccgttgaagattccagagtggaaatgggaagaaataggaatggactttatcaccggtctacccagaacgtcgtcgggacatgattctatttgggtagtggttgacaggctgactaaagtcgctcacttcatacctgtcaaaacaacctacacgggaaataagctcgcagagttatatatggccagagtgactgatggtcagacggaaagagtgaatcaaattttagaagacatgttgagagcctgtgttctagattttggtggaagttggtataagaatctgccgtacgcggaattctcttataacaacagttatcaagctagtctacaa

SEQ ID NO: 53180 - DNA, 3339 bp, Oryza sativa
  Clone ID: PAT_MRT4530_55405C.1
atggagataaggaatggttcacgcgactcgaacaacgccagtggcagcgaagagccgatcaatggagcacgtgccaacggtgcatctgacaacagtccgtccccaccgcccgagaacccaacaattgctcaggtgttggacaatcagactcagatgatgacaatgatgatgcaacagatgcagcaacagtaccatcaggtgttgcagcaggtgcagcagcaagcacagctgcagcagcagaacctgcagtttggtcctccacctcctcagtccaaactgttagaatttcttcgtgtcaagccgcccaccttctcaagcaccaccaacccaatcgaggcctacgactggcttcatgccattgagaagaagctgaatcttttgcaatgcaacgagcaggagaaggttgcttttgctacacaccagctacaaggtcccgcttctatttggtgggacaactacatggtgacccgtccagctggggcaaaggttacttggacagagtttcgtcatagtttcaataaagcacaggttcccgagggaattgtggcacaaaagaagagagagttccgttccctgcaacaaggaaccagaacagttatagagtatttgcatgagttcaaccgcctcgcgcgctacgcccctgacgacgtgcgtaccgatgccgagaggcaggagaagtttttgtctggtcttgatgatgaattgactaaccagttgatctctagagattatgaggactttgagaagctggtggataaggctatccgtcaggaggagcacgccaacctcattcttctcgaatccaaggacctagacgtcatacttggaatggattggttgacaaggcacagaggagtgattgattgcgccagccgaaccatcaagttgaccaatgcaaaaggagaggtggtaatcttccagtctccagtgccgcagaagccagggatcagtttaaaccaggctgctggtgaagaacaagaggtagcagtggagaaaaccactaagaagctggaggatattcccatagtcagagagtatccagaggtttttccggacgatctgacaacaatgccaccaaaaagggatatcgagttccggattgacttggtacctggaactgcaccgatccacaagaggccttacagaatgggagccagcgagttggcggaagtcaagaagcaagtcgatgaacagttacagaagggatacatccgcccgagcacgtcgccttggggtgctccggttatctttgtggagaagaaagacaaaaccaagaggatgtgcgttgactaccgcgcactcaatgaggtcaccatcaagaacaagtatcctttgccaaggattgatgatctgtttgatcagttgaaaggagctactgtgttctctaagatagacctgcgatcaggctatcaccagttgaggatccgcgaagaggatattccaaagacagcattcatcactcggtacgggttgttcgaatgcacagttatgtctttcggactcactaatgcacctgccttcttcatgaatttgatgaacaaggtgtttatggaatttctggacaagtttgtcgtggttttcatcgatgatatactgatttactccaagtccgaggaagaacatgagcagcatcttcggctggtacttgaaaagttaaaagagcaccagctatatgccaagttcagcaagtgcgacttctggcttaaggaagttcagtttctcggtcacatcgtgaatgctcaaggagtagccgtggatccagcaaatgtagagtcagttaccgagtggaccccaccaaggacagtcactcaggttcggagtttcttaggacttgcgggctattaccgccggttcattgagaacttctctaaaattgctaagccaatgacacagctattgaagaaggaagaaaagtttatctggtctgctgaatgcaataggagttttgaagaactcaaacgacggttggtgtctgcaccagtcttaaccctgcctgatcagacgaaagatttccaggtctattgtgatgcatctcgccagggtctaggatgtgtgttgatgaaggatggcaaagtggtttcttatgcttcacggcagttgcgttctcatgaaggcaactacccgacgcatgatctggaattggccgcagttgttcatgctttaaagatttggcggcactatctcatcggtaaccgttgtgaggtatatacagatcacaaaagtctaaagtacatcttcactcaacctgatttgaatctcagacagcgaagatggttggagctgatcaaggattatgatatgggaatacattatcatcccggcaaggctaatgtggttgcagatgccttgagcaggaagagctactgcaatgttgcatgggtagagcaactatgctgtgaggttcaacgtgatttggaacatctgaaccttgggatagttgagcacggattcgtggctgccctagaggcacagcccacactggtggagcaggttcgcatagctcaagcaagcgatcctgaaatagcagagctcaaaaagaacatgagagttggaaaagcccgaggttttattgaggatgaacaaggaacaatctggatgggagaaagattgtgtgtacccgaaaacaaggaattaaaagacctgatactaaccgaggctcatcaaactcagtattccattcatcccggtagtactaagatgtaccaagacctcaaagagaagttttggtgggtcagcatgagaagggaaatagctgaattcgtagcactctgtgacgtctgtcaacgagtaaaggcagaacaccaaaggccagtaggtttgctacagccacttcagattccagaatggaagtgggaagaaatcggaatggatttcatcaccggtttgcccaggacgtcatcggggcatgattctatttgggtagtcgttgaccgactcaccaaagtggctcacttcattccggtgcacactacctactcagggaagaaattagcagaactctatctggcaagaattatgtgtttacatggtgtacctaagaagatcgtgtctgatcgaggaagccaattcacttcaaagttctggcagaaattacaagaagaattgggaacccggttgaatttcagcactgcttaccatccacaaacagatggccagaccgagcgagtcaatcaaatactagaggatatgttgagagcctgtgcgcttgactttggtggagcatgggacaaaagcttgccgtatgctgagttctcttacaacaacagttaccaagctagtctgcagatggcaccgtttgaagcactgtatggacgaaggtgtcgtactccgctcttctga

SEQ ID NO: 53181 - DNA, 562 bp, Oryza sativa
  Clone ID: PAT_MRT4530_55406C.1
aaacaaaattcccgccccatgtttttattaaaacacttcctctaaaacaacatttttttaaaaagatcacaagggtcatcacaacaagcaacacgatttattttttttttagggaggggccttcataatctttataacctttttgaaaaacggcctggccaaaatgccattgatccaagccttcaaaaaagggaacccatcgagcataacaacatgagggggggccaccagggagcccccagttgggaaaaggctcaaacccccaagggtcaagaagtctccaactaaatacctgaacttgcacaaacccttttaatacaccagaaaaggttttttgagcttctccaaattcttttccacaaccttcgaatgggtttggcccccgaaatacacaggggggatgaggccttggtaaaaaaccacggacatgggcccatcaaaagggggggactaaatttccaaccacacataaaccttgggagggtaaaaaagggtgggccccttcaagagttcaaagttgttcttaccaaacacgtcctttgaaattgcccgtgactcaaaa

SEQ ID NO: 53182 - DNA, 2462 bp, Oryza sativa
  Clone ID: PAT_MRT4530_55407C.1
gctcgccggaagaaaaataacacctccgtcccgaaccacaagcaacacgcctttggcgggtggccccgaacggtcaccaggaggttcggacagcgggagcctcggcaggcccggaacaaggcccagggcgattactatcaggggtctcctttgagtgatgctgagcatgtttctgattatcctttatcaatcacctttcggcctacatctaacaggtggtcggggagagacacaacttcttccatcgacgacaattctttgctgaggctgtcggtgcagagaatggttggtgctgaaggtattattgctatgatttattgcagagtcaggtgcagcaggaggagcattggtgctgtggatgatatcgtcgatgttgctgttggagctaactagctgatgagacaatcgtagggttgttcgttggatttctgcggtcttggtcaacaacacactgagttggcaatccttgggcacatggtttgtaccttcgcacagaaaacatgtgaccttgcgggtgggacactcccctggtggatggtcttcttcacaataagggcagagtgtgagacacatgctagcaatgtgtccaatttctccacaacgggtgcatgcctttgattccatctcttcctcgtcgagatgtcggggagactcatcttcatcatccgaggagacttgatctgacccttcactatcagatactctgccgccatggcttaggaggtgctgggtcaactgtcgtgcacctcggaaggtatttcctctttgacgtctaggaatagttatccctgctggaggccattcggtgctggtaatagtcatcttacgtacttcttcttcagttcgcatcggtgcttttctcttctgattcttactcttcttgcctttggcttgcttagtacgtgaccccacgtggtacgaaaggctaggaggaaagcatttcccgggattcaatggattctctccattgggctctctactttgcacactaggctgcaagcttgacttggtgtgaggaggctggtttagcgatgtctgcactgctaaaccaaaggaaggggcttctttggcatatacccatggacaattcagggcatagtgtccttgttctctacaatcatgacaaaaggggacatcctcttctggcattggaagctcattgacctggggggcaaatgctcgatcaaacacatactgattctggtcttgacttcgaaccaatggtagctgtgaactaagcagcatgctcggaatggaccaagggtgtgcccttgttaactctctggaggccagtggtggattgagttgaaaacttgagttacttgaggtatacccgctgacattctttcctttttctctattaaacatcaccacggtatacggacggaagacgtgacatagttcccaacccatcctagccataaacaagagtaccgacccaaccccacctacggccggaacctccgggacaggtaggcaggattgagcccctagcagcaggacaccagccctgtgccatgacatctcgactaccgggccgcagctcgtgtagccttcatttgccccactagacatgtggaagtacggtagtgctttgcaacagaggcccgaagaccggtccttatatggccgaggtgctactatcaaaaccatgcaccccgagcccagccgggtccacgggagtggggcccacgcggcagcctcacggtccacggtggaccgggcgcacgcggcttgcgctggccggcgccgtgggtcccacgcgtcagccgcacccgagggcgcgggcggctgacggccgggccccacatggcagccgcggggcgcgcccgaaggcggcctcgccggcacggccgacgggaggcggcgcgcccgcgcccctatggtcgccggcggcggccataggcacggcggagcgctggccgagagaggggagggaagggggaaacgaaatggcggtcctcggctcaccccgggtcgacggcgacgacgggaacggcgaccgaagcggagagaggcggcggcgcggctcgggtcgacgaggacggcggtgctccggcggtcggcgggcgaaacggaggagtggacgaggtcgacgagaacacggcgaagccgaaggaggcgatgccgaagcgggaggaggtccggggcgacgacggcggcgaaccggagcttggcggcgacggcggagagagaggacgacggcgcgggctcgaatccgacgggggagagaaagcggcgaagaggcggaaaccggaggaagggggcacgggcgggcggcgggagcggcggaaggtaggggatgacgggtgggccccacccgtcagcgagggtggcgggcgggcccgcccgtcagcggcgcgcgcgcgggggaaggccgatgggccgcgggggagaggagagagagggagggagctgggccgagccggcccaagaagggaagggggggaaagaagacttct

SEQ ID NO: 53183 - DNA, 321 bp, Oryza sativa
  Clone ID: PAT_MRT4530_55408C.1
atggcggggagggcggcgacgtggggacgcggagtaggggcgcggcgcggagcggagaaggcggcggcgcggacggtttcggcggcggttgccgtcgtggagcgggcggctggaggaaggggacgacttgacaggaactctcaaacatttcttcaacttagagacgtggaacacgttgtggatgccaagcatgttggagggaagctcaagctggtaagcagcttcacctctacgttccaagatcctgtatgtgtgcaccggaatgaagtgagccactttggtgagtcggtcaacgactacccaaatagaatcatgccctga

SEQ ID NO: 53184 - DNA, 1237 bp, Oryza sativa
  Clone ID: PAT_MRT4530_55409C.1
atggaacttgagaagaatggaaacattctactgcgaaggtatgagattggaaaattattggggcaaggaacttttgccaaggtttatcatggtaggaacatcgtgacttcacaaagtgtggctatcaaggtgatcgacaaggacaaaatttttaaggttggcctaatggatcagattaaacgagagatatctgtgatgaaattagtgaggcaccccaacattgtacagctgtatgaggtcatggctaccaaatcgaagatatactttgtgctagaatatgtcaagggcggtgagttgtttaacaaagtagctaaaggtaggttgaaagaagatgctgcaaggaaatacttccagcaattagtaagtgctgttgatttctgccacagtagaggcgtttatcatcgcgatctgaagccagagaacctacttgttgatgaaaatggaaacctgaaaattaccgattttggattgagcgctcttgctgaatcaagacgacaagatggccttctacacacaacttgtggaactcccgcatatgtggcgcctgaggtgatcagccgaaaagggtatgacggtgtcaaggttgacacatggtcttgtggtgtgatcctgtttgttctgatggctggttatctgccttttcaagattcaaatttgatggagatgtacagaaagattgggaaagcagagttcaaatgcccagcttggttttcgtctgatgtacgaaaattagtttcgagaattcttgatccaaacccaagaagtagaatgccaattacaaaaataatggaaacttactggttcaagaaaggacttgatagcaagctaatccttaagaacgtggagacaaatgaaccagttacagctcttgctgatgttaatgttgttttctcctccatgggctttgatctttctggcttgtttgaggagactgataaaaagaaagaagcaaggtttacatcaagtcaatcagcttcagctattatctcaaaactagaggatgttgcctcatgttcgaagttgacagtgaaaaagaaagaaggtggtgtgctgaaaatggaaggtgcaagtgaaggaaggaaaggtgtattggcaatcgatgcagagatcttcgaggtgactccttcatttcatttggtagaaatcaagaagaacaatggagatacactagaataccaacatttgtggaaggaggacatgaaaccagctcttaaggacattgtttgggcttggcaag

SEQ ID NO: 53185 - DNA, 1206 bp, Oryza sativa
  Clone ID: PAT_MRT4530_5540C.1
atggaggatcttccggatgcccttattggagagatcgtcaagagggttagcagtacaagtgatctgagctctctttcccttgtgtcaaagcgtctctacaaaattgaggcagagagcaggcatacgatccacataagctgtagccttggaccagcaacagatgccatagtatcactttgttcccgatttcacaacttgttgaaagtagatatcaattactctggttggacgcaggaccatgggaaccagttggacaaccatggtctccgtattctttcatcatactgcctctcgctgagtgatatcaccttaagcttctgctcatacattgatgacactggtcttggttatctagcattttgcaagaaattgatcaccctcagactgaactctgcaacaaaaataacatcaagtggacttctcgctgtggctgttggttgcaagaatctatctgctctccacctcatcgattgcaataaaatcagtggcgcctttgaatggctgaagtaccttggcagtgatggatcactggaagaacttaaggtgaagaactgtgtaggaatcaaccaatacagccttctaatgtttggtccaggatggatgaagctccagaggtttgtgtttgagttcagaaatatttacagcatatttgaatctaaagatccctcgtatgtggcgaattgccagtatagatatgatttctcctgtgagaatttgaagcaattgagcttgagacggattgtgaccatggaagaaataggactccgctctctcctgggaaaatgcaaatcactagagaaactttgccttcattttgttcttggtctaactgacagtgacatgattacactcgcccagaactgcagcaaccttagaagtatctcacttcaacttgagcctgtcttctgtgaaggacctgaaggtagagtctgcaggacgccgttgactgatgaaagcctcaaggctttagccgggtgccatagcccatctttggttaaccttacactgcggcaatctgacggtttttctgatgttggagttggtgaggttgtacgtgcacggaaattggattctctgattgttgaaggttgtagcagggtatctcagaaagctgttctggggactgccaaatctattcgctatgaacgatattatcctggttatgggaagctaagaagatcaagcttgagcttcgggcaggattga

SEQ ID NO: 53186 - DNA, 4513 bp, Oryza sativa
  Clone ID: PAT_MRT4530_55410C.1
cggtcgcgcgccgctcgccactagcaccgccgccgccgcccatctccggccgcgtgccgtcgccactagggccgccgccgcgccaagccgccaccgccgctagctccgccgccgtgtgggccatctcggtcaccgcctcgcgtcgctggaaccccaccggaaccctatctccctcgcgagccggtgagctatccattcccctccgtctccggccagccattttggtcgtcgcggtcgccttctccatccctaactcctctcctcccctcctctaggtgtcgctaccgctcgtccgcccctcctctcgtcgggtcatcgtcgccgccttcgttttccgctcgcgagcgccggccacgtcgctgctccggccatgcgccgccgcctttcggccatcgccgccgcttcccgcaccgccggtcaccgccgtcggtggctgtgcctcgccgccgcctcgccttggtcggccggtcggccacaagcgggagtgggtaactgcttgatctgaagtatagctcgaccctttcctaggcaccggtggcgagggtgggcgtgatggagttgggtcggccgaggtgttcggttgtccagcagagttgaagttcttctcagttggagccgtctcagagaggttggtttcgttgctgccgtcaaggtttgcctgtggagtggagtcgcccgctgctgaagtcaagtttcccggtttagctcgctttaatcttttccgctgcatttgtaatcttttatatttttgtaagacgtgggtctgtatgtcaacaattgtcgtttgtgtaccctggctggtcgtcacggtggaccttccaccatgattatccggcagcaccgtccctaccacccgggtagcttcaacaagaaccaccatagtggcagtcacaacaacagtgagcagcacagcctcaaccctactccgagttcactaaagattccagctcaatcagttcagccagctctgccagaacagcccaagaggttgggagaaaaacccgaactctgcttcaattgtaacaaacccggacacacggttggaaagtgcccgaagccaagatgtgctggacccaagttcgttcaggcccgtgtcaatcatgcatctgcagaggaggcgcagtcagcaccagaggttatattgggcacattccccgtcaactcgacaccggcagtaatattgtttgattctggtgcaacacattccttcatttccaagcgttttgctggtgcacatgggttatctttagtgaagcttaagataccaatgcgagttcatactcctggaggtggcatgaccacaactcactactgcccatctgtgacagttgaaattcaagggttgatttttccagccaacctcattcttctcgaatccaaggacctagatgtcatacttggaatggattggttgacaaggcacagaggagtgattgattgcgctagccgtaccatcaagttaaccaatgcaaaaggagaggtggtaaccttccagtctccagtgccgcagaagccagggatcagtttaaaccaggctgctggtgaagaacaagaggtagcagtggagaaaaccactaagaagctggaggatattcccatagtcagagagtatccaaaggtttttccagacgatctgacaacaatgccaccaaaaagggatatcgagttccggattgacttggtacctggaactgcaccgatccacaagaggccttacagaatgggagccaacgagttggcggaagtcaagaagcaagtcgatgaacagttacagaagggatacatccgcctgagcacgtcgccttggggtgctccggttatctttgtggagaagaaagacaaaaccaagaggatgtgcgttgactaccgcacactcaatgaggtcaccatcaagaacgagtatcctttaccaaggattgatgatctgtttgatcagttgaaaggagctactgtgttctctaagatagacctacaatcaggctatcaccagttgaggatccgcgaagaggatattccaaagacagcattcatcactcggtacgggttgtttgaatgcacagttatgtctttcggactcactaatgcacctgacttcttcatgaatttgatgaacaaggtgtttatggaatttctagacaagtttgtcgtggttttcatcgatgacatacttatctactccaagtccgaggaagaacatgagcagcatctccggttggtacttgaaaagttaaaagagcaccagctatatgccaagtttagcaagtgcgacttctggcttaaggaagttcagtttctcggtcacatcgtgaatgctcaaggagtagctgtggatccagcaaatgtggagtcagttaccaaatggaccccaccaaggacagtcactcaggttcggagtttcttaggacttgcgggctattaccgccggttcattcagaacttctctaaaattgctaagccaatgacacagctattgaagaaggaagaaaagtttatctggtctgctgaatgcaataggagttttgaagaactcaaacgatggttggtgtctgcaccagtcttaatcctgcctgatcagacaaaagatttccaggtctattgtgatgcatctcgccaggggctaggatgtgtgttgatgcaggatggcaaagtggtctcttatgcttcacggcagttgcgttctcatgaaggcaactacccgacgcatgatctggaattggccgcagttgttcatgctttaaagatttggcggcactatctcatcggtaaccgttgtgaggtatatacagatcacaaaagtctaaagtacatcttcactcaacctgatttgaatctcagacagcaaagatggttggagctgatcaaggattatgatatgggaatacattatcatcccggcaaggctaatgtggttgcagatgccttgagcaggaagagctactgcaatgttgcatgggtagagcaactatgttgtgaggttcaacgcgatttggaacatctgaaccttggtatagttgagcacggattcgtggttgccctagaggcacagcccacactggtggagcaggttcgcatagctcaagcaagtgatcctgaaatagcagagctcaaaaagaacatgagagttggaaaagcccgaggttttgttgaggatgaacaaggaacaatctggatgggagaaagattgtgtgtacccgaaaacaaggaattaaaagacctgatactaaccgaggctcatcaaactcagtattccattcatcccggtagtactaagatgtaccaagacctcaaagagaagttctggtgggtcagcatgagaagggaaatagctgaattcgtagcactctgtaacgtctatcaacgagtaaaggcagaacaccaaaggccagcaggtttgctacagccacttcagattccagaatggaagtgggaagaaatcggaatggatttcatcaccggtttgcccaggacgtcatcggggcatgattctatttgggtagtcgttgaccgactcaccaaagtggctcacttcattccggtgcacactacctactcagggaagaaattagcagaactctatctggcaagaattatgtgtttacatggtgtacctaagaagatcgtgtctgatcgaggaagccaatttacttcaaagttctggcagaaattacaagaagaattgggaacccggttgaatttcagcactacttaccatccacaaacagatggccagaccgagcgagtcaatcaaatactagaggatatgttgagagcctgtgcgcttgactttggtggagcatgggacaaaagcttgccgtatgctgagttctcttacaacaacagttaccaagctagtctgcagatggcaccgtttgaagcactgtatggacgaaggtgtcctactccactcttctgggatcagacaggggaacgccagttgtttggtacagaagttttaaatgaggcagaagagaaagtcagagctgttagggaaagattgagaatcgcgcaatctcggcagaaaagctatgcagacaaccgccgaagggagctcgctttcgaaacaggggattatgtgtatctccgtgtcactccactcaggggagtacatcgcttccaaaccaaaggaaagttggcaccacgctttgtgggaccatacaggatcttggaacgtagaggtgaagttgcttaccagcttgagcttccctccaacatgcttggcatccacaacgtgttccacgtctctcaattgaagaaatgtttgagaggacctgaggaacaggcaagtccggatcacatcaaaattcaggaagatctgacatatctggagaagccgactcgtatcctcgaaaccagcgagagaaggaccagaaacaaagtaatcagattctgcaaggttcagtggagtcatcactcagaagaagaggccacttgggaaagagaagatgagttgaaggccacccacccgcacctcttcgccagcacttccgaatctcgaggtcgagattccgtttaa

SEQ ID NO: 53187 - DNA, 2109 bp, Oryza sativa
  Clone ID: PAT_MRT4530_55411C.1
gccatccctctcctctcctccccactttcctgcctgcctccccgcacttcttccttccctgccccaacctcccctccaccaagaacagcagtggagaaggaaggaacgaacgaagcgatcggagcagccccccgtcccaccctgcaaacctgcattgctgcccccgggtcattcttgggtcgtgggagtcggattcgggtttcttggcagccggctgcaatcatccgtggtgccttcaaagtattgcaagttgccgtgaaaggccattctagggaatgcagaaagatgtgcttgcacgccagagatatctcctatgaagagaagggcatttctcccattgatttgacatcactaattcttgatgagcgaggatttcagttgctcacctggtgcattctgcaatcactaagtaataatgatgctatcaatgtcagaaatactgctatgctagatcatgcaatttctgatgatggttgaagtttttgcttttacggttttcctctaaaattccaataaagaattgtccgctagcattgttttgaatgatggaacttgagaagaatggaaacattctactgcgaaggtatgagattggaaaattattggggcaaggaacttttgccaaggtttatcatggtaggaacatcgtgacttcacaaagtgtggctatcaaggtgatcgacaaggacaaaatttttaaggttggcctaatggatcagattaaacgagagatatctgtgatgaaattagtgaggcaccccaacattgtacagctgtatgaggtcatggctaccaaatcgaagatatactttgtgctagaatatgtcaagggcggtgagttgtttaacaaagtagctaaaggtaggttgaaagaagatgctgcaaggaaatacttccagcaattagtaagtgctgttgatttctgccacagtagaggcgtttatcatcgcgatctgaagccagagaacctacttgttgatgaaaatggaaacctgaaaattaccgattttggattgagcgctcttgctgaatcaagacgacaagatggccttctacacacaacttgtggaactcccgcatatgtggcgcctgaggtgatcagccgaaaagggtatgacggtgtcaaggttgacacatggtcttgtggtgtgatcctgtttgttctgatggctggttatctgccttttcaagattcaaatttgatggagatgtacagaaagattgggaaagcagagttcaaatgcccagcttggttttcgtctgatgtacgaaaattagtttcgagaattcttgatccaaacccaagaagtagaatgccaattacaaaaataatggaaacttactggttcaagaaaggacttgatagcaagctaatccttaagaacgtggagacaaatgaaccagttacagctcttgctgatgttaatgttgttttctcctccatgggtagcagtagtagcaaaaagactgaggagaaacaggatgcaggaaagctaaccaaccttaacgctttcgatattatttctctttcggaaggctttgatctttctggcttgtttgaggagactgataaaaagaaagaagcaaggtttacatcaagtcaatcagcttcagctattatctcaaaactagaggatgttgcctcatgttcgaagttgacagtgaaaaagaaagaaggtggtgtgctgaaaatggaaggtgcaagtgaaggaaggaaaggtgtattggcaatcgatgcagagatcttcgaggtgactccttcatttcatttggtagaaatcaagaagaacaatggagatacactagaataccaacatttgtggaaggaggacatgaaaccagctcttaaggacattgtttgggcttggcaaggtgaacgccaggatcagcaacctgaagatcatggccagccatagaattgtttcaatgtcgaaatgtttcgttgccttaggaaaggcactgcttatcctttggcttattattcgttctatcttctgtcttcccaaaatccatagctcaatgaaattcgcacaacaatgtaattggattctgaggaatctgaacttataatgcagtgtaatactagttattttttgttgttggcagttc

SEQ ID NO: 53188 - DNA, 2748 bp, Oryza sativa
  Clone ID: PAT_MRT4530_55412C.1
atggtatctacggatggaatgagttctactcggacaagactggatctttgccatatcatgaggggcctgatatcttcaagtcctacttggagatcaactgacccgcggtggggcccacctgtcgggtcgtccctaacctcccgccgcctagttccctccccccaagtcggcaaccgccgccgctcccacgtcgccgtccgcgtctcctgtgcccactccgcgtccacgcgccgcacccacgtcatccgccgcttgccaccgccaccgctagagccgccgccgcgccgcgccatcgcctccgtcgcgctcaccgagcccgtgttgctgccacccgtccgctcctccgctcgccggtcatcggcgctgccttcatccttcgcaccggccgccgtgctcgccggtgaggaaccccctctcttcctcccacttatctctcccgccgccgctgcgccgctgccgcttcggccgtgcgccgccgcgttcgcgtcgctcgccgccgccctcccacgccgccgcttgccgtcgccggcgctcgaccctttcctaggcaccggtggcgagggtgggcgtgatggagttgggtcggccggggtgtccggttgtccagctgccggattcaccgcggcgcaagaggggaccgcccactgccttttgaggggtggggggcatggcgacatagctgaagatcttcctagtgggagctgtcctgccgaagttggttttgtcgctgccgtcaagggatgcctgtggagtggagtcgccccgctgctgaagtcaagcttcccgatgatgaagacaaggaatggttcccatgtctccaacgacgctagtggcagcgaagagcagatcaatggagcacgtgccagcgatgcatcggacaacagtccgtctccaccgcccgagaacccaacaattgctcagcagcaagcacaacagcagcagcagaacctgcagtttggtcttccacctccccagtccaaactgttgaagtttcttcgtgtcaagccgcccactttctcaagcaccaccaacccaatcgaggccaatgactggcttcatgctattgagaagaagctgaaccttttgcaatgcaacgagcaagagaaggttgcttttgctatacaccagctgcacggtcccgcttctgtttggtgggacaactacatggatcccgaggaaattgtggcacaaaagaagagagagttctgttctttacggcaaggaactaggacagttatagagtatctgcacgaattcaaccgcctcgcgcgctacgctcatgaggacgtgcgcaccgatgtcgagaggcaggagaagtttttgtctggtcttgatgacgaattgaccaaccagttgatctccagagattatgaggacttcgagaagctggtggacaaagctatccgtcaagaggagcagtgtaacaaaatgaaccgaaaaaggaaggcatctccattcagaactttccaggggaacagtcagaagcctcgcttcatgacgggacatcagggtggaccttccaccatgattattcggcagcaccgtccttaccacctgggtaatttcaacaagaacaacaacagtggcattcacagcaacaatgaccagcacagcctcgacccgactccaagtccactaatgattccagctcagtcagttcagccagctctgccagaacagcccaagaagtttggagaaaaacccgacctctgcttcaattgtaacgagcttggacacactgttggtaagtgcccaaagccacgacgtgccggacccaagtttgtgcaggcccgtgtcaatcatgcgtctgcagaggaggcgaagtcagcaccagaggttatattgggcacattttctgtcaactcgacaccggcagtaatattgtttgattctgatgcaactcattccttcatttccaagcattttgctggtgcgcatgggttatctttagtgaagcttaagataccaatgcgagttcatactcctggaggtggcatgtccacaactcactactgcccatcagtgacagttgaaattcaagggttgatttttccagccaacctcattcttctcgagtccaaggaccttgatgtcattcttggaatggattggttgacacggcacagaggagtgattgattgcgctagccacaccatcaagttgaccaatgcgaaaggagaagtggtaaccttccagtctctagtgccgcagaagccagggatcagtttaaacccggctgctggtgaagaacaagaggtaacagtggagaaaaccggtaagaagttggaggatattcccatagttagagagtatccagaggtttttccgaatgatctgacaacaatgccaccaaaaagggatatcgagttccggattgacttggtacctggaactgcacagatccacaagaggccttacagaatgggagccaacgagttggtggaagtcaagaagcaattgcgtcctcatgaaggcaactacctgacccacgatctggaattggccgcagttgttcatgctttaaagatttggcggcactatctcatcgattatgatatgggaatacactaccatcccagcaaggctaatgtggttgcagatgccttgagcaggaagagttactgcaacgtcgcatgggtagaggaactatgctgtgaggttcaacgtgatttggaacatttgaaccttggtatagttgagcacggattcgtggctgccctagaggcacagcctacactggtggagcag

SEQ ID NO: 53189 - DNA, 428 bp, Oryza sativa
  unsure (1)..(428): unsure at all n locations
  Clone ID: PAT_MRT4530_55413C.1
agcgatgtggggaagtggttttatcttgaccattacggtattgagcaaggaccttctaagcttgctgacttgaagaagctggtggaagatggatatcttctttctgatcatctaataaagcatgctgacagcaatcggtgggtgactgttgagaatgcagcttcaccactggttccatccgaattcccctcagtatattcagatgtctcaacacagctggttagcccgnccagaagccccaggtaatttacttgatgaagctcgagaggaggcatctggtactgaccattgaacaaatgaaggcagcttctgcagaagagcaggaagatttctacattgatgacagggttgatgcattgatggatggatctatcatggtggatggtcaggagcttgagattcttggagagcttctaaatgcacatttt

SEQ ID NO: 53190 - DNA, 3366 bp, Oryza sativa
  Clone ID: PAT_MRT4530_55414C.1
atggtgacccgtccagctgggacagaggttacctggtcagagttttgtcagagtttcaataaagcacaagttcctgagggaatcgtggcacaaaagaagagagagttccgttctccgcaacaaggaaccagagcagttatagagtatttgcatgagttcaaccgtctcgcgcgttatgcccctgaggacgtgcgcactgatgccgagaggcaggagaagtttttgtctggtcttgatgacgaattgaccaaccagttgatctgcagagattatgaggactttgagaagctggtggacaaagctatccgtcaggaagagcagtgcaacaaaatgaaccgtaagaggaaggcagctcagctcagaacttcccaggggatcagtcagaagccttgcttcacgatgggacatcagggtggaccttccacaatgattatccggcagcaccgtccctaccacccgggtagcttcaacaagaactacaacagtgagcagcacagcctcaaccctactccaagtcttctaatgattccagctcagtcatttcagccagctctgcctgctcagccagaacagcccaagaagtttggagaaaagcccgaactctgcttcaattgtaacgagtcaggatacatggtacaggaggcgcagtcagcaccagagattatattgggtacattccccgtcaactcgacaccggcagtaatattgtttgattctggtgcaactcattccttcatttccaagcgttttgctggtgcacatgggttatctttagtgaagcttaagatacctatgcgagttcatactcctggaggtggcatgaccacaactcactattgcccatctgtgacagttgaaatccaagggttgatttttccagccaacctcattcttctcgagtccaaggaccttgatgttattcttggaatggattggttgacaaggcacagaggagtgattcattgcgttagccgcaccatcaagttgaccaatgcgaaaggagaagtggtaaccttccagtctccagtaccgcagaagccaggaatcagtctgaaccaggccactggtgaggtagcagtggagaaaacctctaagaagttggaggatattcccatagttagagagtatccagaggtttttccggatgatctgacaacaatgccaccaaaaagggatatcgagttctggattgacttggcacttggaactgcaccgatccacaagaggccttacagaatgggagccaacgagttggcggaagtcaagaagcaagttgatgagcagttacagaagggatacatccgcccgagcacgtcgccttggggtgctccggtaatctttgtggaaaagaaagacaaaactaagaggatgtgtgttgactaccgcgcactcaatgaggtcactattaagaacaagtatccgttgccaagaattgatgatctgtttgatcagttgaaaggagctactatgttctctaagatagacctacgatcaggctatcaccagttgagaatccgagaggaggacattccaaagacagcattcatcattcattatgggttgttcgaatgcacggttatgtctttcggactcactaacgcacctgccttcttcatgaatttgatgaacaaggtgtttatggaatttctggacaagtttgttatggttttcatcgatgacatactgatctactccaagtccaaggaagaacatgagcagcatcttcggctggtacttgaaaagttaaaggagcaccagctatatgccaagttcagcaagtgtgacttctggcttaaggaagttcagtttctcggtcacatcgtgaatgctcaaggagtagctgtggatccagcaaatgtggagtcagttaccaaatggaccccaccaaggacagtcactcaggttcggagtttcttaggacttgcgggctattaccgtcggttcattgagaacttctctaaaattgccaagccaatgacccagctattgaagaaggaagaaaagtttatctggtctgctgaatgtaataggagttttgaagaactcaaacgacggttggtgtctgcacccgttttaattttgccagatcagacgaaagacttccaggtctattgtgatgcatctcgccaagggttagggtgtgtggtgatgcaagatggcaaagtggttgcttatgcttcacgtcagttgcgtcctcatgaaggcaactacccgacccacgatctgaaattggccgcagttgttcatgctttaaagatctggcggcactatctcatcggtaaccgttgtgaggtatatacagatcacaaaagtctaaagtacatcttcacccaagctgatctgaatctccgacagcgaagatggttggagctaattaaagattatgatatgggaatacactattatcccggcaaggctaatgtggtagcagatgccttgagcaggaagagctactgcaacgtcgcatgggtagaggaactatgctgtgaggttcaacgtgatttggaacatctgaaccttggtatagttgagcacggatttgtggctgccctagtggcacagcccacactggtggataccaaaatgtaccaagacctcaaagaaaaattctggtgggtcagcatgagaagggaaatagctgaattcgtcgcactctgtgatgtctgtcagcgagtaaaggcagaacaccaaaggccagcagcctaccatccgcaaactgatggccagactgagcgagttaatcaaatattggaggatatgttgagagcctgtgcgcttgactttggtggagcatgggacaaaagcttgccgtatgctgagttctcctacaacaacagttaccaggctagtctgcaaatggcactgtttgaagcattgtatggacggaggtgtcgtactctgctcttctgggatcagaccggggaacaccagttgtttggtacagaagttttaaatgaggcagaagagaaagtcagagctgtcagggaaagattgagaatcgcacaatctcgacagaatagctatgcagacaaccgccgaagggagctcgctttcgaagcaggggattatgtgtatctccgtgtcactccgctcaggggattgaagaaatgtttgagagttcctgaggaacagacaagtccggatcacatcgaaattcaggaagatctgacctatgtggagaagccagtccgcatccttgagaccagcgagagaaggaccagaaacaaggtaatcagattctacaaagttcaatggagccaccactcagaagaagaggccacttgggaaagagaagatgagttgaaggccgcctatccgcacctcttcgccagctcttccgaatctcggggtcgagattccgtttaa

SEQ ID NO: 53191 - DNA, 375 bp, Oryza sativa
  unsure (1)..(375): unsure at all n locations
  Clone ID: PAT_MRT4530_55415C.1
ggcacgagcgaggggcagctgggcaaggtgacgtgcgtggtggtcgatgtcggcatgtcgtgggcgctcgatgccgtgaagcggaggggcctcccgggcgccgcgctctgggcagcgtcggcggcggtgctcgccgtgctactcggagcgcagaagctgatacgcgatggcgtcattgatgacgacggtgcaccactcaaattanagaacaactcattccgtctctccgagttcacgccacccatggacgcgaccttccttgcatggaacttcatgggcaaccgtgatgcagaacgtatggtgttccattaccttacctnctccgcacgggctgctgcggccaaagcagacattctcctctgcaactcattcgng

SEQ ID NO: 53192 - DNA, 1550 bp, Oryza sativa
  Clone ID: PAT_MRT4530_55416C.1
attccccctcttccgcctctccggccgccgcgtcgtacacaacctcgcgccggtgagcggcggcgccgacgaagcaggactccctccgcccagccccattctcccgcgtggggggatccatggagggcggcggcgaggtgggctggtacgtgctcggcccgaaccaggagcacgtcggcccctacgcgctctccgagctgcgagaacattttgctaatgggtacatcagtgagagctcaatgctctgggcagaagggaggagtgaatggatgccattgtcgtcgattcctgacctacttgcggtggtcacaaaaaaggatcaacctgatgaaggaattgaagatgatttcgataaatttcaaaaggaggttatagaagctgaggcagaggtggaagcctcgacagacaaggctgcagataacgacataaaccaagaacatggggccgatgatcctgatgaccggccagcaaccccaccagatggcgaggacgaatttactgatgatgatggtactgtttacaagtgggatcgtgtcctgagggcatgggttcctcaagatgacctagaaggcaaaaatgacaactatgaagttgaagacatgacttttgcacatgaggaagaagttttccaagcaccagatattgctggttcaaccacattagaagaaaacaatgtttctgccgaaattgaaatcaaagaaccaacaaaggtagaaaagagagcagataagaagcggaagtcttctgagaagccagccgataaaaaggaagctaacaaacctccagatagttggtttgatctcaaagttaacacacatgtctacgttactggtttgcctgatgatgtcacagctgaggagattgtggaggtattttccaaatgtggaattataaaggaggacccagagacaagaaaaccccgagtaaaaatctatactgacagagaaacaggcagaaagaaaggtgatgcgctagtgacctacctcaaggagccttctgtagcactagcaattcaactgttggatgggacatcatttcgccctggtggtaagactctaatgtctgttagcccggccaaatttgagcagaaaggtgatgttttcatttctaagaagacagataagcaaaagaaaaggaaaaccaagaaagttgaggataaaattctaggatggggtggacatgatgacaagaaggtgacgattacaactacagttattttgaggcatatgttcactcctgctgaattgcgagccgatgaaactcttcttcccgagcttgaggcagatgttagagaagaatgcatgaagcttggtccagttgataatgtcaaggtctgtgaaaatcatccagagggtgttattttggtgaaattcaaagaccggaaagatggtatcaaatgcatagagaagatgaatggaagatggtttggtgggaatcaaatccaggcgagtgaagatgacggttctatcaaccatgctctgatccgtgattatgatgcagaggtgtcaaggcttgatcgatttggagaagagttagaagagtccacatag

SEQ ID NO: 53193 - DNA, 549 bp, Oryza sativa
  Clone ID: PAT_MRT4530_55417C.1
atggccgccgccgccgccgcagcagcagaccacgatgccgcgccgcgcgcgcacgcgctcatcctcccgtacccggcgcagggccatgtcatcccgctcatggagctcgcgtactgcctcatcgaccgtggcttcgccgtcaccttcgtcaacaccgagcacaaccaccgccgcgtcgtggccgccgccgctggcgcaggcggcgtgcaagcaccggggagccgggcacggcgcctgcggctcgtggcggtggcggacgggatgggcgacggcgacgaccgggacaacctagtccgcctcaacgccgtcatggaggaggccatcccgcctcagctggagccgattcttgatggcgccggcggcgaggggcagctgggcaaggtgacgtgcgtggtggtcgatgtcggcatgtcgtgggcgctcgatgccgtgaagcggaggggcctcccgggcgccgcgctctgggcagcgtcggcggcggtgctcgccgtgctactcggagcgcagaagctgatacgcgatggcgtcattgatgacgacgtattttaa

SEQ ID NO: 53194 - DNA, 4386 bp, Oryza sativa
  Clone ID: PAT_MRT4530_55418C.1
atggagacaaggaatggttcacgcgactccaacaacgttagtggcagcgaagagccggtcaatggagcacgtgccaacagtgcatctgacaacagtccgtccccactgcccaagaacccaacaattgctcaggtgttggacaatcagactcagatgatgacaatgatgatgcaacagatgcagcaacagtaccatcaggtgttgcagcaggtgcagcagcaagcacagcagcagcagcagaacctgcagtttggtcctccacctcctcagtccaaactgttagaatttcttcaggtcaagccgcccactttctcaagcaccaccaacccaatcgaggcccacgactggcttcatgccattgagaagaagctgaatcttttgcaatgcaacgagcaagagaagtgggacaactacatggtgacccgtccagctggggcagaagttacttggacagagttttgtcatagtttcaataaagcacaggttcccgagggaattgtggcacaaaagaagagagagttccgttccctgcaacaaggaaccagaacagttatagagtatttgcatgagttcaaccacctcgcgcgctacgcccctgaggacgtgcgtaccgatgacgggaggcaggagaagtttctgtctggtcttgatgatgaattgactaaccagttgatctctagagattatgaggactttgagaagctggtggataaggctatccgtcaggaggagcacagtaacaaaataaaccgtaagaggaaggcagctcagttcaggactccccaggggaaaagtcagaagcctcgtttcacgatgggacaccgcccctaccacccgggtagcttcaacaagaaccaccatagtggcagtcacaacaacagtgagcagcacagcctcaaccctactccgagttcactaaagattccagcccaatcagttcagctagctctgccagaacagcccaagaggttgggagaaaaacccgaactctgcttcaattgtaacaaacccggacacacggttggaaagtgccagaagccaagacgtgctggacccaagttcgttcaggcccgtgtcaatcatgcatctgcaaaggaggcgcagtcagcaccagaggttatattgggcacattccccgtcaactcgacaccggcagtaatattgtttgattctggtgcaacccattccttcatttccaagcgttttgctggtgcacatgggttatctttagtgaagcttaagataccaatgcgagttcatactcctggaggtggcatgaccacaactcactactgcccatctgtgacagttgaaattcaagggttgatttttccagccaacctcattcttctcgaatccaaggacctagatgtcatacttggaatggattggttgacaaggcacagaggagtgattgattgcgccagccgcaccatcgagttgaccaatgcaaaaggagaggtggtaaccttccagtctccagtgccgcagaagccagggatcagtttaaaccaggctgttggtgaagaacaagaggtagcagtggagaaaaccactaagaagctggaggatattcccatagtcagagagtatccagaggtttttctggacgatctgacaacaatgccaccaaaaagggatatcgagttccggattgacttggtacctggaactgcaccgatccacaagaggccttacagaatgggagccaacgagttggcggaagtcaagaagcaagtcgatgaacagttacagaagggatacatccacccgagcacgtcgccttggggtgctccggttatctttgtggagaagaaagacaaaactaagaggatgtgtgttgactaccgcgcactcaatgagttgaggatccgcgaagaggatattccaaagacagcattcatcactcggtacgggttgttcgaatgcacagttatgtctttcggactcactaatgcacctgccttcttcatgaatttgatgaacaaggtgtttatggaatttctagacaagtttgtcgtggttttcatcgatgacatacttatctactccaagtccgaggaagaacatgagcagcatctccggctggtacttgaaaagttaaaagcgcaccaactatatgccaagttcagcaagtgcgacttctggcttaaggaagttcagtttctcggccacatcgtgaatgctcaaggagtagctgtggatccagcaaatgtggagtcagttaccaaatggaccccaccaaggacagtcactcaggttcggagtttcttaggacttgcgggctattaccgccggttcgttgagaacttctctaaaattgctaagccaatgacacagctattgaagaaggaagaaaagtttatctggtctgctgaatgcaataggagttttgaagaactcaaacgacagttggtgtctgcaccagtcttaatcctgcctgatcagacaaaagatttccaggtctattgtgatgcatctcaccaggggctaggatgtgtgttgatgcaggatggcaaagtggtttcttatgcttcatggcagttgcgtcctcatgaaggcaactacccgacgcatgatctggaattggccgcagttgttcatgctttaaagatttggcggcactatctcatcggtaaccgttgtgaggtatatacagatcacaaaagtctaaagtacatcttcactcaacctgatttgaatctcagacagcgaagatggttggagctgatcaaggattatgatatgggaatacattatcatcccggcaaggctaatgtggttgcagatgccttgagcaggaagagctactgcaatgttgcatgggtagagcaactatgttgtgaggttcaacgcgatttggaacatctgaaccttggtatagttgagcacggattcgtggttgccctagaggcacaacccacactggtggagcaggttcgcatagctcaagcaagtgatcctgaaatagcagagctcaaaaagaacatgagagttggaaaagcccgaggttttgttgaggatgaacaaggaacaatctggatgggagaaagattgtgtgtacccgaaaacaaggaattaaaagacctgatactaaccgaggctcatcaaactcagtattccattcatcccggtagtactaagatgtaccaagacctcaaagagaagttctggtgggtcaggatgagaagggaaatagctgaattcgtagcactctgtgacgtctgtcaacgagtaaaggcagaacaccaaaggccagcaggtttgctacagctacttcagattccagaatggaagtgggaagaaatcggaatggatttcatcaccggtttgcccaggacgtcatcggggcatgattctatttgggtagtcgttgaccgactcaccaaagtggctcacttcattccggtgcacactacctactcagggaagaaattagcagaactctatctggcaagaattatgtgtttacatggtgtacctaagaagatcgtgtctgatcaaggaagccaattcacttcaaagttctggcagaaattacaagaagaattgggaacccggttgaatttcagcactgcttaccatccacaaacagatggccagaccgagcgagtcaatcaaatactagaggatatgttgagagcctgtgcgcttgactttggtggagcatgggacaaaagcttgccgtatgctgagttctcgtacaacaacagttaccaagctagtctgcagatggcaccgtttgaagcactgtatggacgaaggtgtcgtactccgctcttctgggatcagacaggggaacgccagttgtttggtacagaagttttaaatgaggcagaagagaaagtcagagctgtcagggaaagattgagaatcgcgcaatctcggcagaaaagctatgcagacaaccgccgaagggagctcgctttcgaaacaggggattatgtgtatctccgtgtcactccgctcaggggattacatcgcttccaaaccaaaggaaagttggcaccacgctctgtgggaccatacaggatcttggaacgtagaggtgaagttgcttaccagcttgagcttccctccaacatgcttggcatcgacaacgtgttccacgtctctcagttgaagaaatgtttgagagttcctgaggaacaggcaagtacggatcacatcgaaattcaggaagatctgacgtatgtggagaagccgactcgtatcctcaaaaccagtgagagaaggaccagaaacaaagtaatcagattctgcaaggttcagtggagtcatcactcagaagaagaggccacttgggaaagagaagatgagttgaaggccacccacccgcacctcttcgccagctcttccgaatctcggggtcgagattccgtttaa

SEQ ID NO: 53195 - DNA, 141 bp, Oryza sativa
  Clone ID: PAT_MRT4530_55419C.1
atggaccttgtcggagggctatacgggcaaggactgcagggtggaagccgtgccgcgaaggacacgggtttcgccaagagccggacctcacttgaaaagggcccaacgggccatcatgccctctgggggcttcaccaataa

SEQ ID NO: 53196 - DNA, 590 bp, Oryza sativa
  Clone ID: PAT_MRT4530_5541C.1
gacgcacgcccgcacctcctcccctcccccctcaaaacctccgccgtgatccggtggtggatgcagccgcgtgggcgatccttcaaccgccgctcccggagcttctcccgcgcccgcctcgccatcgaggggtcttaatctcgccggcctcctcccctctctcagactctcagtcgctaaaccctcccctctaaaatcgcactgaacgaacggtcgaacgatcccgccgagatggacgccgcggccgccaccgctgttaatggagtgcttgaggtggaggagaggaaggcgcagaagagctacgtgggaggagcactccaaggacctcaccgtcgaggccatgatgctcgactcccgcgccgccgatctcgacaaggaggagcgccccgagatattgtctttacttcctccttacgaaggaaaatcagtactggaacttggtgctggaataggtcgcttcactggagaactagtgaaaacagctgggcatgttcttgcaatggatttcattgaaagtgtgattaagaagaatgaaagcataaacggtcaccacaagaatgcatcctttatgtgtgcggatgtcacatgtc

SEQ ID NO: 53197 - DNA, 4242 bp, Oryza sativa
  Clone ID: PAT_MRT4530_55420C.1
atggagataaggaatggttcacgcgactcgaacaacgccagtggcagcgaagagccgatcaatggagcacgtgccaacggtgcatctgacaacagtccgtccccaccgcccgagaacccaacaattgctcaggtgttggacaatcagactcagatgatgacaatgatgatgcaacagatgcagcaacagtaccatcaggtgatgcagcaggtgcagcagcaagcacagctgcagcagcagaacctgcaatttggtcctccgcctcctcagtccaaattgttagaatttcttcgtgtcaagccgcccaccttctcaagcaccaccaacccaatcgaggcccacgactggcttcatgccattgagaagaagctgaatcttttgcaatgcaacgagcaggagaaggttgcttttgctacacaccagctacaaggtcccgcttctatttggttcccgagggaattgtggcacaaaagaagagagttccgttccctgcaacaaggaaccagaacagttatagagtatttgcatgagttcaaccgcctcgcgcgctacgcccctgaggacgtgcgtaccgatgccgagaggcaggagaagtttttgtctggtcttgatgatgaattgactaaccagttgatctctagagattatgaggactttgagaagctggtggataaggctatccgtcaggaggagcacggtaacaaaataaaccgtaagaggaaggcagctcagttcaggactccccaggggaagagtcagaagcctcgtttcacgatgggacgtcacggtggaccttccaccatgattatccgacagcactgtccctaccacccgggtagcttcaacaagaaccaccatagtggcagtcacaacaacagtgagcagcacagtctcaaccctactccgagttcactaaagattccagctcaatcagttcagccagctctgccagaacagcccaagaggttgggagaaaaacccgaactctgcttcaattgtaacaaacccggacacacggttggaaagtgcccgaagccaagacgtgctggacccaagttcgttcaggcccgtgttaatcatgcatctgcagaggaggcgcagtcagcaccagaggttatattgggcacattccccgtcaactcgacaccggcagtaatattgtttgattctggtgcaacccattcctttatttccaagcgttttgctggtgcacatgggttatctttagtgaagcttaagataccaatgcgagttcatactcctggaggtggcatgaccacaactcactactgcccatctgtgacagttgaaattcaagggttgatttttccagccaacctcattcttctcgaatccaaggacctagatgtcatacttggaatggattggttggcaaggcacagaggagtgattgattgcgccagccgcaccatcaagttaaccaatgcaaaaggagaggtggtaacctcccagtctctagtgccgcggaagccagggattagtttaaaccaggctgctggtgaagaacaagaggtagcagtggagaaaatcactaagaagctggaggatattcccatagtcagagagtatccagaggtttttccggacgatctgacaacaatgccaccaaagagggatatcgagttccggattgacttggtacctggaactgcaccgatccacaagaggccttacagaatgggagccaacgagttggcggaagtcaagaagcaagtcgatgaacagttacagaagggatacatccgcccgagcacgtcgccttggggtgctccggttatctttgtggagaagaaagacaaaaccaagagaatgtgcattgactaccgcgcactcaatgaggtcaccatcaagaacaagtatcctttgccaaggattgatgatctgtttgatcagttgaaaggagctactgtgttctctaagatagacctgcgatcaggctatcaccagttgaggatccgcgaagaggatattccaaagacagcattcatcactcggtacgggttgttcgaatgcacagttatgtctttcggactcactaatgcacctgccttcttcatgaatttgatgaacaaggtgtttatggaatttctagacaagtttgtcgtggtttttatcgatgacatacttatctactccaagtccgaggaagaacatgagcagcatcttcggctggtacttgaaaagttaaaagagcaccaactatatgccaagttcagcaagtgcgacttctggcttaaggaagttcagtttctcggtcacatcgtgaatgctcaaggagtagctgtggatccagcaaatgtggagtcagttaccaaatggaccccaccaaggacagtcactcaggttcggagtttcttaggacttgcgggctattaccgccggttcattgagaacttctctaaaattgctaagccaatgacacagctattgaagaaggaagaaaagtttatctggtctgctgaatgcaataggagttttgaagaactcaaacgacggttggtgtctgcaccagtcttaatcctgcctgatcagacgaaagatttccagcgaagatggttggagctaattaaagattatgatatgggaatacactatcatcccggcaaggctaatgtggtagcagatgccttgagcaggaagagttactgcaacgtcgcatgggtagaggaactatgctgtgaggttcaacgtgatttggaacatttgaaccttggaatagttgagcgcggattcgtggctgccctagaggcacagcccacactgatggagcaggttcgcatagctcaagcaagtgatcctgaaatagcagagctcaaaaagaacatgagggttggaaaagcccgaggttttgttgaggacgaacaaggaacaatctggatgggagaaagattgtgtgtacccgaaaacaaggaattaaaagacctgatactaaccgaggctcatcaaactcaatattccattcatcccggcagtaccagaatgtaccaagacctcaaagaaaagttctggtgggtcagcatgagaagggaaatagctgagttcgtagcactctgtgacgtctgtcaacgagtaaaggcagaacaccaaaggccagcaggtttgctacagccacttcagattccagaatggaagtgggaagaaatcggaatggatttcatcaccggtttgcccaggacgtcatcggggcatgattctatttgggtagtcgttgaccgactcaccaaagtggcttacttcattccggtgcacactacctactcagggaagaaattagcagaactctatctggcaagaattatgtgtttacatggtgtacctaagaagattgtgtctgatcgaggaagccaattcacttcaaagttctggcagaaattacaagaagaattgggaacccggttgaatttcagcactgcttaccatccacaaacagatggccagactgagcgagtcaatcaaatactagaggatatgttgagagcatgtgcgcttgactttggtggagcatgggacaaaagcttaccgtatgctgagttctcgtacaacaacagttaccaagctagtctgcagatggcaccgtttgaagcactgtatggacgaaggtgtcgtactccgctcttctgggatcagacaggggaacgccaattgtttggtacagaagttttaaatgaggcagaagagaaagtcagagctgttagggaaagattgagaatcgcgcagtctcggcagaaaagctatgcagacaaccgccgaagggagctcgctttcgaaacaggggattatgtgtatctccgtgtcactccgcttaggggagtacatcgtttccaaaccaaaggaaagttggcaccacgctttgtgggaccatacaggatcttggaacgtagaggtgaagttgcttaccagcttgagcttccctccaacatgcttggcatccacaacgtgttccacgtctctcagttgaagaaatgtttgagagttcctgaggaacaggcaagtccggatcacatcgaaattcaggaagatctgacgtatgtggagaagccgactcgtatcctcgaaaccagcgagagaaggaccagaaacaaagtaataagattctgcaaggttcagtgtagccaccactcagaggaagaggccacttgggaaagagaagatgagttgaaggccacccacccgcacctcttcgccagctcttccgaatctcggggtcgagattccgtttaa

SEQ ID NO: 53198 - DNA, 687 bp, Oryza sativa
  unsure (1)..(687): unsure at all n locations
  Clone ID: PAT_MRT4530_55421C.1
agcgccactctctcctctcctctcctccctgccccccaggcatcctttgtgccccacgcgcccacgttggcggtgcggttgatccggcaacagcgggcgcctcctcctncttcgtccccaaccaccacccccacccccgcggcgcccatgggtgtccgttcctgagcacaccccacgcttccgctccgcgcatctccgtgggtgggttgggcatataccttgcttcagtcgctttcccatctcttgcttcgtcctgccttcttctttcttccgtgatcccggaacccggtggtcgccgccgcctcggtggatcttgctcggccctgcggggtgctcaggattaacagtgaggggacattctgtattcagtaatatcaagtttctacaaataaataggtgtaggaatacctttgatgccccatttacactgtttgtgcaatgtctttatattctattttctgtgggaacttccatcaactaaggaattcaataggaaagctgtctagtaccagtttgcttaaatgcggattaatctatagaactgtacttcagaacagaggaaataaaactcgaccaatcagtacgacaatactagcaagaagtccaagaaaagaaagtaagcagtcattcaaaaccagccgtcatttgcatagtgaatcggttgagtcatcgattgaagtgctcaaa

SEQ ID NO: 53199 - DNA, 305 bp, Oryza sativa
  unsure (1)..(305): unsure at all n locations
  Clone ID: PAT_MRT4530_55422C.1
cggcgcatgagcaccggcanccatgcctcgccgtggcanccgcacctctcgtgcatcaccgagganccctgagtancgcctagcttaanttctttttcttctctgaantcacagtggtttttttgcctggtgtgtaaanttcctctggtgcccggtaaatatttttantcnccttttgtgttantgatgtgccgnttttncattctgaaancnacaactgtgtatnattttcgaancacaaancgacttccattctatcttcttgtatcttcgaaaaaaaaaaaaaaaaaaaaaaaaaaaaaaaa

SEQ ID NO: 53200 - DNA, 399 bp, Oryza sativa
  unsure (1)..(399): unsure at all n locations
  Clone ID: PAT_MRT4530_55423C.1
taaaacgacggcccattgagcgcgcgtaatacgactcactatagggcgaattgggtaccgggccccccctcgaggtcgnacccangtccgcggacgcgtgccccccggttttaatgtagctctctttttcttctttnctctagttttaatttctttattttggagaaatatatgatgaggcagcattgttattctatactatatacaaatatgatctattatattgctctagtttctcctctaaatttttgacttaaataatttagtttgatgtgtagtggagcaactatttcaagttcttcaaatcgtaatgctactgatcacaagaatctggccttttcccggtgcctctaaaaaaaaaaaaaaaaaaaaaaaaaaaaaaaaaaaaaaaaaaaaaaa

SEQ ID NO: 53201 - DNA, 246 bp, Oryza sativa
  Clone ID: PAT_MRT4530_55424C.1
ttcgacttccatttggatttatttggatttttatttgaattctaaccgaattcaaatcaattttcacacgtaactatagagcccgagggagttgcggatccaagtgaaggccaagacacgcaagactttgagcaaggcaagtcatcactattcctttaacttgttgatcccaattgcgaaattattttgtttgcaaataaaattgcatgcaatgataaacatcctacttgtgattatgctatgcct

SEQ ID NO: 53202 - DNA, 537 bp, Oryza sativa
  Clone ID: PAT_MRT4530_55425C.1
gtggtttttttttttttttttttttttttttttttttttttttttttttttttttttttggttcaaaacattcaaaaaaggcatgtttttcttttttggcaagccgcaccttgttaatgcccacccggcaacccattacccaaaaaacctgcgggtggggttaccggaggttcccaattataacattctggcttggtgatcaacaaatagggcccataccgaaaccaccttggaatcccgcgaggttttctgcatacctgaataccctctccccccccttttaaggccccccctaaggatcccccccccattttgaacggtccccttatttaaaaattttttataattaggatttttgggggtatgggaggataaaacataaatagggctttactcgggacctatgtttttaaaatttttcaaaaaaaatttaaataaaacgggtgggcaaaggtgaaccccgaaaaactgctgcactcttaataaaacggggggagggctcattagtccccaagctcgcgaaggaattttttttag

SEQ ID NO: 53203 - DNA, 1749 bp, Oryza sativa
  Clone ID: PAT_MRT4530_55426C.1
atggagggctcgggcgtcgagggcatcgtcatcgccggcgccggcctcgcggggctcgcgacggcgctcgggttacacaggaaaggggtgaggagcctggtgctggagtcgtcggcgacgctgcgggcgtccgggttcgcgttcacgacatggacgaacgccttccgcgcgctcgacgcccttggtgtcggcgacaagatcagggagcatcatctgctctacgagaggctgttggccttctctgcatccacgggagagcctgccgcgaagttgagtctaaagatgcaagggaaaagtggaccgcatgagattcggtgcgtgaagcgcaacttcctactggagactctggagaacgaactgccggaaggcaccatcaggttctcttccaagatcgtctcgattgaggaagacggcaatgtcaagctcctacatttgtccgatggctcaacgataagagcaaaggtgctgataggctgcgacggcgtgaactcggtggtggcgaagtggcttggcctgccaaagccgatcctctcagggcgctcggccaccaggggcctcgctgagtacccggccggccacggattcggcccggagatcctgcagttcatcggccagggcttccgctccggcgtgctcccctgttccgacacctccgtctactggaactacacctggtacccctccccggatgacggcgacgcggaggagagcgtggccaagatgcggagctacgtggtggcgaagctgagggcggcgaggatcccggcggaggcgctggacgtgatcgagcggagcgagatgagcgacgtggtgtcgtcgccgctgaggttccggtcgccgctcgcgctcgtccgcggcagcatcagcaggggcaacgtctgcgtcgccggcgacgccttccacccgacgacccccgagctcggccagggcggctgcgcggcgctcgaggacggcgtcgtcctcgcccggtgcctcagcgaggccttcctcgccgacggcgccgagcacgacccggggtacgaggccgtcaaggcggcgctggagaagtacgccgaggagaggcggtggcgcggcatccggctgatcacggcggcctacgtcgtcggcttcatccagcagagcaccaacccggtgatcaagttcctcagggagaagttctttgaatctccatttgttgagcatatggatttgtcaggtccaagatggaagaagggcaaagatggcaaggacttcttagcactagcagcagctaatcccatgtcagtcattgttgctgagctcaatgcctcattcataagctcaaagcctgtggcaattttgtcaggtccaggtggcggtgccattcttggagttgagccaaaacaagccgtgatcctaaaccgtgctgcctttggccacgccgtcgaaattgctgcggcacagaagcactggttccaacttagccctgaggaggtcttctacctatgccatgttctgaactgcatcagggttgagtcacgggacaagaagcagatgagtgaaaagcaactgtggaatcacttcaggtccatgtcggagtcctttccagagatgtacaaggcttactcgcatccgagattgtcacgacctcatggcaccaacagagttgggttaaaccacgtgtcaaatgcttacgttcatggacgagacgactcagacaagggcaccgataagcacgaaggaaaatcgtgcgtcgtcggcggtgcttatccggacatactacgcgagtag

SEQ ID NO: 53204 - DNA, 2496 bp, Oryza sativa
  unsure (1)..(2496): unsure at all n locations
  Clone ID: PAT_MRT4530_55427C.1
cagaaaagttgtatttcctgaactctgaacaaacagtactggttgtcgttctgaattgaactgtaaatgctataccactagacttgatcgattcgtttctagcggcatgctaattgttccattgcagtttcaggttccctcagtaaaacgccaagatggttaatttcgggaagagactgatggcggaccaattggaggagtggaaagagtactacatcaattacaaaatgatgaagaaaaaggtaaaacagtatgttcagcagacgcagaatggtggaagaaatcgtgaacaggttcttaaagagttctcaaggatgcttgatgatcagattgagaagattgtgctctttcttctgcaacaacaaggccatcttgctagcagaatcgagaaattgggagaagagcgtgcattgctcatggaacaagcagatgcatcccaaatttctgagctacgagaggcatatagggaggttggaattgatcttatgaagctccttagatttgttgatatgaatgctaccggcatccgaaaaatactcaagaaattcgataagcgttttggctacaaattcacggactattacgtctccactcgtgcaaaccatccctgttcccagcttcagcagatcttcaagcaagtgggtattgtggctgtagttggtgctttgtcgcgcaaccttgcatttctccaagatcatcaaggaaactttccatccatctatgatcatccatcaattaccttaaaggaccctatcatagaacaaataaatcattcggtgcagaaactcacacacgcaacaaacttactgcaattcatagggcaacatgcacttatcattccagaagatatgcatagtggctcagaagatcttgtcgatgaccagagctaccatttcatgtcgctgcttctgaacctagctaacacatttctttacatggtgaacacatacatcatcgtgccgactgcagatgactactcagtcagcctcggagcagcagctaccgtttgcggcgtgatcatcggatcgatggctgttgctcaagtgttctcttcagtttacttcagtgcctggtcaaataagtcatatttcaggcccctcgtgttcagcagcattatgctgtttttgggtaacctgctgtatgctttggcatatgatgtgaattccttaactgttcttatagttggccggctgctctgcgggttgggttctgccagagcagtgaaccgcaggtacatcagcgactgtgtgcctctcaaaaccaggctgcaggcatctgcaggatttgttagtgctagtgctcttggaatggcctgtggtcctgctcttgccgagccagaccacattgttagagagaattcagtcaacacaccgtcatctgattcaggccatcgaagaaatagtaatttggaagatggtctagcacagccttttctcatagatgcaaaggagagtctggatgaaaatggagaggataatgacgaaaatgaagaagaccctgaagactcacataaaccagcaacatcacttgctgcagcatacagattgctgacaccatctgtgaaagttcagctattgatctactttatgctcaagtttgcaatggaaattctactgtccgagtcgagcgtggtcactacgttctacttcaactggtctacaagcaccgtggccatgtttctagcagttcttgggttgacagttcttcctgtaaatgtcatcgttgggagctatgtcaccaacttgttccaagacaggcaaattttagtggcatcggaaatcatggtcctgatcggcatagccatgagcttccgtttcacctctcactactccgtcccgcaatacgtctcctcggctctcatcacgttcgtcttcgctgaggtgctcgaaggagtgaacctgtccctcctttcccgggtgatgtcgtcgaggctctcgcgcggaacctacaacggcgggctcctctcgacggaagccggcactttggctcgcgtcgcggcggacatgacgatcacggcggcgggttaccttggccagaacagcctcctgaatgtaaccctgcttccgtccttcgtgatctgcgtagcttccatcgtcgcgacattttgcacctataactccctgtactgagaatctgttcccgcccgcgccgtgcccaagtcgccgcgggcacagttcctggccacttgggtggcctgtaaaatgttaggccgatgcagctaatgctggtctctaattgtcatctgtggaagattaggttatgtttgtagtagcagttactaagttaacagatgatgtaagagcatgttcaataaactctactgatcaaatgctccaaaagcctcttggacaatcctgcttgcaccggaccagcnanttccagggcaacggcaagancataaaaaaaatgtntgctcagcggncaancaaaagttaattggtgcggatcaaantgaaatgaggtgatcaccggtggtttttgccgtttnggtttctt

SEQ ID NO: 53205 - DNA, 292 bp, Oryza sativa
  Clone ID: PAT_MRT4530_55428C.1
gaaaaatgcagcaatattctccctctcggcctctcctcgccgtagtgccccctcggacctcggttgattttttggttcgcgcacgtcaccaccgagagtccaccaccgcggcgcacgggaggaggcccgattcgattccactcgcccgttcgttcgctcgtcctatttttttcttccccccaccacgggaataataacttgccgttggtcgtcacgccactgccagtcaacagctgcacctgggctggggctgtcctcgtcgcccccaccgtcgtgcgccgtcggggtggtg

SEQ ID NO: 53206 - DNA, 1572 bp, Oryza sativa
  Clone ID: PAT_MRT4530_55429C.1
atggagggctcgggcgtcgagggcatcgtcatcgccggcgccggcctcgcggggctcgcgacggcgctcgggttacacaggaaaggggtgaggagcctggtgctggagtcgtcggcgacgctgcgggcgtccgggttcgcgttcacgacatggacgaacgccttccgcgcgctcgacgcccttggtgtcggcgacaagatcagggagcatcatctgctctacgagaggccatcctgggccgtactgatgaacctgattttaggtccatatgctgggtcagtctgccagtgcctggctgttggccttctctgcatccacgggagagcctgccgcgaagttgagtctaaagatgcaagggaaaagcgcaacttcctactggagactctggagaacgaactgccggaaggcaccatcaggttctcttccaagatcgtctcgattgaggaagacggcaatgtcaagctcctacatttgtccgatggctcaacgataagagcaaaggtgctgataggctgcgacggcgtgaactcggtggtggcgaagtggcttggcctgccaaagccgatcctctcagggcgctcggccaccaggggcctcgctgagtacccggccggccacggattcggcccggagatcctgcagttcatcggccagggcttccgctccggcgtgctcccctgttccgacacctccgtctactggaactacacctggtacccctccccggatgacggcgacgcggaggagagcgtggccaagatgcggagctacgtggtggcgaagctgagggcggcgaggatcccggcggaggcgctggacgtgatcgagcggagcgagatgagcgacgtggtgtcgtcgccgctgaggttccggtcgccgctcgcgctcgtccgcggcagcatcagcaggggcaacgtctgcgtcgccggcgacgccttccacccgacgacccccgagctcggccagggcggctgcgcggcgctcgaggacggcgtcgtcctcgcccggtgcctcagcgaggccttcctcgccgacggcgccgagcacgacccggggtacgaggccgtcaaggcggcgctggagaagtacgccgaggagaggcggtggcgcggcatccggctgatcacggcggcctacgtcgtcggcttcatccagcagagcaccaacccggtgatcaagttcctcagggagaagttctttgaatctccatttgttgagcatatggatttgtcaggtccaagatggaagaagggcaaagatggcaaggacttcttagcactagcagcagctaatcccatgtcagtcattgttgctgagctcaatgcctcattcataagctcaaagcctgtggcaattttgtcaggtccaggtggcggtgccattcttggagttgagccaaaacaagccgtgatcctaaaccgtgctgcctttggccacgccgtcgaaattgctgcggcacagaagcactggttccaacttagccctgaggagagatgtacaaggcttactcgcatccgagattgtcacgacctcatggcaccaacagagttgggtgtaaacgagaaagtgtag

SEQ ID NO: 53207 - DNA, 3131 bp, Oryza sativa
  Clone ID: PAT_MRT4530_55430C.1
atgactttgcaagcccagtcttcaagtccagaagtcacccctgcagtgattctgattcctaaagctcatgtgaagaaaagggatgagaagactactttatacaaccctaccagaaggcacaattccaggattcttaaagccagccaagagcttaagatagatcatcgaatgggaattggcaaaccaagggggatatctgctaaaaagttgaacgagttggtagtgctgttggactttggacagtgcatgaatgctgacacgaagttgttatctttgaggcaaaagatagaggaaagtggttgtcatgttttctatgtccaagagaccaagaaacaaaatttcactattcctgatataaagacttttgctcctaaacgttttgatgcttttgcattctcgccttcaagaggcgcttcaggtggaatcctagtggtatgggtttcaaatgtttttttgggaactccaggggaaataaacagtttttctgtcacagttaactttgtttcaaggcagtcttcagaagcttggaccctaacttgtatttatggcccatgtagtggcccagaacgttcagattttgttgcttggctaaagaatttttcttttgggtcagttgataacatgattctcctaggagactttaatttctacagattagttgaggacagaaacaagccgggagctgatatgaatgatatattcatttttaatgatataattagttctctcggtctgctagaaatccctttaaaagaaagaagatttacttggagtaatatgcagagcagtcccctcttggagcggcttgattgggtttttacaagtccatcttggactttggcttttccaaacaccactgttcatcccctggcccacaatatatcccaaagtctccaatttttagatttgagaattattgggttgaaatggaaggcttcttcgagcttgtcagcagagtttggtcaatggacactagttatgaagatccggcaagatgcatcagtttcaagctaaaatttttgagaaaaagtttgctgcaattgagtaaaaacttgtctcagttaactgctctcttggtcaattgtaatgctgtgattaatttcctagacctaatagaagagcataggcccttgaccatgtttgaatggaatttcagagaaattgtcaagtcgcaaacttttaagctccttgagtttaaaaagctttattgcgaaaaaaggtgcacgaataggtggatgctgctgggtgaagagaacactaattttttcaaagccattgcgacttaaaggttcagatcgaattctatcgcacaggtgctggatcagaatggataggtagtcactttacacaatcagaaagctgatatgttattccatagtttcaaaaacagaatggggatttttcttttgcctcaaatggactttaatctgatggatctttttcccaatccggtgaacctggattgcttggtggatcagttctatactcaagaggtggacaatctaattaaggtaattcaaccagataaggcacctagccctgatgggattaatgggtattttcttaagaaatgttggcccatcatatcacaggaattttactggttagcagcacacttccatgcctgttatactgatctgcagccgataaacaaatccttcataactttagtgccaaaaaagtcctctccagaaacagttaatgattataggccaatctctctgatgggtattagtttaaaggtattaaccaaattgatggtagatagtttgtagagtgtaatgcctaagctggttcatgagaatcaatacggcttcattaagggtaaaacaatttaagactgtttagcatggtcttttgagtatatccatcaatgtcaatagtcaaagagagaaataattttgttaaaacttgactttgagaaggcttttgattctatacagcactctgccttgatatccattatgaaaagtatgggttttcatgataagtggctgcagtgggtacaaatggttttttcttcggcacattcttcagttcttctcaatggggtacctggaaattcttttaaatgcatgagaggggttaggcaaggagatccactttcaccctttctctttgttcttggtgctgaattactatagagaatagttaactaagcttgctcccttggtttgttgtccaagccaattaatgaacttgatgaaaggggtttcccagtaatctagtatgcagatgacactttaattcttctcaaaacatcatagagagaggtgttttgtttcaaggcttcgttgaactcttttgcaccttctactggcctcaaagtaaattaccatatgtcttgtctctacccaatcaatctgtctcatgagaatgctgagctttttgctagtctgcttgggtgcaccataggtacaatgccttttacttacctgcgtttgcctatggggacaactagaccaagggtagtggactttgcaccattggtagacagggttgagagaagattgacagctagctcacaatttttgccacagggagggagactcactttgatcaactctgtgctttcctcaatcccaacatattacatctgttctttgcagttgcctgtttcagtggttaaagctattgatactgcaaggaaaaactgcctctggaggggaaacaacccaaactcaacttgaagatctcttgcttcttaggattagatgtgtagaccaaaggaaaaaggtggcctaggagtcattaacttaagaattcaaaacacatcacttctgcttaaatacctggtcaaattttacgaagggcaggatctgccatgggttcaactgatctggaattcttattatgactccaaggtgccccatttagtttggaataaaggctctttttggtggaaagatatagtggctctatctgatatcttcaggggaatttcaaaatgcttcatcaggacaggatcctcagctcttttctaggatgatttttggaatgacaagattaggtgcactgcattcccagctttgtgtatggttgctttggatagatccctctctgttaatcaaatgtgctctattcctcttgaggattgtttcttgctgcctctgaacacccaagcctatgga

SEQ ID NO: 53208 - DNA, 960 bp, Oryza sativa
  Clone ID: PAT_MRT4530_55431C.1
atggcgccgatgctgccgcttttcctttctttcattttgcttttcttctttgtttcttgtcctctccggccgggcgttgtggcggagcgacggcgccgccaagatgcggacgcgaggtcgccgctgggcgtacaggcgcggggttcgctgccggctggtggccttctctgcatcacgggaaagcctgccgcgaagaagagcctaaggatgaaagggaaaagtggaccgcatgagattcggcgcgtgaagcgcaacttcctacgagagacgctggagaacgagctgccggagggcaccatcaggttctcttccaagatcgtctcgactggggaagatagcaacgtcaagctcctacatttggccgatggttcaacgataggtgctgatcggatgcgacggcgtgaactcggtggtggcgaagtggcttggcctgccaaagccaatcctctcagggcgctcggccaccaggggcctcgccgagtacccgacggcgacgcggaggagagcgtggccaagatgcggagctacgtgctggcgaaggcggcgaggatcccggcgccgctgaggttccggtcgccgctcgcgctcgtccgcggcagcatcagcaggggcaacgtctgcgtcgccggcgacgccttccacccgacgacccccgagctcggccagggcggctgcgcggcgctcgaggacggcgtcgtcctcgcccggtgcctcagcgaggccttcctcgccgacggcgccgagcacgacccggggtacgaggccgtcacggtggcgctggagaagtacgccgaggagaggcggtggcgcggcatccggctgatcacggcggcctacgtcgtcggcttcatccagcagagcaccaacccggtgatcaagttcctcagggagaagttcttgtcaggattgctggcaaaaactatgatcgccatggctgattacgattgcggaaagctatga

SEQ ID NO: 53209 - DNA, 1713 bp, Oryza sativa
  Clone ID: PAT_MRT4530_55432C.1
aatagaagtaattaatattctactccacataaacaacttgcttctaactcaaatagatggtgcatgaggcatttctgtgctaacttttataccgttgaagctgctcaggatcagatgaaatatctcgagcgcatatgtcaaataaacaaaaaagttccgttcctaagtgagattaagcgcctcatgtgtttcgttgaagagggaccgaagaggtgactagaggacaatatgccacttaaggttaaatgggcaagatcatttgatatcgatggacgtcgatacagcttcatgactagcaatatgaccgagagtttcaacaatgtcttgagaggcattcgaaaactgcccatgacggctattgtggtgtacgcattctcgaaatgcaatacttggttcatcgatagacataaagtagctaccgcggaaatccagagtgggcacaagtggcctaaaaaaaaattaggcaaatcctggaggagcagaaaaaaacaaactttgggttaactaacatgtttcgattttccttccacgaagtatgaggttaccgagcaaggtggacgtcactctgtgtggttgcaagaaataacacatgtactcgtcatttccctgaactccgccatatgccatgttcacacatgataaccgtttatagagtccgaggtttggacatggaggtccccccacggatgtgtttcgaagtttccaatgaagttgtgcagcacacgaactccccaagttttgagccctacttagatccatcttagtgggtgagttatggccatgtgcatctgttttgtacttgccatccagcagtcgtcgcgcacgcgcacacagtggtgcatgcatatgagaatgatacagattacgcgtcaacgtcatcgtccaggcatccactaagctgctaccaaccacccaccgcgcctgtccggctgggttgtggaaaatgtgcatgcattgggtccacttcctccacgtcagctacatgtgtgttgagaagagagttaatgggcgttatttgattttgctcgaacgcctcaagaccctacgagttagagctcatacaacacacatcccgttcgatgaccggtacattccgttcctacgacgagcgaagctgttggcgttcgtcaccatgacgcagtggcccatgcctatgtacaacgccgcggtactgacgacttttgtggaccgatggagaccagaagctcacactttccacctttctagcggggagctgatgaactggaggggcgtgtggtacagtaccttggcgtcgagcctctagaggcacctgacaggcagaggctgacgaagacctctagagttccactcagttggttgcgtgccaacttctcacaccgtcctcctgatattgaccaggcgatggttgaccagtattgcaaggcgtacgtgatgtatccttgatgtggttgcctctgctagctgattgggacaaggcaggtacctataattggggttctgctaccctagcgtggttgtacaatcacctgtgtgatgcaggcagaaggactagtgcagacgctaacttcgcagaatgtgtttggttgctacatgtatggatgtggattctcctctcggttggtcgtcctacttggagggtattatccattttacccactttgtccatacccatttgttatgggtaaaactcggacctaaaatttttaaactcacgttcacattacaaaatct

SEQ ID NO: 53210 - DNA, 496 bp, Oryza sativa
  Clone ID: PAT_MRT4530_55433C.1
tcactccccccaatgtcgaaccattgttagagcgccccaatccgttgcccgtggccggcccagccccgccggaccgaccaagttctgccaagactgctcccgccagcttcccccgtcgacgacggctggtccaggtccggggcgcttcgatcacatcctgtcaggcatctacagggagctcggccccaccgagccgggcaccccatggccgaggtgttccccggctgccggagaggggacttggagcgcgccggccggcgacctcccggcgttctgcaacgtggacatccccaatgggcctggtggtgtctgctactggcttgggtatcctaggaccccaagaaccggtcactaggctactatagttacctgtgtgtgtgtgactatgtgggttgcctaaataattagtgcctttcttttgtcaggaaccatctatttatatatatgtggtgaataaatgatgaacttcaatgttcttcaaaaaaaaaaaaaaaaa

SEQ ID NO: 53211 - DNA, 705 bp, Oryza sativa
  Clone ID: PAT_MRT4530_55434C.1
atggcgagcagctcgtcgccgccgccgccgccgcagattcgttgcgcctccttcaatcaggacaacagcttgttttatgtcgggacgaaggatggattcaggattttcgatgcccatacagggaagctccactaccagaagaatattggtggaatcggcaatatggaaatgtactttcggacaaacattcttgctatagtcggaactggtgaacagcctgtactatctcctcgctgccttcgccttatcgacaccgtagcagctgtcacaaagaaagatctgaactttaagacttcagttttggctatagatgctcacgagtctcccttagctgcaatggcattttcttctaatggcacgtacctggcaacagcttctgggaagggtactattattagagtatttctcgttgcacaagcaaccaaggtgaattcaacgaaccaaacgagcaaattgcttggttcaatgattcctggagcaataactcgtgctttggatccagcaaaccatcacattattcacaacgtcatccctgcaggaatcaagaggactgttgtctatatcataactcatgatggatacttccgcgagtactcgatcaacaccacaaagtcaaatgaatcttcctgggttttgcaacgcgagctcaatctactggataccggttgtagcactccccagcgggaggaacaacacaaggactga

SEQ ID NO: 53212 - DNA, 257 bp, Oryza sativa
  Clone ID: PAT_MRT4530_55435C.1
tagtaaggggcctcaatggagcggtggcagtgaggattgatgggagtgttgcctggcaaggtacaagaccgtgcaggagagttgtggtggagcagtgacataggggtgaactgacagtgtgcatccggtggggatagcggtgtgggttgaccaggaatgctgctgttggcgatgaccatgggtggcgacggttgtcatgggctgggacgatcagcctgcttgctgtgcctgggacggcgtgttggcatgctggagag

SEQ ID NO: 53213 - DNA, 3236 bp, Oryza sativa
  Clone ID: PAT_MRT4530_55436C.1
atggccaaggcgtgggagaaggtggcgacggcggcggggttgggtgggtcgggggagaggcgcaagtacccgatccgcgtggaggactacgagctgtacgaggagatcgggcagggggtcagcgccatcgtgtaccgatcgctctgcaagcccctcgacgagatcgtcgccgtcaaggtgctcgacttcgagcgcacaaacagtgacctgaacaacatcatgcgtgaagctcagacgatgattctcatagatcagcctaacgtcatgaaggcacattgttcatttacaaataaccactcgttgtgggtggtcatgccatacatggctggagggtcttgccttcacataatgaagtcagtctatccagatggttttgaagaagctgtcattgcaactgtacttcgtgaagtcctgaaaggtttggagtaccttcatcatcatgggcatatacatcgtgatgtgaaggcagggaatatacttgttgattcacggggtgtagtcaagcttggagattttggggtttctgcttgcctttttgattctggtgacaggcaacgggctaggaatactttcgtgggaactccttgctgggcagacatatggtccttcggaattactgcacttgaacttgcccatggtcatgctcctttctcgaagttccctcccatgaagacctaccattgtagtttttatgatgagcatgacttcttatttgtcaacaacgattatctcctatatcagcatttcaagcaaatggttgctatgtgtctggtaaaagacccttcaaaaaggcctacagcgaaaaaattgctgaagcaaccctttttcaagcaagctcgctccagtgatttcattagtcgaaagcttttggagggattgcctggccttggtgccagatatttagctctgaaggaaaaggatgaagttttactttctcaaaagaaaatgcctgatggacagaaggaagaaatctcacaggatgaatacaaaagaggcatcagtagctggaactttgatatggatgacctgaagtctcaagcttcacttattacagagtgtgatgacagtatatcgtgcaaagattcagatgcatcatgtttctatgacttggacaccattttaccagagcgagcaacaggacctcatatgtcaagagttttttcaattaagtatgatacggacaccgaatacatcaatgctcaggactacaaacggggtacatgcaaatggccaggtcaggaaacacagctccacagaaactcgaagcatcaaattaacattcataaccgtgacaagtgcaacggaggacccttgcaagttgcagatgaaccatcccctgaagctgttccaaaggtgcctaaatcatcagcagcaaatgttgaggaccacgacgatagatcgaaacctcctcttatacagcaaagaggccgttttaaagttacgcctgggcatgttgagttggataaggctcactcacctggactacagaagagtcacagcatgcaggcaatttcgcaccttccttcgttaagtataccatcctcaattgaggctgcatcaaccattattggtgggtccctttatatgcagctgtacaatgttctacagacaaatatgcttcagagggagcaaatacttcatgcgatgaaacagttaagtggttgcgatatggcaatgacgtcacctgcctgcattgctcctgcaagtcgcgcatcatctccatcatcagcattatcaattgacagatcattgttggaagcggcacacgaaaaggagaaggagctggtcaatgagatcactgagctgcaatggcggttagtgtgttttcagtatgagttacagagaattaaattgccataatggcagttactatctataatttacatccacaagaaggatgaatcatccctcaccattggtgggcacatctatgatacacttgtccaattggagttagaatctcagcccaaaccacagaccagccctaccagcacactatcttacaaattgtatgtacacacagctgaagcttctgtcattggtgagccaactagtctgctagtcagtccttgtgttgttcctcccgctggggagtgctacaaccggtatccagtagattgagctcgcgttgcaaaacccaggaagattcatttgactttgtggtgttgatcgagtactcgcggaagtatccatcatgagttatgatatagacaacagtccttaaagcaggaagtttagaagaattttgtgaattttcgaccttatgtacggctacacagctcttgattcctgcgggggatgacgttgtgaataatgtgatggtttgggtggatccaaagcacgagttattactccaggaatcattggaccaagcaatttggtcggtttggtcccgacgatttctggcagcatcgaggaaaaacatgtgcaacgagcctgatgaacttgtggcaacaagaacatcggccagatcatccgatggtccgaatgagagtgaatatatgttgatgggtatgttccccgccgaaaactgtgtgacttggttgcttgtgcaacgagaaatactctaataatagtacccttcccagaagctgttgccaggtacgtgccattagaagaaaatgccattgcagctaagggagactcgtgagcatctatctggcatattaattcaggttctgatgccttataaactaaagcagatcctttggatgtgcttgctgggatggccaaataacatgcttctgaattaggagcgaatgcacaaagaccttttgtattgggaactgtttcaatttcttccaatatagtagtgctgtttacatcataaataaaggtcctgtcctgcaatacaacaacaagcctcgttctacttaatcgaacagccaaaactgaagtcttaaagttcagatctttctttgtgacagctgctacggtgtcgataaggcgaaggcagcgaggagatagtacaggctgttcaccagttccgactatagcaagaatgtttgtccgaaagtacatttccatattgccgattccaccaatattcttctggtagtggagcttccctgtatgggcatcgaaaatcctgaatccatccttcgtcccgacataaaacaagctgttgtcctgattgaaggaggcgcaacgaatctgcggcggcggcggcggcgacgagctgctcgccatcgcccgcgaagcgacttcttcctcttcttcttgatctcgtggcacgt

SEQ ID NO: 53214 - DNA, 185 bp, Oryza sativa
  Clone ID: PAT_MRT4530_55437C.1
acctctctctctcccgactcccgagcaggcgactcctccctccccgtgcgattccgccgctgcgacctgccgctccgacctgccgcctctccgcgcacgtgagcgccccgtcgccgccttccccgcacggactctgccccccgccggaatctcatctcctacgcctcaaacccccccaccccgcg

SEQ ID NO: 53215 - DNA, 2196 bp, Oryza sativa
  Clone ID: PAT_MRT4530_55438C.1
atggctgcgccgcccggtgaggctccgctcaccgccgccaccaacatcgagccgttctatgtcctccacaagggcggcgccgctgcctcgtcgtcctcctcgtcggctccctcgctgccgtcgtccggccgggcgcgccgccggatcgacgtttccgggctggcatctcccaaccccaaacccgggaagagatcccgcgacgacgacgccgctgaggacgacgacgacgacgagctgtacgagcggctccgcctcgacgccttccaccgcgtttggtccaagatccagtccaccatcaatgtgcaaactcaattcccccatattccatcgattcgtttactactcactcgcttaattcctcagcaattgcagaatctgacgagtgcgatttctcatcttgggattgatccaattttcgattgctcgtgtgggcaggaggttcttcgggggatcagcctcaagctgttcgaccaggtgctgcgatgggtgcaggaatccttctccgcagtccgctccattgcgagaccttccgcagccgaggtgcggcagccataccctctcctcaccgatgtgatctgcaggaagataccgacggcttttgttctcaccaagaatgcggagttcgttgacgacatcacgacattccgggatcttgcagagtatcttgagtccaatggatgtcacctggccaagctgtcggcgactgaattatcggaaaaaaatggagttggttgttgcttcaggagcttgttgaggcagctactttcagatgttccagatgtagcggatatatttgcacttgcatcttggtactctgcagctgagaactatgatcagcctatagtcgtcgtaattgatgatttagagcaatgctctggtgatgtcctgggagagcttgtgatgatgctaagcgagtgggtgattaaaattcccatcttctttgtgatggggattgcaaccacccttgacgcaccaaggaaactactctcatcagaagatcttcaaagattagagccgtgcaagctgaccttggggtctccttctgatagaatgaacgcacttgttgaggctatccttgtcaaaccatgtgctggattctgtatcagtcatgaagttgcagttttccttagaaattactttttcaagcatgatgggaccataacatcttttattagtgctctcaagcttgcttgtagtaagcacttctctgtcgaacctctgagcttcttgtgcatgggaatgcttgaagaggatcgtgagaacttctggcatgataagtttaatgcactaccccaagaattgcggaaatatgcatctggtctcccgtcatgcacaagggaaaaggactcaaccaagtctggcgacaatatggttgacgggttgtctgagcttatgaatattcaaaaagattggagttcagttctcttgtgcttgtatgaagctggaaaacatggtaaagtgcaacttttggatattttctgtgaggctgtaaaccctgacctgcacactcagaaggcacccaatctaccaaatgagaagtcaggaactagtagaagatttatagatcaggtgatggatacaataaggtaccttccagtggaaacactattttgtcttctagaagtttggagcatccatctaaacgggatggataagataacaaacaaggtgaaagagcttcagtccaccacaatcagtacagacagtgtgaggatcacaaaggataagtggcctaggagatcaacaaatagtactggaaatagtacagtagcactgaatgataaagtggctatgctgttggatgatgttaccaggaaatttctggtctctgttgagtgtttaccttttcatgaaatcgtctgtttcaagaatgttagcattcttcaatctgctttaattggaaatccgagaagaatggtccagcttgatctagtcaagtcacacaaacatcttaaatgctcttgctgcaggaagaatggaattgctgtgttggcatccatgcatgatacatcaattatgtgcaatctagcccaagaatatggtgatgtaatcaaccttcatgactggtacatatctttcgatggcattatcaatagcgtgcattcaaaaatcaaaaggaaaccgcacacatctccctcgaaaaagaaatcaaaacccgttgctgcggagagtgaagccatgatccagtatccttga

SEQ ID NO: 53216 - DNA, 892 bp, Oryza sativa
  Clone ID: PAT_MRT4530_55439C.1
ggcggacgaccccgatgacgtcggcaatgacgtcaccgacggcggcggcggctcggcggggcagacggctcgggcggcgcacgctcgccggcgaacggcggcgcgaggacgaaaacggaaagcaccaggacgaagcgggcggcacggcgaactcaccggcgaccaaaacgacggcggaagatcaacggacggcgacggcgacgaggaggaagcggcgaagctcttcgggtcgacgacggcgatgacgctccggcggtcttcggcggtggcgaaggggaggacgaggacggcgacgcgacggcgaacacgacgtcggccttcccgagcgacggcgacggctggagcgacggcggcgcacgactggagcgacggtgacgacggcggcgctagggcacacggtgctagagcttttccggcgacaagaggcgaaggcgagggtggcggcgggtagaggagacaccggggagccttttaaagggactcggaggcggcggcgaaggcccacggcgacggcaacggcgaaggaaagctcggcttggagagagagagcccgatccgattcgaactcgaatccctcgatttccaaaccgatttagccgatgattccataggagaaaaggtagaggagatcccggagattgtttcccctcaatcaatttcaccggaaacggaaaagaacggccggatttggaaaggaacggcggcggcagctcggcggcggcgcgctagggtttcggcccgaggaagatgacgggcctgacaggtgggacccacctgtcagcgatcgaacgcgcgcgcgcgcgcgggcggctgcgaactgggccgacttgggccggggagagagagagaaggttttgggccgactttcggcccaaagccaaaagagaacttt

SEQ ID NO: 53217 - DNA, 349 bp, Oryza sativa
  Clone ID: PAT_MRT4530_5543C.1
tttttgttcttgcggagtgccgcggtcctaacggtggcctgtgacctattccatagcattttgctcgtcagaccggtatgccggactggaatctctgcctacaaaggcctgagcatatggtgagaggcctcctgggaagctcatgatctggagctcggtagcggttggaacccgtgacggccatctgctagctgcaccccatccaccgagacgtgattggcaggagcgccgccaagctcgccatcatagccgtgatgccggacaacggatgctccactcgacagacggcccctctggtaggatccggccaccacgcctttaactacagcgtacagggcccggcgccctg

SEQ ID NO: 53218 - DNA, 2376 bp, Oryza sativa
  Clone ID: PAT_MRT4530_55440C.1
ctagcgcggcatgcgcgcgtcgtgcggcggggggagcgcccgatttttgctccccctgtcatccccaacctcaggccggcaactgccgttgccgccatggccgccgaaaaccgcccacgtcgccaccattcccggcctcctcgagccctctctcgcgtgggaccgggagccacccctcttctccacctccttccccgcttttcccaaattttggcgccgaatcgagccccacttcgcccacgatgtcgcccacgtcgccggccgttgccgtttcaaatccgccacatccggccacgatttctcctccccgagccgctctcccctcgttgctcccgcgctctgctgctttccggcgagctccggctgtacgccgccgtcgctgtagccgccgccgcgccgcgccgccgagccacagccgcctctcgtcacctccagtcgcgcgccaccaccgctcccgtcgctgccgcgctgcgctaccaccgccatcggcatcgccgttcctcgccgcaccccggcccctactccgtttcccctccctgcccctggaacgccgccgccgcgttcaccatctctctccgccgccaccgccgactccagccgcgtcgcgccgccgcttcggtcgacgtcgactcgcgccgttgcctccctcagctccgcaaggacgaggaggacctcggccgccgcccctcttcgccggaaatccgccggagctcctccttcctcggtcgccggtgagctcgccgcctcttggggtgcgtcgccgtccccgtgcgcgccgctgtcctccggccgcccgccgccgttccacgtcgccggctgctgcagccggttgccgcctcccccttgccgcctcccccttgccgccgcctcccccttgccgcctcccccttgccgccgcctcccccttgccgcctcccccttgccgccgccgcgccatgtctcggccgagccggcttcatgccgtgcccgtgccccagccgcgccgcctcgtggccgtccgatcggctttgggccgatccgggccgtcggttccggtggggcccgcttgccggcgccgcccctcccccttgatgacgtcagcgagttccatttccacaagccagcgtgggcaacggctgggcttgtagtgtagctttcctctagccgacgcatccaggcaagggtgggcgtgatggagtttggatgggccctgcgacggcctatgcggcttccggattcacctaggcacgagaggggactgcccgctgtgatggggaggaagaggagaaaaggcaggaggaggaggaggggggagggcgctgggaggcggggctgggagagatcgcgctggagaggaggaggcggggctgctcgtgatcgagggagggatgggtggaggggcggaggcagctgcgggtgacagaggaggagccggagccgataatgacgacgcgcacctgtgggcaacggaggggaacttcgaggacggtggctagagccgaggatggcgacgtgcagctgctggtgacggagggggaaccgaggaaggcggccggtggggttggaggcagtggcggagggggagccggagccgaggacaacacggctcaggaccaactcgctctagatccatgcctactagagctcgtgcggctgcttgtggaagcacggcttgaggggtcaagtgcgaccatcgttgccgcatctagctcgttcccgcctacgcccagccagccctgccttcctctagcacgagtgctcatggagactgccctcaccgctgatgcacgcttcagcgaggataggatcgggcagtgtgtgccggtcagaccggcggtgatcgaccggtcggaccggccagcccgcgagttcttcgatttgtgtttaccgggttttggcggtctaaccggcgatataccggcggtcagaccggcggcaagtggcggtcagaccggcggcgacatgcgcggcaggcgacttcggcggttcgaccgatcgatctacatcggtcagaccgacgttcatcaggcgcgctgccgccttcacgtcgcctttgcgccgccgcctccgccgccggttgccgtcgccggcaacgcgtgcgtgcgcgccgtcgccatcgccgtggccggtcggccggccttgagccgagccgagccgggtcgccgccgcccgtccgatcagccctgggggcgatctgggccgtcggtcccgtggaccggcggtggaccacccgcgtggtcccggtccacggtggaccgcccccctcttgagccgctgtcgagtggggcccgcgtgctagcgccccttttccctttctcccgagccactgaccagtgggacccgcctgtcggcgccgcccccctgatgacgtcagccctgggaattattgcgcaataa

SEQ ID NO: 53219 - DNA, 2856 bp, Oryza sativa
  Clone ID: PAT_MRT4530_55441C.1
atgccgggaccgaagggaacaatcactattcaagggaatgctaagttggtagtgcaatgcgacaagcggagcctcaacatggtcaagcacacacccagcccacccgccacagctgagccacccaagaaaccgtccgacatgccgggggtacccagggaggtgattgagcacaaactcatggtgcgacccgacgccaagccagtaaagcaaaaactgcggagatttgcactagatcgaaaacaagccatacgagaagagctcgacaagcttctcaaagttggcttcatcagagaggtactccatccagagtggctagccaaccctgtcatggtgcggaacgccaacgagaaatggagaatgtgtgtcgatttcaccgacctcaacaaggcgtgtcccaaggatcacttccctcttcctcgaatagaccaactggtggactcaacagccggttgtgagttgttgagcttcctcgacgcttactccggctaccaccaaatcagtatggcgaaagaggacgaggagaagacagcattcatcacgccgttcggagtattctgctacgttaagatgccgttcggactaataaccgcaggaaacactttccagcgcacggtccagggctcacttagcgaccaactcggaaacaatgtcgaggcctacgtcgacgacattgttgtcaagaccaagtcaagcgactcattgattgatgatttgcgggaaacgtttgacagcctccgacgatatcgcctcatgctcaatccagagaagtgcacgttcagagtaccatcaggcaagctgctcggcttcctcggctctggcagaggaatagaagcaaatcccgagaagatcaaggcaatcgagaacatgaagtcgcctacaagactcaaggaagtacagaagctaaccggatgcatggcggcactaagcagcactgtcattgttgtcgagagagagaaggtgcaacgaccagtctactatgtcagcgaagctctccacgacgcaaagacaagatatcaacagatccaaaaactgctctacgcggtaatcatgacattaagaaagctacgccactactttcaagcccacagggtcacagttgtatcctccttccctctcggtgaagtagtgagaaacaaagacgttgtcggccgcattacgaaatgggtagtcgagctaagccagtttgatgtccactttgtgccacgaacagtcatcaagtcccaggtacttgccgactttgtagccgattggactatgcctgataacagggcgactaataacacagccgagtacgaaggactactcgccgggataagagctgcagctgcactcggagtcaggcgactaatcatgaaaggagattccgaactagtcacgaaccaggtgcataaagattacaagtgctctaaccccgagttatctgtcacaccccgaagttttcctcccaagccaaaaattgaatttacaaatgaccccaagaaaatgcaggccgaggcccagcccggtagccggctgcccgcctccctcctctcggggtcgccgacagacgtggatctgaatgtcaacattgtcgtttgtgtaccccggctggtcctggacggggaatttaatgcacattctgcttggaattctattcgggaatttctgggcgtgacattatccaagtatctcgcagaagtcagaaagctagaaaaaaggttcgatgggatcgaggtccgacatgtataccgcaaggacaacattgaaccagatgatatagcacggcgtgcgtccagacgagagccactcgaacctggcacctttctagacgtcctgacaaggccatcagtgaaagacgcaagcggtgaagatagcccggtctccctcaacaacagctcgggggctacagaggtagagcgcgtcgttgccgatatcgagaccacagacgactggcgcaccccactcatcaaattcataggcagcaaagagttgcccgaggacgacgcagaagctgagaaaatatcctgtaaagcaaaggtctactatatgatcggcaatgatctatacaagaaggcatcaaatggggtactcctaaaatgcgtctcgtccgacgacggcagacatctcctcctcgacatacatgaagggatctgtgggtcacatgccgcccggtcggacattagtcggaaaagcttttcgacaagggttcttctggccaaccgccctcaaagactcctgcgacatggttcagcggactactgcatcaggctgggagtcaagatctgcttcgcctcggtttctcaccctcagagcaatggacaagtcgagagggcaaacggcatagtactacaaggaatcaagacccgcgtctacgacaggctcatgtcacatgacaagaagtgggtcgaagaacttccatcagtactatgggccgtgcgtaccacaccgacaacgtctaacaaggagacacccttcttcctcgtgtacggctcagaggctatgctccccaccaagctacgataccaaagtacacgagcacataagtactccgatgagaatcaggaggagcagcgaaatgacgatgtgaatctactcgaagaacatcgcgaacgagttgtcgttcgagcagccagctaccaacaggcccttcaccgctactacgagaaacgcatccgagcacgcacactttcgatcggcgactacgtcctccgacgggttcaaagtcaagcagggcgaaacaagctctcacccaaatgggaaggaccgtacacgatcacacaagttctgcagccaggcgcattcaaaattgcagacggcgatggtcgcgagttggcaaattcctggaacattaatcaattacgtaaattctatgtataa

SEQ ID NO: 53220 - DNA, 352 bp, Oryza sativa
  unsure (1)..(352): unsure at all n locations
  Clone ID: PAT_MRT4530_55442C.1
cccacccactcctctctnctcttttacttccactattcattttcttctnttggttcccttttactatccctggggtttttaaaaaaacataatttttattaaattccccctaccattgtttcttgctattctctactctaacactctaaanataaacataacactatacttctgctaattataacacacttccttctgacaaattcatatccattttaaccactctctccccatatattcttcacaatcatctatacttcttacatattacatatactttgataatatcccaaaatattcctatattctctattcaaacttcattatgcttcatttcacatttgaataacct

SEQ ID NO: 53221 - DNA, 2575 bp, Oryza sativa
  Clone ID: PAT_MRT4530_55443C.1
gtcatatggcagagggttggtgcccaaatgctaaggggctcagttctgccctgcctgtcccgggtatcccggccgtaggtaggattgggtcggtactcttgtctaaggctaggatgggttggaaactatgtcacatctttacgacgggttccaaggccatggataacattggtaacaaaggctatgggaatgatggatccgatgactcaagaacccaagccaatgggaatgagaaaagcatcaacgaaacctcaccagagctaatccaaattgtggttaaccaaaccaacatgttggcaacagcctttcaactattacagaatcggaacaacccagcaggggcaaccaacgttcaagtacctacagtccagcaacagtgcaagttatcagaatttctcaaaacggggcctccaacctttgccatggccgtcgatcctatggaagccagtgattggttgcgcacagtcgagaagaagctagggttgattcagtgcaccgaccaggagcgggttggcttcgcaactcatcagttggttggaccggcttcagagtggtgggatagctacgaagcatcacggccagaaggacataccatcacctggaacgagttttcatctgtattcaagagatcacatgttcccacaggaatgatcacactaagaaaacgagagtttcgctacctgaagcaaggagatttgaccgtcacagagtacctgcatgagttctatcgtttggctcactatgcaccagaagatgtggaaacggatgaagacaaacaagagaagtttctccaggggttaaaagatgagcttgcagtgcaactacttctagaggattatgaagattttgagaaacttgtggacaaagccatgcaactcgaaagtgagcataatcggatgacgaactgcaagagaaggattgtcaacatcccagtatttccaggtggtaaccaaagacagcgcactgagccacttcagatcaccggatctcctgttgtgcatcaagagttcctgccccaagaagatgaatgcaatgcagacaacaacactagcaatactaataatgatgataccaccaacaaccatggttcttgccccattagtgaccactcgaataaagcgtgcaatgtcagtagcattcaccaagatgtcaacgatagtatcaatgttggaacccagaatgacaaccttagcaattttgacactgagaaagactccaatggtgatagcaactatggtaccactgatgccaatgttagcaaggatttccaaccaccaattccaactccaagtcacaatgatcatccccagatggacagctcagcaaagaagacgttgatttgttacaactgcaaagaaccaggtcatttctctagagattgtccacagccgaagcgtaacctgcgccatcactccggccattatgcaagaagaagacaggtcactcgccttgtggtcactggagcaaacgccgtacctgtttcactgaaaggtagcagaccaaaggacctcatcgccaccagaagcatccacaactctcggagtgaagaatacttagcgaccaaggttgacgccaaagatatgaattatgagaagttctggaactgaagtcccatcttcaagtgccataatccagtcgaagtcagctagaggtgcaaccagggaaaagtcagcaccgtccccttcaccggcctcaccgtctcctcgccggaaactcgccggaacggtgcccccgccggcaaccagtggcattggtgccactgtactccctccagccggctgctgttcatcgccggtgcgccgatcgacgccgccgtctcctccttcgacaccgcggcatcgccttcttccccggcatcacctcctcctcgcccgaatttcgccggaacgccgtcgcccgcgccggcctctccttcctcctcggcggcatctcctccggctgcccctttcgccatgccctgcaccggtcggccacacccccatcatcttcggcatcgcagccgcgacgtcgtcctcggcctcgcctcccctccgaccgaacaccgccggtgtccgtcgtcgtcttcaccgttccctctcgccggctcgtcgtctcgcggcgccgcctccgtcatcgtcatcatagcggcgtgttccacgtcatcctcgtccccgtgcagccgctgccggctgtcctcgtcgcctcctcgccggccccggtcgtcgtcgccctcgtcctctcgtcgttcccgatcgtcgtggcgttcgtccctccgtcaagccgttctcgtccgtcgtccgcgttcgtcaagcgagtcgctgcagccccgtcctcgtgttcgtcctcggctccgcgtcgtcaagcctcgtgccggccgcgtctcgccttcgcccaaggatcgccgccgaagccgtcccctcgccgttcgtctccgttgtgcccgtctgtctccgccgcgcccgttcgtcgttgtcgttcccacgcctcgtcgcgtggtggtaaggtttcctcccctcgctgccccgtcctcgccctttcggtgtcgcccgtgctcgttgtgcggtcgtcgaccccggtacccgtgtaccggtgtcgg

SEQ ID NO: 53222 - DNA, 2161 bp, Oryza sativa
  Clone ID: PAT_MRT4530_55444C.1
atggaggtggatgaagtcgggggtcgatggacattctccagggcaaatgaaggctacacgagctgcggcccggtagtcgagatgtcatggcagagggttggtgccctgctgctagggggctcagtcctgcctgcctgtcccgggtgtcccggccgtagggggattgggtcggtactcttgtttatggctaggatgggttgggaactatgtcacgtcttccgtccgtataccgtggtgatgtttaacagagaaaaaggaaagaatgtcagcgggtatgcctccagtaactcaagttttcaattcaatccaccactggcctcaagagagttaaccagggcacacccttggtccattccaagcatgctgcttagttcacagctaccattagttggaagtcaagaccaaaatcagtatgtgtttgatcgagcgtttgccacccaggtcaatgagcttccaatgccagaagaggatgtccccttttgtcacgattgtagagagcaaggacactatgccctgaattgtccatgggtatatgtcaaagaagccccttcctttggtttagcagggcagacatcgctaaaccagcctcctcgcaccaagtcaagtttgcagcctagtgtgcaaagtgaagagcccaatggagacaatccattgaatcctagaaaatgctttcctcctagcctttcgcaccacgtggggtcacgtactaagcaagccaaaggcaagaagagtaagaatcagaagagaaaagcaccgatgcgaactgaagaagaagtacgtaagatgactattaccagcaccgaatggcctccagcagggataactattcctagacgtcaaagaggaaataccttccgaggtgcacgacagttgacccagcacctcctaagccatggtggcagagtatctgatagtgaagggtcagatcaagtctcctcggattatgaagatgagtccccccgacatctcggcgaggaagagatggaatcaaaagcatgcccccgttgtggagaaattggacacgttgctagcatgtgtttcacactttgccctcattgtgaggaagaccatccaccaggccgagcgaagggcaatcaacctcaggagggcgataccaagcagaagaccgtcatctgcttcaaacagcaatcagaaggaagcttctcctgtgaatgatagcaatatgcagtcctatcacatcatcacagaaccaatcaaggatgcagtcactagaacaatgccagctatccgcctgggccgcctcgaccgtgcgccggccggccgcgccgtcgcctcctccagcgtcgccgctacctcctccaccccggcctgccctccgtttcgcgcggtgatcgccggaggcgcgttcccgccgtcgcccttctcttttctccgcgccggccgcctccagccgcctctcccgcctcgcccgtgcgccgtccggccgcgccgtcttctccctcggcctcgcagccaccccctctccctcgccgacgtcgccaccacctccctcggcgttgctgcatcgccctctcctccggctgctcctcggtttcgccggaacaccgccgtcacgcgtgccgcctttccctcggtctcgtcggcacccactccggcagcccctttcgccgtgccagtgcgccggccgacgtcgccgtctccacctccggcatcgcagcggcaaggacgccctcggcctcgcctccccttcgaccgaaccccgccggtgttcgtcgtcgtcgtcatcgtcccgtcggttgcccggctcgtcgtctcgcggcgccgcctccgtcgtcggcatcgcagcggcgtggtccgcgtcgtccccgtctccgtgcagctgccgccggctgccctcatcgcctcctcgccggccccggtcgtcgtcgtcgtcgtcctctcgtcgttcccggtcgttgtggcgttcgtccctccgtcgagccgttctcgtccgccgcccgcgtttcccctagtgtgctgcagccccgtcatcgtcttcgtcctcggctccgcgtcgtcaagcctcgtgccggccacgtctcgccttcgtccaaggatcgccgccgaagccgtcccctcgccgttcgtctccgttgtgcccgtctgtctccgccgcgcccgttcgtcgttgtcgtccccgcgcctcgtcgcgtggtggtaa

SEQ ID NO: 53223 - DNA, 1416 bp, Oryza sativa
  Clone ID: PAT_MRT4530_55445C.1
ttgcagtctttcagataaggctacaccgccacgcggccaattcttgcaagaattggccatggcgttctgcactcctactgccaccactcctcctcatgccactccacctcctctcaccacctcatggaagcagctcgccttctgcaactcttcccggctagccgccgccgccgccggcggcggccagagggcgcggccggccggtgcaagtgttgaggcgcgcgcattggcgccggcgtcgacggcggcagacgcggcggcggctgcggcggcacccgcccctcccaacgtggactacctggcggcggagttcgccggccacggcgtcagcttcgaggccgtcggcggcagctgcgccgtcaagatggagctgcgcaacggcagcgccgcgcacgtgctgctcccgggcggcctcgtcacgtcctacaagccggccatgtggcacggcgcccccaccgaggtgatccacaccaccgtcgccgagggcctcggcggccgcgccgtcatccgcggcggcgtgtcgctggacctccgctgcggcggcgccgccggcggaggcggtgacgggatgccgccgtggtcgccgagcggcgcatggtcgctccgcgacgtcagggggagccccacgggctccatcgaggtcgagctggcctccgccgcgccgccggaggcgagcggcgtcgaggcgaggtgcgtcgtgacgctgcacccggaggcgctggcgacggagttcacggcgaggaacgccgcctcgccgtcgccggtggctctgtccgccgcggtgtccacccacctccgcgtgagcacgccggacgccacctacgccgtggggctccagggctccgactaccgcgccatagatcccgtgctctcggagttcgccatcgtgcccccggacttcatgtcgcggtcgtcgtcggcgacgacgctcgcgcggcgctgggccaccaaggggttcgacgcggtcctctccggcggcggcggcggcggcgcgggggcgcaagaggccgacggcgaggaggacgacgactacaagcggatgaccgaggagatgtgccgcatctacagccacgccccccgccaattcaccatcatcgacagggggaggaggaactccatttgcgtgcagcggagagggttcgaggaggtgtacgtgttcagcccggggtcaaagtaccagtggtacgggaagtacgcctacgtgtgcgtggggcccgccatgctggagcccatcgtgctgtcacctggggccacatggtcaggggctcagtacctgcgcaacccaaacctctagatagacaagacaagacaggctagctggcgactcaatgctgctggggaacaaaacaatggtcattgtacatgttggctcacaataagcaagaaaaacatgtgaaacaatatatatatgtttgc

SEQ ID NO: 53224 - DNA, 4885 bp, Oryza sativa
  Clone ID: PAT_MRT4530_55446C.1
atggcgcccccaatcgtcgggaacggccgcgcttttcccggccaccaaccatggccgccggccgccattcccgtcgccgttccgccctcccccgtggccggctccctcttttctcatataaaatgggatcctcatcccccgttctctcgttttagccccctcccgagcctccccgtggtccctagccatctccccgccgccctcctctctctcccacgccgccggccgcctccagccgcctgtgccgcctcgcccgcgcaccggccggccgtgccgtcgcctcctccagcgtcgcagccgcctcctcttccccggcgccacctccgatttgtggggaaatcgccggaacggtgcccccgccggcaaccagtggcattggtgccactgtactccctccagccggctcctgtacgtcgccggtgcgccgatcgacgccgccgtctcctccttcgacaccgcggcatcgcctccttccccggcatcacctcctcctcgcccgaagctcgccggagtggcctcgtcgtcggcgtccagtacctcccggtctccggtcggctcctgtacgtcgccggtacgccgatcgacgtcgccatctcctccgtcgacgtcgcagcgttgtcctcacctccagctgctcctcggtttcgccggaacaccgccgtgtcgccaccaacccctccacccgcctcgccggagtccctccggccgcccgttcctcctcgcttgtttaccggtcagccgcggcaccaccacctccggcatcgcagcggcaaggtcgccctcggcctcgcctccccttcgaccgaacccctccgcgcggcgtgttccacgtcgtcccgtctccgtgcagccactgctggctgtccctcatcgccccctcgccggccccggtcgtcgtcgtcctcgtcctctcgtcgttcccgatcgtcgtggcgttcgtccctccgtcgagccgttctcgtccgtcgtccgcgttcgtcaagcgagccgctgcagccccgtcctcgtcttcgtcctcggctccgcgtcgtcaagccttgtgccggccgcgtctcgccttcgtccaaggatcgccgccgaagccgtcccctcgccgttcgtctccgttgtgcccgtctgtctccgccgcgcccgttcgtcgttgtcgttcccgcgcctcgtcgcgtggtggtaaggatccctctccctcgctgccccgtcctcgtcctttcggtgtcgcccgtgctcgttgtgcggttgtcggccccggtacccgtgtaccggtgtcggtagtcgttcacgcgtgcgggtggtgaccgtgtagtgtccgcgttagtgtgcccgctcggtagccacgtggtttccacgtgtgcaggccgtgtggtgtctagtggagtccgtttgtcggccactcgcctcggttgacacacggggtccgcttccgtcgacccgtggaccgtctctgtgtacccggtttgttttttatgtattgttattgcttctttataggcttgaagctttgcttgtgtgcttcgcgtagctttcgtcgttccggaggttcccaaagcgtggttcgtggtcgtcgccgaaggttcggaaggccgttctctctctcttcctctttcaaaacccctaaaacctgttttcggtggggtttgggtgcatgccagttgtgggaagtagcaccccggccactataaggattaagctcgggcctctgttgcaaagcactaccgtacttccacatgtctagtgggtaaggcttagtttgtggctcagtctcgttccaacacaacggggtgcgacactttcgtccaaacagggcttcatttagggacatctggatactagattggtaactgttgttgtaggagaactcagcgtaggggagacaacgatcccatgtgccttcgaagtccagggtacatgctcgaagcatgtcctccaggatctggttaactcgttcggtctgcccatctgtctgcgggtgataggcggtactgaagtttaaattggtacccattgcctcgtgtaactgttgccagaaccttgaggtaaactgagtgcctcgatccgacactatcttcttcgggcaaccatatcggcaaaccacatgggtcatgtacaggtctgccagctttttcccatcgtaggtggttttcactggtacaaagtgagctgctttggttagacggtccacgattacccaaatggagtcacacccactaggggtccttggtaaaccggtaatgaaatccataccgatctcctcccatttccactcgagaattcggaggggttgtaacaaaccggcgggtttctgatgttcggcctttactctttggcagatgtcacataaggctacatactctgcaacatctcgcttcattccagcccaccagaagtattccttgatatcttggtacatcttggtactccctggatgtatggagtatgctgactcatgagcttctctcagaatgaggtcctttaattcctttctggctggtacgcagatgcgggatccgaaccaaacagtatcctggtcgtcgatggtgaaacctttgagtcttttcttacggatcttacccttcatttctttcataccctcgtcttcttgttgcgcttctcgaatttgagtttctagggtaggttgcactgtaagactggcaaggtttccggtgggaaccatggtcaatttcaacttctcgatttctcgacacaggttatcctgggtcggccaaactagggcggtagcacagtaggtcttgcgacttaacgcgtcggcgaccatatttgcttttccagggtggtagtgtataccgaggttataatccttgattaattccaaccatcttctctgtctcatgttcaattcactctgggtaaagatgtacttgaggctcttgtgatcggtgtaaatctcacatctgtttccaatcaggtagtgacgccaaattttcagggcatgaaccacagctgccaattccaggtcatgcgtagggtagttgacctcatggggcctgagttgtcttgaagcgtaggccaccacctttcggtcttgcattaagacacatcccagaccttgtctcgatgcatcacagaagatctcgaaatcctttcggatgtcaggcagggtgaggacgggagcagtcgtcaatcttttcttgagttcttgaaaactgcgttcacatgcttccgaccattcaaacttcttttccttctttaggagttccgtcattggtcgggctagtttggaaaatccttcgatgaacctccggtagtaacctgctaaaccgaggaaactacggatctcagacaccgtctttggtgcgttccaggcgaggacggtctcaaccttactggggtctacttcaacacctttggtggaaatgacatggccaaggaaggctaatttatccaaccagaactcacacttcgagtaattggtgaagagctggtgttcacgcaacctttccattacttttcgtagatgattggcgtgatcttgttcatcccgcgttgagaaagcggtcttggggatatcttctgatctgattttcagctggtggtacccagatcgtaggtcgatcttggagaatactctggctccttccaattggtcgaacaaatcgtcaatccgtggtaaaggatacttattctttatggttacttcattcaaggctctataatctatcaccattctctcggagccatctttcttctttactaagagcacgggggctccccaaggggacgagctgggtcgcacgtaacccttgttctgcagttcttcgatctgtttcttaatttctgccagttcgttggctgccattctgtagggtctcttggcgatgggagcggtgcctggggcaagctctatggagaactcaatttctcgatccggtggcatcccaggtagttcttctgggaacacatcgggatactcgttgactatgggtaccatttccaaaggagtggcttgcaaactgttcagggttgaccgatttccgattctggttcctccctgtcgagggtcggcagcagggcggcctgctggtggggtaggagctgggtggtcgaaacggaacacagtggaggagcccacaacgcgcttctgcgcggtgcggatcagtcggagcccacggcggctgacgactggggtgtgacctggggtgtaggaggggctggcacggtgggggtagggggagtagactggcgagtacggcacacgcgggctgggggagcgtgggccgctgggagtgcgagcagagccacgtgaactgtagaaggacaggtggttggagtggcaaaggcggccagagtcccaggaggtagtgtccacggaggtgacaccctcctcagcaaggcgggcctccagtgcggcgtagcggcgagccaaggagcggtaagcctcaaggagaaggtcgtgctgagtggcctgggcgccagaaagctccaccatgcgcgtcagcgcagggtgcgactcgcggtaagggcaggggtagcggctgtcggcacggccaggagggagctgcgggatcagccggaaggccgaacctccgcgggggtaaaggtacacggacagctcacagcggggagggaagcggtccacggagtacccagcgtactcgggacaagagaagccaaggaagccagcgaggtctctcagctggtcgacgtggtgaccctcaccaacgccgtgggaactgtgggtggcgttgactgccatccggccggagcagtgaaattgtatcaattgattctcgtcggcacgagaggctccctgccattcgttcaccgaccccggctgctccaacagccacaactcacacacgccggtacgagaggctccctgccagtcgtcaccgactccggctgctccagcagccacaaatccactcat

SEQ ID NO: 53225 - DNA, 1582 bp, Oryza sativa
  Clone ID: PAT_MRT4530_55447C.1
ctgctgcgacccggcgcccggcacgaagcggcaaaggaaacgtcaccgtcgcggcgtcgccgatggagtcgtccgcctcctcctcggccgcggtggcggcggagggggcgccggcgacgggggagcagctggcggtgttctggcacgagggcatggtggcccacgacgccggccgcggcgtgttcgactcgggccgcgacccgggcttcctcgacgtgctcgaccagcacccggagaacgccgaccgcgtccgcaacatggtctccatcctccgccgcggccccatcgcgcgcttcatctcctggcactccggccgccccgcccacgccgccgagctcctctccttccactccgccgaatacatagaggagctcgtgcaagcaaatgccgttggtgccaagaagctgtgtgaaggcactttcttgaaccctggatcctggggtgctgcgcttctggcggctggaacaactttatcagcgatgaagcacatactagatggacatgccaagattgcctatgcgttggtccgcccccctggccatcatgcgcaaccggaccgtgctgatggttactgcttcctgaacaatgctgggcttgcagtgaagctggctctggattcaggacgcagaaagggtgctggtgttgatattgacgtgcactatggaaatggcactgcggagggcttctaccacacagacagcgtgctgacgatctctcttcacatgaagcatggttcatggggtccatcacatccccagagtggctcggtggatgagattggtgaaggcaggggtctgggtacaatctcaatattcctttgcctaatggcagtggggatgcagggtatgagtatgcgatgaatgaattagttgttccagccatagagaagtttcgtcctgagcttttggtttttgttgttggccaagattctagtacgtttgatcccaatggaagacagtgcttaaccatggatggttatcggaaaattgggcaaataatgagaggcatggctgatcaacacagcaatggtcaaatattgatcgtgcaggaagggggttatcacatcagctattcggcatattgtctgcatgcaacactagaaggtgttctgaatctacaagccccgttgcttgatgatccaatcgcctattatccagaggatgagaaatacaccatgaaagttgtggacatcatgaagaaatgctggaaagaatctattccattcttgaaggacatatagaaatccatttcttttagatgcgagtgcccttgaacctcaatttcatatcagtgcaccgtctattcttatggccttttgactgaaagtacatgcattcattggagcaacattcgagtgcttgttcctttcataaacccctgattcacaagttctcaattcacattggtattgtacatacatcatgtcaaactctaccatcttatatttgtggacctcaattgctgcgcctaataagtaacgctgactaacagatgggctgtttgattatgcaatggggcattggggctacagccacctgtattatataagcgcaccagttccaagtctgaaaccaagtgccaa

SEQ ID NO: 53226 - DNA, 406 bp, Oryza sativa
  Clone ID: PAT_MRT4530_55448C.1
cgtcgatgtcagttcctccctccttccctatctctctctctcgcgcgcgctcgcgcgctcgctctatggttgcgatcaattattgtctctcggggtggtgtcggttgctgatcctgtgtttccgcggcggtgtcgtgtggctgtgtaataatcgtcgtgtttactgctgctgttaaatctgacgaatttttttgggttcgtggcgctggtgatggatgcttgctaggttccgcatgtccagcaggccttcacgtgggactgcggcctcgctcgcgtgctcatggtgctcaggacactcgggatggattgctgcgacggcattgccgatctcgagaagctctgccgcaccacgaggttcctctcttggactagattattacttcaaatttgagtttacaactaaaca

SEQ ID NO: 53227 - DNA, 2451 bp, Oryza sativa
  Clone ID: PAT_MRT4530_55449C.1
atggatcccttcggcactctagcagttaggttccatttcaatggggaatttgttaatagagggagacagaagttgtattgtggggggagagaagcaatgtcatacatagacagggataaagtgtcattacctgaactttttggacacctaaaagatcactgcaaatttgtggatgataaggtgtgtgggttcatgtctgactgtataagtgagggtagtgtggttgaggtgtatgctgacgaacccattgtaattgatgttgatgaagaggaacacagtgattatgaggctgaaatggagttggatttggatgaagaatcagaggaagagggagatgaggataaggatggggatagaaatgtgaaagtgaaagataagggcaaagctattgtggacaaagggaagggcaaagctgttgtgggtgctggtaaaggtaaagcaatagaagtggatgaaagtgctagtgataggaggattgtcatttatagggaaaggtcacctttgagggaaaatgcacctataagggagtactcaccttctagggatacctcacccataaacactatcctaccttctgacagtgaggatgatagtgattatgtaggaggagatgattgcccttctgaggatgatgaagaggctagggagatagaaggacactacaaagagttgaagaggaagatgagagctggaaagtcagctagaacagctggaggtccaaaagatggcaatgacaccccatatgcagatagtgatgatgaagactcatatgatgaggttggcagtgatggtgagcttgttagaagaaagggcaagtttccaaggtttcagaagcagccaggggttcctgtttttgagctaggaatgaagttcagctctaagcatcagttcaagaagaccattataaaatatgccctggctgaaaggaaagtgattaattttattaaagatgatcacaagagggtgagggcaaagtgtgattgggctagctgtccttgggtgtgtttgctgtccaagactacaagaagtgatagttggcagattgccacttatgacagtatgcatgcatgcccaccaaggagggacagtagacatgtttcatctgttaggatagcagaaaaatatggcaagttcattgttgataaccctggttggccactatcccatatgaaagcaacagttcaacaagagatgtttgctgatgcatcaatttctaagcttaagagggccaaaagacttgtgatgcagaaggcatttgatgtgaccaagggccagtaccagaagctttacaattatcaacaagaactgcttaggaccaaccgtgggagcactgtggcgatcaacagagtgataggtattgaaccacctgtgttcaaaagaatttacatttgccttgatggatgcaagaaagggtttatggctggttgcaggaagggaataattaatgctgtctctaagtgggctccagaagctgaacacaggaactgtgccaggcatatctatgccaattggaagaggcacttcaatgataaagtgtttcaaaaaaaattctggaagtgtgccaaagcatcatgcagaatgcttttcaacttgccaagagcaaagctggcccaactgacccctgctagagctcaagcaatattgaacacacacccagagcattggagtagggcttggttcaggttaggatttaattgtgactctgttgataacaacatttgtgaatctttcaacaaatggattcttgaggctagattctttcctatcataacaatgcttgaaaccattagaaggaaaccagtagagggcatgactagttggccagatgatcctagagagcctctcaatgccccaggatacatacagatgccagggaggcctaagactgaaaggagaagggagcctaatgagccagctaaacctaccaaagcttccaaatttggcacaattatgaggtgcagatcatgcaagcaacctggtcacaatagcaagggctgtcacatgcacagtggggcaggtggtagcacatctgcagctgcaacatctgctccaggaaatacagtcactgcaaataacaacttagtgttgtcaagcacacctagcagcattgcacaaagcaggaaaaggaaggcagctgagctcagtactagcacatctgcttgccacactaggaagagaacatctcctacaaaaaagtcagcaaacacaaacagttcacttgtgaaggttgcagccagtgctaggctggcaactgaaagaggtggttcaaccagtgtgaaacttcaggccatagtgccacactctcaatgttcttcttctgcttcaatgaggatcacttctgagaaagcaagtgtttatgtgcaagctcaagaaccagccactaccaagcccaagaaaacacctacaggtccactgatgctgattcccccatgggaaactgacaagctgtga

SEQ ID NO: 53228 - DNA, 1911 bp, Oryza sativa
  Clone ID: PAT_MRT4530_5544C.1
atggacgccgcggccgccaccgctgttaatggagtgcttgaggtggaggagaggaaggcgcagaagagctactgggaggagcactccaaggacctcaccgtcgaggccatgatgctcgactcccgcgccgccgatctcgacaaggaggagcgccccgagatctggggcgcgtgcatgcactttttggtacttttcccaaccaaatacagttcctacgtggtaatattgtctttacttcctccttacgaaggaaaatcagtactggaacttggtgctggaataggtcgcttcactggagaactagtgaaaacagctgggcatgttcttgcaatggatttcattgaaagtgtgattaagaagaatgaaagcataaacggtcaccacaagaatgcatcctttatgtgtgcggatgtcacatgtccagacctgatgattgaggataactccattgatctgatattttcaaactggttactgatgtatctttcagacgaggaggttgagaagctagtaaagagaatggtaagatggctaaaggttggcggctatatcttctttagggaatcttgtttccatcagtctggagattcaaaaaggaaagtgaatcctacacattaccgggagccaaggttttacactaaggtgtttaaagagtgtcaagctcttgatcaagatgggaattcctttgaactctctgtacttacttgcaagtgtgttggagcttacgtgaaaagcaagaaaaatcaaaaccagatatgttggctatggcaaaaggttgattcaacagaagatcgggggtttcaaagatttttggacaatgtgcagtacaaagccagtggaatattacgctatgaacgcatctttggagaaggctttgtgagcactggtggaattgtatgcctattcttttatcttcgttcaccagaaactacaaaagaatttgtggacaggctggatctcaaacctggccagaacgttcttgatgttggatgtggaattgggggcggtgatttttatatggctgacaagtatgatgttcatgttgttggtattgatctttcgataaacatggtttcttttgcacttgagcgtgctattgggcgtaagtgctcagttgagtttgaagtcgctgattgcaccaaaaagacatacccagacaacacgtttgacgtcatctacagtcgtgatactatccttcacatacaagataaaccctcactatttaaaagtttcttcaagtggctcaaacctgggggtaaggtcctaattagtgattactgcaagtgccctgggaaaccttcagaagagttcgcagcttacattaagcaaaggggttatgaccttcacgacgtcagggcttacggacagatgcttgagaatgctggtttccatgatgtcattgctgaagaccgcaccgatcagttcctcgatgttctagagagggagcttgctaaagttgaaaagaacaaaaacgagttcgtctctgatttcagccaggaggactacgacgccattgtgaatggatggaaggcaaaacttcaaaggagttctgctggtgagcagaggtgggggctgttcatcgcgaccaagtgatgaatcaagatgcgcagcgtgggggggactcgcaaataaattggtttcatgccgtgtgtccatcatattacatttttgttgtcaagttatttaatttcgaattcggtgtacttcttgtggagcttttgatgttgttgggacaaaaaacaaaaataaccagagttcagcccgcgttgttttcgacttcttgagctggaaagttcagttgcataaagaaaattcaggtgtactcggtgtgaaacttttgatgttgtttggatataaacaaaaaccaaagttcggccccaaaaaaaaaaaaaaaaaaaaaaaaaaaaaaaa

SEQ ID NO: 53229 - DNA, 2256 bp, Oryza sativa
  Clone ID: PAT_MRT4530_55450C.1
ctagcgccgccgccgccgcggattgcgccgcatcccgccgtccccgcgcgcattaaagagaggggaatcactccccgtgattccctctcccgtttcccccgttttcccctctctctctccctcggattcgtccggattcgtcccgcgaagttcgccggcgtcttcaatggcgcccgagatctccgcgcgcggtttcctctctccccggccgctcttttccttcccccggcgctataaaatcgttgcccgagctccgctcttccgtttccgccgctcgccgctcgctctcgccgtcgatttcgtgcccgcgccgtgctccgccctctccgccatcgccgccgagctccgttccgccgccgccgccgctccggacttcctccttactcggcgacacccccgtccgcttcgccgtgttgccgccgaccccgtccgccgctccgcttcgcccgtcgaccgccggagcaccgtcgtcatcgtcatcccgaaccgcgccgccgtcttcctccgctccgtccgccgtttccaccgccttcgccgtcttggggtgagccgtggaccgctccgttcgtttccccctttcctcctctctctcgggtgccactccgccgcgccgttggtcgccggcggcgaccatcggggcgcgggtgcgcgccgctcccgtcggccgcgccggcgaggccgccctcgggcgcgccctcgcggctgccaagtgggcccggccgtcagccgcccgcgcccgcgggtgcggctgacgcgcgggacccacggcgccgaccgccgccagccgcgtgcgcccggtccaccgtggaccgagcggctgacgcgtgggccccacttcccgtggacccgacgctgcagcttcggaagatccgctcttcgtggaagtcgaagccgtcgattgggaaaacgagcaaggcaagacacatcatcttgatcatattgaatcccatacacggattggagatggatgaagtcgggcgtcgatggacattctccagggcaaatgaagactacacgagctgcggcccggaatggtggccctgggttggcttggaacaagctggaaccccaggtcgggttcccagttcggtccaaatcatggtaggccttgggttaaggcagatgtttaacagagaaaaaggaaagaatgtcagagggtatgcctccagtaactcaagttttcaactcaatccaccactggtctcaagagagttaaccagggcacacccttggtccattccaagcatgccgcttagttcacagctaccattggttggaagtcaagaccaaaatcagtatgtgtttgatcgagcatttgccacccaggtcaatgagcttccaatgccagaagaggatgtccccttttgtcacgattgtagagaacaaggacactatgccctgaattgtccatgggtatatgccaaagaagccccttcctttggtttaacagtgcagacatcgctaaaccagcctcctcgcaccaagtcaagcttgcagcctagtgtgcaaagtagagagcccaatggagagaatccgttgaatcccgggaattgctttcctcctagcctttcgtaccacgtggggtcacgtactaagcacgccaaaggcaagaagagtaagaatcagaagagaaaagcgccgatgcgaactgaagaagaagtacgtaagatgactattaccagcaccgaatggcctccagcagggataactattcctagacgtcaaagaggaaataccttccgaggtgcacgacagttgacccagcacctcctaagccatggtggcagagtatctgatagtgaagggtcagatcaagtctcctcggattatgaagatgagtctctccgacgtctcggcgaggaagagatggaatcaaaagcatgcccccgttgtggagaaattggacacattgctagcaggtgtctcacactttgccctcattgtgaagaagaccatccgccaggtgaatgtcccacccgcaaggtcacatgttttctgtgcgaaggtacaaaccatgtgcccaaggattgccaactcagtgtgttgttgaccaagaccgcagaaatccaacgaacaaccctacgattgtctcgtcagctagtcagctccaacagcaacatcgacgatataatccacagcaccaatgctcctcttgctgcacctgattctgcagtaaatcatagcgataataccttcagcaccaaccattctctgcaccgacagcctcagcaaagaatctctccagaatcagaatga

SEQ ID NO: 53230 - DNA, 437 bp, Oryza sativa
  unsure (1)..(437): unsure at all n locations
  Clone ID: PAT_MRT4530_55451C.1
gtggaaatgaaaatttgaaccttacgtcaagctctgcgaattctgatcattccatgaggaagggaaagagtccaatgaatgaagctggtgaggagcagcttatggggtctgaattgcagaacttaaaattacatgacaacacagagactataagtgcccataacactagtgatattccagatatgaatgctgaggcttccaggaggaaggtaaatgatttttccacaggaggaccatctggggaaagcacttcttatcaatttaacgaggatatctggctttctagtgaccaaacaaggaactacctctcaagaacctcttccagtaatgggttagttccaactgagtggggaaagcccaacgcaccactttggggtggtagggttgttggncggcggcaagctagatgcgttaggggaagttcttctctttctgct

SEQ ID NO: 53231 - DNA, 3642 bp, Oryza sativa
  unsure (1)..(3642): unsure at all n locations
  Clone ID: PAT_MRT4530_55452C.1
gttgcnncgaaggagaanannagtagtggccaaggttggtgacggtgatggtggcatgtgatcccccagatcttcagtgacccagagaggaggggacggcgcgtggtgagctacaaggcatactcagtggagggcaagatcaaggcctcccgtccgtaggggactccgctgcatcaaggccaactgctccgaactgatcaatttctggtgcagacaggtgcttgcggtcaggttaaagaagttggcaaaaatgcttctgaagaaaggttaattgctgtttcatctcaggagattccagatgatccagtgtctccaacaattgaggcgcttattttgctacatagtaaagcaagtacacttgctgagaaccaccagtttctttacattccccgcgcgtgcgaaccccccaaagcctcactcacttcgctgcagaggaaaaaaaagagagaaaaatctccgatggctctccaggcggccaccaccacctccttcctcccctccgcgctctccgcccgcaaggagggagcggtgaaggactcggcgttcttgggcgttcgtctcggcgacgggctcaagctggagaccagtgctctcggccttcgcaccaagagggtgagcacgtcgtcggtggccatccgcgcgcaggcgtcggcggcggtgtcgtccccgacggcgacgccggcgtcgccgtcgggcaagcagacgctgcgcaagggcacggcggtcatcaccggcgcgtcgtccgggctcggcctcgcgacggcgaaggcgctggcggagacgggcaggtggcacgtcgtgatggggtgccgcgacttcctcaaggcgtcgcgcgccgccaaggccgccggcatggagaagggcagctacaccatcgtccacctcgacctggcgtcgctcgacagcgtcaggcagttcgtcggcaacgtccggcggctggggatgcccgtcgacgtggtggtgtgcaacgccgccgtgtaccagcccaccgccaagcagccgatcttcaccggcgacggcttcgagatgagcatctggttcagctttcgcagacactgccgccgccgcctacctagtacaaggtgtccctgattcgctagaacaatgggttcaacacctacctactgctcttcccaaacaatgggtgttggcgctttaaagcaatcacctcatatgcaattccaacaagcgtacctctatgggcttaggttcctacagagggacacccttactgcgccgattaatggacattgggccaaacgaaggagatcaagcattccaatagtatctacgtctggaatgtcaaaaatttttatagcatcctcagctggcacaacgtgcaaaactggaggacttggtggtctcccagggggacgtgcccctgctctcgctgcaatggtacgggggctcgtcccgctgtttcctctcctcgtccacgccctaccagcagtggcttcacattaggtttacgactccgatgagggggacagcaaagcagctgtgcccttctcccgtcggtagacaacagcatcagcccggttctttgtgtactatcatatgtttcttgagcaggtatggggcaagactggaacaaaattatacgccgataccactggccgtatctaccgggacaacccatagaagtctgggttttatgcctggcagctttggagggcccgagggttctcaatctcaacaattctgaatatttctcgggaccatatgtttaaaataggattttgctgtactcattcttctacttctgctctctcccgctatctgaacaatagctaagaataaaatagatgtatgtgtatgccgaattactttctgcgttcacattatcagcttgatgtgttcgatatggtggtccagagttcttaatctaccggacagtttcctggatcatttgattttattgatgggcattttaaacctgtagtaggtagaaagattaactggatgaaggcagggatcactgaatgtgatctggttatgacggtgagtccacattatgtcaaagaactcgcttctggcccagataaaggtgttgaattggatggcatccttcgcacaaagccccttgaaactggaattgtcaatggcatggatgtttatgaatggaatccagcaacagatcagtacatcagcgtgaaatacgatgcaacaacggtaactgaagcaagggcactcaataaggaaatgctacaagctgaagttgggttgcctgtggactcgagcattcctttaatagtttttgttggtcgtcttgaagagcagaaagggtcagacatactaattgcagccattccagagttcgtggaggggaatgtccagataattgttcttggtacagggaagaagaaaatggaggaggaactgatactgctcgaagttaaatatccaaacaacgctagagggatagcaaaatttaatgttcctttagcgcatatgatgtttgctggggctgattttataattgttcctagtaggtttgagccatgtggtctcatccaattgcaagggatgagatatggagtggttcccatctgctcatctactggaggacttgtcgacacggttaaggagggcgtgaccggattccacatgggtttgttcaatgtcgagtgcgaaactgttgatccagtggacgtcacagcggttgcttcaactgtcaaacgggctctgaagcagtacaacacaccggcattccaagaaatggttcagaactgcatggctcaagacctatcttggaagggacctgcaaagaagtgggaggaggttcttcttgggttgggcgttgaggggagccagccaggcatcgagggtgaggagctggcgccacttgccaaggaaaacgtggccactccctgaaattctccatgacggtgcctagcttgctggcttgtttaggtgacaggcagcctgataggatcccatggacttctgagctcgccaccggcaaagccactatttgtatccctgcaggcttctgccatttctctcgtctacttcacgtgtaatataatcgcagatgttacttagagatgatgggccagatggcatgcatttgcctgtttctctctcgctccttctgcatgtgtaatagtatatttggctgtgaagttctggaccctgtcagtcgctgtcctcgtactgcatttcttgtaaggaactactccctccgtcccagaataaaccgtcccagaataaagtaacttagcaaaaaaacaaaaccagaatagatcctacactcccgggtcccgccccgcgctatgtttttttttaatctatgccagctttgctggttttatattaagaaggggagaaactgtacaaaagcaccgagaaagcagcaggaagaagagaacaacattaggaaggctgcaggagaaaagaagggaatggaaaatgaaaacagagtacagggagcaggcagagaaggactatgggctgctcatggcgctattctcgctaggttttttttgccccacatgctatccatacattgatttcatcaagaattttggtcaactgtggaattgcaagctccttgttctgttcctctcacaccagatctcccgactgggtcgctcgcgcccgcggcccgttccctgcggcccggggatccacaaaaaaaaa

SEQ ID NO: 53232 - DNA, 2508 bp, Oryza sativa
  Clone ID: PAT_MRT4530_55453C.1
tcacagcttgtcagtttcccatgggggaatcagcatcagtggacctgtaggtgttttcttgggcttggtagtggctggttcttgagcttgcacataaacacttgctttctcagaagtgatcctcattgaagcagaagaagaacattgagagtgtggcactatggcctgaagtttcacactggttgaaccacctctttcagttgccagcctagcactggctgcaaccttcacaagtgaactgtttgtgtttgctgacttttttgtaggagatgttctcttcctagtgtggcaagcagatgtgctagtactgagctcagctgccttccttttcctgctttgtgcaatgctgctaggtgtgcttgacaacactaagttgttatttgcagtgactgtatttcctggagcagatgttgcagctgcagatgtgctaccacctgccccactgtgcatgtgacagcccttgctattgtgaccaggttgcttgcatgatctgcacctcataattgtgccaaatttggaagctttggtaggtttagctggctcattaggctcccttctcctttcagtcttaggcctccctggcatctgtatgtatcctggggcattgagaggctctctaggatcatctggccaactagtcatgccctctactggtttccttctaatggtttcaagcattgttatgataggaaagaatctagcctcaagaatccatttgttgaaagattcacaaatgttgttatcaacagagtcacaattaaatcctaacctgaaccaagccctactccaatgctctgggtgtgtgttcaatattgcttgagctctagcaggggtcagttgggccagctttgctcttggcaagttgaaaagcattctgcatgatgctttggcacacttccagaattttttttgaaacactttatcattgaagtgcctcttccaattggcatagatatgcctggcacagttcctgtgttcagcttctggagcccacttagagacagcattaattattcccttcctgcaaccagccataaaccctttcttgcatccatcaaggcaaatgtaaattcttttgaacacaggtggttcaatacctatcactctgttgatcgccacagtgctcccacggttggtcctaagcagttcttgttgataattgtaaagcttctggtactggcccttggtcacatcaaatgccttttgcatcacaagtcttttggccctcttaagcttggaaattgatgcatcagcaaacatctcttcttgaactgttgctttcatatgggatagtggccaaccagggttagcaacaatgaacttgccatatttttttgctatcctaacagatgaaacatgtctactgtccctccttggtgggcatgcatgcataccaaggacagctagcccaatcacacgatcatctttaataaaattaatcactttcctttcagccagggcatattttataatggtcttcttgaactgatgcttagagctgaacttcattcctagctcaaaaacaggaacccctggctgcttctgaaaccttggaaacttgccctttcttctgacaagctcaccatcactgccaacctcatcataggagtcttcatcatcactatctgcatatggggtgtcattgccatcttctggacctccagcagttctagctgactgacttttaaacccctcaaacacaacttcatctagctcatgaacctttccagctctcatattcctcttcaactctttgtagtgtctttctatctccctagcctcttcatcatcctcagaagggcaatcatctcctcctacataatcactatcatcctcactgtcagaaggcaggacagtgtttatgggtgaggtatccctataaggtgagttctccctcataggtgcattttccctcaaaggtgacctttccctataaatgacaatcctcctatcactagcactttcatccacttccattgctttaccttcaccagcacccacaacagctttgcccttccctttgtccacaatagctttgtccttatctttcactttaacctttctatccccatccttatcctcatctccatcttcctctgattcttcatccaaatccaacttcatttcagcctcatactcattgtgttcctcttcatcaacatcaattacaatgggctcctcagcatacacctcagccacaccaccctcacttatacagtcagacatgaacccacacaccttatcatccatcaacaactgcaggcctgtcctatttcttccccaggaaataaccaatgcagtaaagtcccatccacaaatttgcagtgatatcatggatgaacaacaagatatcaagttcgagtcctgcaagtgccggaatcctattcggccacctgctacactgctgacttcaaacggccaccgaatctgcatacgacctccgttttcggcccgtgagtacttgatggaaagcttttggagccctctttccaacggatccagcctcat

SEQ ID NO: 53233 - DNA, 1135 bp, Oryza sativa
  Clone ID: PAT_MRT4530_55454C.1
atgagtagagtgtccactagttggggttttgtttattctagggcgaacaagccgggagagaggagcgcgcggaccgggtccacgggagtggggcccacgcggcagcctctcggtccacggtggaccgggtgcacgcggcttacgccggccggcgccgtgggtcccacgcgtcagccgcacccgagggcgcgggcggctgacggccgggccccacatggcagccgcggggcgcgcccgaaggcggcctcgccggcacagccgacgggaggcggcgcacccgcgccccgatggtcgccgccggcgaccaccggcgcggcggagcggcgcccgagagaggggagggaagggggaagtgaaacggcggtccacggctcaccccgggtcgacggcgacgacgggaacggcgaccggagcggaggaaggcggcggcgcggctcgggtcgacgaggacggcggcgttccggcggtcggcgggcgaaacggaggggtggacgaggtcggcgaggttgcggcgaacccgaagaaggcgacgccgaaacgggagagggtccggggcgacgacggcggcggaccggagctcggcggcgacggcggagagagagagcgacggcgcgagctcgattccgacggggagagagagcggcgagggtcggaaacggcggagggaggcacggggagcgtttatatagggttgggagggggagagagcggccggatgagggggaatcggccacggaagatccggtcgccattgatggcgccggcgaggttaggggagaggtttccaaacgaatccgagggagagagggagggaaaaatggggggaaagagggagggaatcacgggaaatatttcccccccccccactttattgcgcgcgtggacggcgggaggcggtgggattcgtggcggcggcggcgctagggcacgggcgaggcggcgggagcggcgggaggaaggggatgacgggtgggggtggcgggcgggcccgcccgtcagcggcacgcgcgcggggaggaggccgaatgggccgcgggggagaggagagagagggagagagatgggccgagccggcccaagagggggaggagggggaaaaagactttttaggttttttctttttataaaacctttt

SEQ ID NO: 53234 - DNA, 4269 bp, Oryza sativa
  Clone ID: PAT_MRT4530_55455C.1
atggcaattaaggaccggttcacgggaaaccctgggagacttaccgtgcttaccacaagcgggagtgggtttgttgcttgtgggttagtcagcggtcgatatcatgtgtcagtgatggagataaggaatggttcacgcgactccaacaacgtcagtggcagcgaagagccgatcaatggagcacgtgccaatggtgcatctgactacagtctgtccccaccgcccgagaacccaacaattgctcaggtgttgaacaatcagactcagatgatgacaatgatgatgcaacagatgcagcaacagtaccatcaggtgttgcaacaggtgcagcagcaagcacagcagcagcaacagaacctgcagtttggtcctccacctcctcagtccaaattgttagaatttcttcgtgtcaagccgcccattttctcaagcaccaccaacccaatcgaggcccacgactggcttcatgccattgagaagaagctgaatcttttgcaatgcaacgagcaggagaaggttgcttttgctatacaccagctacaaggtcccgcttctatttggtgggacaactacatggtgacccgtccagctggggcagaggttacttggacagagttttgtcatagtttcaataaagcacaggttcccgagggaattgtggcacaaaagaagagagagttccgttccctgcaacaaggaaccagaacagttatagagtatttgcatgagctcaaccgcctcgcgcgctacgcccctgaggacgtgcgtaccgatgccgagaggcaggagaagtttctgtctggtcttgatgatgaattgactaaccagttgatctctagagattatgaggactttgagaagctggtggataaggctatccgtcaggaggagcactataacgaaataaaccgtaagaggaaggcagctcagttcaggactccccaggggaagagtcagaagcctcgtttcacgatgggacatcagggtggaccttccaccatgattatccggcagtaccgtccctaccacccgggtagcttcaacaagacccaccatagtggcagtcacaacaacagtgagcagcacaggctcaagcctactccaagtccattaatgattccagctcagccagctctgccagctcagccagaacagcccaagaagtttggagaaaagcccgaactctgcttcaattgtaacgagcccggacacacggtcggaaggtgcccgaagccaagacgtgctggacccaagtttgttcaggcccgtgtcaatcatgcgtcagcagaggaggcgcagtcagcaccagaggttatattgggcacatttcctgtcgactcgacaccggcaaaaatattgtttgattctggtgcaacccattccttcatttccaagcgttttgctggtgcacatgggttatctttagtgaagcttaagataccaatgcgagtgcatactcctggaggtggcatgaccacaactcactactgcccatctgtgacagttgaaattcaagggatgatttttccagccaacctcattcttctcgaatccaaggacctagacgtcatacttggaatggattggttgacaaggcacagaggagtgattgattgcgccagccgcaccatcaagttgaccaatgcaaaaggagaggtggtaactttccagtctcaagtgccgcggaagctagggattagtttaaaccaggctgctggtgaagaacaagaggtagcagtggagaaaaccactaagaagctggaggatattcccatagtcagagagtatccggaggtttttccggacgatctgacaacaatgccaccaaaaagggatatcgagttccggattgacttggtacctggaactgcaccgatccacaagaggccttacagaatgggagccagcgagttggcggaagtcaagaagcaagtcgatgaacagttacagaagggatacatccgcccgagcacgtcgccttggggtgctccggttatctttgtggagaagaaagacaaaaccaagaggatgtgcgttgactaccgcgcactcaatgaggtcactattaagaacaagtatccgttgccaagaattgatgatctgtttgatcagttgaaaggagctacggtgttctctaagatagacctgcgatcaggttatcaccagttgaggatccgcgaagaggatattccaaagacagcattcatcactcggtacgggttgttcgaatgcacagttatgtctttcggactcactaatgcacctgccttcttcatgaatttgatgaacaaggtgtttatggaatttctggacaagtttgtcgtggttttcatcgatgatatactgatttactccaagtccgaggaagagcatgagcagcatcttcggctggtacttgaaaagttaaaagagcaccaactatatgccaagttcagcaagtgcgacttctggcttaaggaagttcagtttctcggtcacatcgtgaatgctcaaggagtagctgtggatccagcaaatgtggagtcagttaccaaatggaccccaccaaggacagtcactcatgttcggagtttcttaggacttgcgggctattaccgccggttcattgagaacttctctaaaattgctaagccaatgacacagctattgaagaaggaagaaaagtttatctggtctgctgaatgcaataggagttttgaagaactcaaacgacggttggtgtctgcaccagtcttaatcctgcctgatcagacgaaaggtttccagatctattgtgatgcatctcgccaggggctaggatgtgtgttgatgcaggatggcaaagtggtttcttatgcttcacggcagttgcgtcctcatgaaggcaactacccgacgcatgatctggaattggccgcagttgttcatgctttaaagatttggcggcactatctcatcggtaaccgttgtgaggtatatacagatcacaaaagtctaaagtacatctttactcaacctgatttaaatctcagacagcgaagatggttggagctgatcaaggattatgatatgggaatacattatcatcccggcaaggctaatgtggttgcagatgccttgagcaggaagagctactgcaatgttgcatgggtagagcaactatgttgtgaggttcaacgcggtctggaacatctgaaccttggtatagttgagcacggattcgtggttgccctagaggcacagcccacactggtggagcaggttcgcatagctcaagcaagtgatcctgaaatagcagagctcaaaaagaacatgagggttggaaaagcccgaggttttgttgaggacgaacaaggaacaatctggatgggagaaagattgtgtgtacccgaaaacaaggaattaaaagacctgatactaatcgaggctcatcaaactcaatattccattcatcccggcagtaccaaaatgtaccaagacctcaaagaaaagttctggtgggtcagcatgagaagggaaatagctgagttcgtagcactctatgacgtctgtcaacgagtaaaggcagaacaccaaaggccagcaggtttgctacagccacttcagattccagaatggaagtgggaagaaatcggaatggatttcatcaccggtttgcccaggacgtcatcggggcatgattctatttgggtagtcgttgaccgactcaccaaagtggctcacttcattccgttctcgtacaacaacagttaccaggctagtctgcagatggcaccgtttgaagcactgtatggacgaaggtgtcgtactccgctcttctgggatcagacaggggaacgccaattgtttggtacagaagttttaaatgaggcagaagagaaagtcagagctgttagggaaagattgagaatcgcacagtctcggcagaaaagctatgcagacaaccgccgaagggagctcgctttcgaaacaggggattatgtgtatctccgtgtcactccgctcaggggagtacatcgcttccaaaccaaaggaaagttggcaccacgctttgtgggaccatacaggatcttggaacgtagaggtgaagttgcttaccagctcgagcttccctccaacatgcttggcatccacaacgtgttccacgtctctcagttgaagaaatgtttgagagttcctgaggaacaggcaagtccggatcacatcgaaattcaggaagatctgacgtatgtggagaagccgactcgtgtcctcaaaaccagcgagagaaggaccagaaacaaagtataa

SEQ ID NO: 53235 - DNA, 2098 bp, Oryza sativa
  Clone ID: PAT_MRT4530_55456C.1
atgagtagagtgtccactagttggggttttgtttaatctagggtgaacaaagccgagggggagggggtgcgcggaccgggtccatgggagtggggcccacgcggcagcctcacggtccacggtggaccgggtgcaccctggctcacgccggccggcgccgtgggccccacacgtcagccgcacccgagcgcgcgggcggctgacagccgggccccacgcggcagccactcggcgcgcccgagggcggccatgccggcgcggtcgacgggaggcggcttccctcgcccggagaccatcagctcggcggagcggcggccgagagaggggagggaagggggaaaggaggcgacggtccacaactcaccccgaggcgacggcggcgacggaggaggcggccagagcggagggaggcggtggcaaggctcgggtcgacggggacggcagcgctccggcggtcggcgaccgaaacggagaggtggacgaggtcggcaaggatgcggcgaacccgaaggaggcggctccgaggtgggaggcggtccggggcgacgacggcggcggaccggagctcggcggcgatggcggagagagagagcgacgtcgcgagctcgaatccggcgaggaggaagggcggcgagaggcggaaacgaacggaggaggtgcgggaagggtttaaatagggttggaaggggagagagcggctggggaggaaggaaaccggcgcgggaggttcggccgccatcaatggcggcggcgagatttgcgggggcaaatccgcccccgcgcaattgcgcaggccacccaggtagttttgaggtatgtggcaggtactctgaatctcggggtggaattcagaaagaagcaacaacaggttcctcagctgaatggctatagtgacagtgatatggctggggatattgatgatagaaagagtacaaccggagttctatttaaattgggagacagtttgatcagttggcagtcacaaaaacaaaaggtggtagcaatatcttcgtgtgaggctgaatatatagctgctgcaactgctgctgtacaaggagtgtggctggctcgaccaataggtgagttggaaggccaagaacctggttgtgcactgatcaaggttgataacaagtctgctataagtctcttgaagaatcctgtgcttcatgatcgcagtaaacatattgatacaaagttttatttcatctgggattgtgttgatcagaaacgggtggaggtggaatacataaggttagaggagcaacatgcagatattttaacaaagcctcttgcatatttgcttccttctttagctgcaatgactcggctcggatcgtgggatggcgcgctctggttgcgtcttgagccatctcgttggagttgccgttgtcccgtggacgccgctaagccgcccaaatccatagacgatgaggcgttgccaactaacgcttgtccccatcaccatccgatgcccaccggagaaggccattctcaggttgccaaggggttggttgccgatacccggaggtcgttaacatatcatccacaagccgcgatggacccccggtgtctcctctacccgtcgccaccctcgccttcgcctctcgtcgtcggaatcgctctagcgccgtgtgccctagctttgccgtcgccgccgccgctccagccgtgcgccgccgtcgtttcagccgtcgccgtcgctcgggaagaccaccgtcgtgctcgccaagtcgtcgccgtcctcgtccgcctcttcgccgtcgccggagatcaccggagcagcatcgccgtcgtcaacccgaaggttcccgccgcttcctcctcgtcgccgtcgccgtccgttggtcttcccccgccgtttaggtcaccggtgagttcgccgcgttgtcctctccgtcttggtgccctctgtttgcgtcctagcatcgccgttcgccgacgagcgtgcgccgttcgagccgtctcctccgccgagccgccgccgctgtcggtgatgtcaccgctgacgtcatcggggtcgtccgccgtgagccgccgtggacccgatcgatctcggccgtccgttttggatcaagttgatctcggccgtccgttcgtg

SEQ ID NO: 53236 - DNA, 4377 bp, Oryza sativa
  Clone ID: PAT_MRT4530_55457C.1
atggagacaaggaatggttcacgcgactccaacaacgccagtggcagcgaagagccgatcaatggagcacgtgccaacggtgcatctgacaacagtccgtccccaccgcccgagaacccaacaattgctcaggtgttggacaatcagactcggatgatgacaatgatgatgcaacagatgcagcaacagtaccatcaggtgttgcagcaggtgcagcagcaagcacagctgcagcagcagaacctgcagtttggtcctccacctcctcagtccaaactgttagaatttcttcgtgtcaagccgcccaccttctcaagcaccaccaacccaatcgaggcccacgactggcttcatgccattgagaagaagctgaatcttttgcaatacaacgagcaggagaaggttgcttttgctacacaccagctacaaggtcccgcttctatttggtgggacaactacatggtgacccgtccaactggggcagaagttacttggacagagttttgtcatagtttcaataaagcacaggttcccgagggaattgtggcacaaaagaagagagagttccgttccctgcaacaaggaaccagaacagttatagagtatttgcatgagttcaaccgcctcgcgcactacgcccctgaggacgtgcgtaccgatgccgagaggcaggagaagtttctgtctggtcttgatgatgaattgaccaaccagttggtctctagagattatgaggactttgagaagcttgtggacaaggctatccgtcaagaggagcagtgtaacaaaatgaaccgtaagaggaaggcagcccagttcaggactccccaggggaagtgtcagaagcctcgtttcacgatgggacatcacggtggaccttccaccatgattatccggcagcaccgtccctaccacccgggtaacttcaacaagaaccaccatagtgacagtcacaacaatagtaagcagcacagcctcaaccctactccgagttcactaaagattccagctcaatcagttcagccagctctgccagaacagcccaagaggttgggagaaaaacccgaactctgcttcaattgtaacaaacccggacacacggttggaaagtgcccgaagccaagacgtgccggacccaagttcgttcaggcccgtgttaatcatgcatctgcagaggaggcgcagtcagcaccagaggttatattgggcacattccccgttaactcgacaccggcagtaatattgtttgattctggtgcaacccattccttcatttccaagcgttttgctggtgcacatgggttatctttagtgaagcttaagataccaatgcgagttcatactcctggaggtggcatgaccacaactcactactgcccatctgtgacagttgaaattcaagggttgatttttccagccaacctcattcttctcgaatccaaggacctagatgtcatacttggaatggattggttggcaaggcacagaggagtgattgattgcgccagccgcaccatcaagttgaccaatgcaaaaggagaggtggtaatcttccagtctccagtgccgcagaagccagggattagtttaaaccaggctgctggtgaagaacaagaggtagcagtggagaaaaccactaagaagctggaggatattcccatagtcagagagtatccagaggtttttccggacgatctgacaacaatgccaccaaaaagggatatcgagttccggattgacttggtacctggaactgcaccgatccacaagaggccttacagaatgggagccaacgagttggcggaagtcaagaagcaagttgatgaacagttacagaagggatacatccgcccgagcacgtcgccttggggtgctccggttatctttgtggagaagaaagacaaaaccaagaggatgtgcgttgactaccgcgcactcaatgaggtcaccatcaagaacaagtatcctttgccaaggattgatgatctgtttgatcagttgaaaggagctactgtgttctctaagatagacctgcgatcaggctatcaccagttgaggatccgcgaagaggatattccaaagacagcattcatcactcggtacgggttgttcgaatgcacagttatgtctttcggactcactaatgcacctgccttcttcatgaatttgatgaacaaggtgtttatggaatttctagacaagtttgtcgtggttttcatcgatgacatacttatctactccaagtccgaggaagaacatgagcagcatcttcggctggtacttgaaaagttaaaagagcaccagctatatgccaagttcagcaagtgcgacttctggcttaaggaagttcagtttctcggtcacatcgtgaatgctcaaggagtagctgtggatccagcaaatgtggagtcagttaccaagtggaccccaccaaggacagtcactcaggttcggagtttcttaggacttgcgggctattaccgccggttcattgagaacttctctaaaattgctaagccaatgacacagctattgaagaaggaagaaaagtttatctggtctgctgaatgcaataggagttttgaagaactcaaacgacggttggtgtctgcaccagtcctaatcctgcctgatcagacgaaagattttcaggtctattgtgatgcatctcgccaggggctaggatgtgtgttgatgcaggatggcaaagtggtttcttatgcttcacggcagttgcgtcctcatgaaggcaactacccgacgcatgatctggaattagccgcagttgttcatgctttaaagatttggcggcactatctcatcggtaaccgttgtgaggttcaacgcgacttggaacatctgaaccttggtatagttgagcacggattcgtggctgccctagaggcacagcccacactggtggagcaggttcgcatagctcaagcaagtgatcctgaaatagcagagcttaaaaagaacatgagagttggaaaagcccgaggttttgttgaggatgaacaaggaacaatctggatgggagaaagattgtgtgtacccgaaaacaaggaattaaaagacctgatactaaccgaggctcatcaaactcaatattccattcatcccggtagtactaagatgtaccaagacctcaaagaaaagttctggtgggtcagcatgagaagggaaatagctgagttcgtagcactctgtgacgtctgtcaacgagtaaaggcagaacaccaaaggccagcaggtttgctacagccacttcagattccagaatggaagtgggaagaaatcggaatggatttcatcaccggtttgcccaggacgtcatcggggcatgattctatttgggtagtcgttgaccgactcaccaaagtggctcacttcattccggtgcacactacctactcagggaagaaattagcagaactctatctggcaagaattatgtgtttacatggtgtacctaagaagatcgtgtctgatcgaggaagccaatttacttcaaagttctggcaggaattacaagaagaattgggaacccggttgaatttcagcaccgcttaccatccacaaacagatggccagaccgagcgagtcaatcaaatactagaggatatgttgagagcatgtgcgcttgactttggtggagcatgggacaaaagcttaccgtatgctgagttctcgtacaacaacagttaccaagctagtttgcagatggcaccgtttgaagcactgtatggacggaggtgtcgtactccgctcttctgggatcagacaggggaacgccagttgtttggtacagaagttttaaatgaggcagaagagaaagtcagagctgttagggaaagattgagaatcgcgcagtctcggcagaaaagctatgcagacaaccgccgaagggagctcgttttccaagtaggggattatgtgtatctccgtgtcactccgctcaggggagtacatcgcttccaaaccaaaggaaagttggcaccacgctttgtgggaccatatcggattttggaacgtagaggtgaagttgcttaccagctcgagcttccctccaacatgcttggcatccataatgtgttccacgtctcccagttgaagaaatgtttgagagttcctgaggaacaggcaagtccggatcaaatcgaaatccaggaagacttgacgtatgtggagaagccaactcgtatcctcgaaaccagcgagagaaagaccagaaacaaagtaataagattctgcaaggttcagtggagccaccactcagaggaagaggccacttgggaaagagaagatgagttgaaggccacccacccgcacctcttcgccagctcttccgaatctcggggtcgagattccgtttaa

SEQ ID NO: 53237 - DNA, 275 bp, Oryza sativa
  Clone ID: PAT_MRT4530_55458C.1
aaaataactctcggccttagctcctaccgtcactcccacgtgtgccgagcttgcgcagccaacgcatccaggacctgacacgtgcgtagttccacgtgtccttcttctccatgtcacgccggctgccaccaccacggtataaaatcttgcggcattgcacggcgcgcgctgcggcgagagccatggcgcaagttcaagcccgacgaccaagaggaggagaatgccaaggtcatcaggtagtacagcctgatggcggcgacggcgacgccgagcgg

SEQ ID NO: 53238 - DNA, 526 bp, Oryza sativa
  Clone ID: PAT_MRT4530_55459C.1
tacttagagatgatgggccagatggcatgcatttgcctgtttctctctcgctccttctgcatgtgtaatagtatatttggctgtgaagttctggaccctgtcagtcgctgtcctcgtactgcatttcttgtaaggaactactccctccgtcccagaataaaccgtcccagaataaagtaacttagcatgggatgagatccatcatagaatataggatagtatatcttgacatagtatgtttttttttaatctatgccagctttgctggttttatattaagaaggggagaaactgtacaaaagccccgagaaagcagcaggaagaagagaacaacattaggaaggctgcaggagaaaagaagggaatggaaaatgaaaacagagtacagggagcaggcagagaaggactatgggctgctcatggcgctattctcgctaggttttttttgccccacatgctatccatacattgatttcatcaagaattttggtcaactgtggaattgcaagctccttgttctgttcct

SEQ ID NO: 53239 - DNA, 288 bp, Oryza sativa
  Clone ID: PAT_MRT4530_5545C.1
atggcgcgtggcagcgcggcgcgcacgcagcggcgacgtgaggcggcgaccagtggcgaccgatcggcggcggagggcggcggcgtcgcggcgacgcgggcggcgatagcggcgtctaagcggctaggcggcggcgcgcgaccgaaggcgccggccacggcgaagctcaccggcgcgcggcacagacggggttccggcggcggattgctacggaggaggggtggacgggacggcccgcacgacggcgaacgtgatgacgtcgacggcgcggctcggcacggcggctag

SEQ ID NO: 53240 - DNA, 2867 bp, Oryza sativa
  Clone ID: PAT_MRT4530_55460C.1
atggatgaagtcgggtgtcgatggacattctccagggcaaatgaaggctacacgagctgcggcccggtagtcgagatgtcatatggcagagggttggtgccctgctgctaggggctcagttctgcctgcctgtcccgggtatcccggccgtaggtgggattgggtcggtactcttgtctaaggctaggatgggttggaaactatgtcacgtcttccgtccgtataccgtggtggtagattgcttaacaactaaaatgtggaatggttggcctgggttggcttgggacgagctgggacccagggtcgggttgccagttcggtctaaatcatcgtaggccttgggttaaggcagtactagatggtcaggtcagtgaagaagaagacatcgtcagttgtttgtcgaaactccagaaggctgttggatccgtcagcgcagcgaaggaagcagtgaagccagctgtgaagcaggacaaaagacttagatctgttaaggtcctatccttagtttctaatctgtctctcccctttgttttccctctctccctctccaaatctttgcaacagatggctgacaatgagaaaggcaataaggtcagaagtcaggacattggtaccttaagctcccgagtgaatgaagcaccagacaccagttgtgtgacactggtccaacacctgattaaccagaaccgattgcttatagagatactacagcagcatcagacgccaattctgaacctgagtcaaatacaacctcaagtgcagttggaggcagtccaagcactcacaccacaagtcagcatgccgccagcatcccgaaggacccatggtgacgtgccacatgttgacccaaaagaagcaagtaacatttgctttatgtgtgatgagcaagggcactatgcaagggagcgtcctcagcagaaaagaaaaacaccaatgcgaaccgaagatgaagtccgtaagatgatcattactagcacagaatggcctccaccaggaatgaccagacgtcagagaagaaataccttccgaggtgcaccacagttgacagagcatcttttagctaatggaggtagagtgtctgatagtgaagattcagatcaagtctcctcagatgatgaagatgaaatggaatgtaaggcatgctctcgttgtggagaaatcggtcattgtcgcgacacatgtggaagtacggtagtgctttgcaacagaggcccgagcttaatccttatagtacccgaggtacgactaacaaaacccaaccacgcacctcgagcccagcctaaagccattttgggggttttgaatagagggggagagagataacggccttccgaaccttcggcgacgaccacgaaccacgcttcgggaacctccggaacgacgaaagctacgcgaagcacacaagcaaagctacaagcctataaagaagcaataacaatacataaaaagaaaaccgagtacacagatacggtccacgggtcgacggaagcagatcccgtgtgtcaaccgaggcgagtggccgacaaacggactccactagacaccacacgggctgcacacgtggaaaccatgcggctaccgagcgggcacactaacacggtcaccacacgcacaagcgaacgactaccgacaccagtacacgggcgagacgcggctggcacaaggcttgacgacgtggagccgaggacgaggacgacgacggggctgctgcacacttgacgaaacgcgggcggcgaacgcgatcggcttgacggagggacgaacgccacaacgaggaggaaggaggaagacgacgcccgacagggaggcgacgagggcagccggcagcagctgcacggaggtgaggacggcgtgggacacgccgcagcgatgcccacgacggtggcagcgcagccagacgacgagccgggcgatcaacgggacgtcgacgacaagaacgaacggagacgacgacgatggatcgcggagggtcggccggcgcactggcatggcggaaggggctgccggagagggtgccggcgggaccgagggagaggtggcgcgggcgacggcgttccggcgaaaccgaggagcagccggaggagaggacgacgccgcgacgtcgacggaggagacggcgacgtcggtcggcgtaccggcgacgaacagcagccggccggagacggtgtagtggtggcgacgccactggacgacggcgggaacgcgcctccggcggtcaccgcgcaaaacggagggcaggccgtgggagaggaggcgggtggctgctcattttgattctggagagatatagctggcattgttctaatgactgcatcatccttgattggttctgtgatgatgtgataggactgcatattgctatcattcacaggagaagcttccttctgattgctggttgaagcggataacggtcttctgctttgtatcgccctcctgaggttgattgcccttcgctcggcctggagtaggtcggggagagacacaacttcttccatcgacgacaattctttgctgaggctgtcggcgcagagaatggttggtgctgaaggtattattgctatgattgattgcagagtcaggtgcagcaggaggagcattggtgctatggatgatatcgtcgatgttgctgttggagctgacttcgcacagaaaacatgtgaccttgcgggtgggacactcccctggtggatggtcttcttcacaatgagggcagagtgtgagacacatgctagcaacgtgtccaatttctccacaataggtgcatgcctttgattccatctcttcctcgccgagatgttggggagactcatcttcttcatccgaggagacttgatctgacccttcactatcagatactctgccaccat

SEQ ID NO: 53241 - DNA, 753 bp, Oryza sativa
  unsure (1)..(753): unsure at all n locations
  Clone ID: PAT_MRT4530_55461C.1
gcacgagggtggcattggcagtcttactatcatgagcccaggacaactaaaggaacttgcactgagggctagaggcttctggtcatccatttctatgnggtagttaggcctggacttgctggtaacctccctacctcattcttggacgccaccatgggacaaggaaagggtatagtggtggagtgggctccacaggaacaggtgctagcgcaccctgcagttgggtgctttgtaacgcattgcgggtggaactcaacggtagagagcattcgtaatggagtgcccatgctatgttggccatatttcacccgatcagttcacaaatcaaatatacatttgtgatatttggcggattgggctaaagatggtgcaaacctgtggtgaggggatcgtgaccaaggagataatggtagagaggttgaaagagctactactagatgagggtatcaaggaaagggtgcaaaggttgaaggagtttgcagaaacaaacatgagcgaagagggtgagtccaccagtaatttgaacgcagttgtcgagcttatgacaaggccaatgtcatagaatatggtttaacgcaggttttacgttactattgatccaatgaataatgatatttcatacttcatttttatggacctgaagtttgctttgcaacctatgattgttaaaaccatctaatgtacgtgctatatgctctaaaagtaatatgtgtaaatgtgtatggtacaaatgcaaaaaaaaaaaaaaaaaaa

SEQ ID NO: 53242 - DNA, 2532 bp, Oryza sativa
  unsure (1)..(2532): unsure at all n locations
  Clone ID: PAT_MRT4530_55462C.1
cccacgcgtccgcctcgacctggcgtcgctcgacagcgtcaggcagttcgtcgccaacgtccggcggctggagatgcccgtcgacgtggtggtgtgcaacgccgccgtgtaccagcccaccgccaagcagccgagcttcaccgccgacggcttcgagatgagcgtcggcgtcaaccacctcgggcacttcctcctcgcccgcgagctcctcgccgacctcacctcctccgactacccctccaagcgcctcatcatcgtcggctccatcaccggtaatgacaacctttcttcctcaccagaattaggctgttgtgttctaatgtcaaagcttccaacttctactattttgtagttctccacgtacacaattactacaattactgaactgctaaaaattgcatgttttataaaaaaaattataggaagttgttgtgattaatccaatttttaagtttttctttttcatcgggaagattgaaagagaccttctgaatgtattaagaatngagaaaagttacaagaaaaacatagtgcctctctattcttcgccgcctatttctactccagcattgctgctgcgcgactcgccgtcctccacttccgcagcgggtgggtagcttgccgcagaactcgttcggctttcgcatataccgccgccgccgcctacctagtacaaggtgtcactgaatggctagaacaatgggttcaacacctacctactgctcttaccaaacaaatggtgttggcgctttaaagcaatcacctcatatgcaattccaacaatcgtacaactatggagttaggttcctaaagagggataccctttctgtgcggattaacaaacatatggccaaaagaatagcaacaagcactggaatttgcactaagcctaggaggtctcacatgcctatagtatgctctgctggaatgacaataatttttattgcaactgaatgtcacccatggtgcaaaactggaggcctcggtgatgttctagggggactgccccctgctcttgctgtaaatattctttgtcacgcaatgggacatcgtgtcatgacaatagttcctcgttatgatcaatacaaagatgcatgggatacaaatgtccttgtcgaggtcaatattggtgacaggacagaaacagtgcgcttcttccactgctataaaaggggagttgaccgtgtttttgttgatcatcctatgtttcttgagaaggtatggggcaagactggaccaaaattatacggtcctaccactggagatgactaccgggacaaccagttgcggttctgccttttatgcctcgctgctttggaggctccaagggttctcaatctcaacaattctgaatatttctcgggaccatatggtgaaaatgttgtcttcgttgcaaatgactggcacactggagtcctgccatgctatctcaagagcatctatcaggcaaaaggaatgtatgtgaatgctaaggttgctttctgcattcacaatattgcctaccagggtagatttgccagagaagactttgaacttcttaatctaccggacagtttcctgccttcatttgattttattgatgggcattttaaacctgtagtaggtagaaagattaactggatgaaggcagggatcactgaatgtgatctggttatgacggttagtccacattatgtcaaagaactcgcttctggcccagataaaggtgttgaattggatggcatccttcgcacaaagccccttgaaactggaattgtcaatggcatggatgtttatgaatggaatccagcaacagatcagtacatcagcgtgaaatacgatgcaacaacggtaactgaagcaagggcactcaataaggaaatgctacaagctgaagttgggttgcctgtggactcgagcattcctttaatagtttttgttggtcgtcttgaagagcagaaagggtcagacatactaattgcagccattccagagttcgtggaggggaatgtccagataattgttcttggtacagggaagaagaaaatggaggaggaactgatactgctcgaagttaaatatccaaacaacgctagagggatagcaaaatttaatgttcctttagcgcatatgatgtttgctggggctgattttataattgttcctagtaggtttgagccatgtggtctcatccaattgcaagggatgagatatggagtggttcccatctgctcatctactggaggacttgtcgacacggttaaggagggcgtgaccggattccacatgggtttgttcaatgtcgagtgcgaaactgttgatccagtggacgtcacagcggttgcttcaactgtcaaacgggctctgaagcagtacaacacaccggcattccaagaaatggttcagaactgcatggctcaagacctatcttggaagggacctgcaaagaagtgggaggaggttcttcttgggttgggcgttgaggggagccagccaggcatcgagggtgaggagctggcgccacttgccaaggaaaacgtggccactccctga

SEQ ID NO: 53243 - DNA, 4326 bp, Oryza sativa
  Clone ID: PAT_MRT4530_55463C.1
atggagacaaggaatggttcacgcgactcgaacaacgccagtggcagcgaaaagccgatcaatggagcacgtgccaacagtgcatctgacaacagtccgtccccaccgcccgagaacccaacaattgctcaggtgttggacaatcagactcagatgatgacaatgatgatgcaacagatgcagcaacagtaccatcaggtgttgcaacaggtgcagcagcaagcacagctgcagcagcagaacctgcagtttggtcctccacctcctcagtccaaactgttagaatttcttcgtgtcaagccgcccaccttctcaagcaccaccaacccaatcgaggcccacgactggcttcatgccattgagaagaagctgaatcttttgcaatgcaacgagcaggagaaggttgcttttgctacacaccagctacaaggtcccgcttctatttggtgggacaactacatggtgacccgtccagctggggcagaggttacttggacagagtttcgtcatagtttcaataaagcgcaggttcccgagggaattgtggcacaaaagaagagagagttccgttccctgcaacaaggaaccagaacagttatagagtatttgcatgagttcaaccgcctcgcgcgctacgcccctgaggacgtgcgtaccgatgccgagaggcaggagaagtttctgtcgggtcttgatgatgaattgaccaaccagttgatctctagagattatgaggactttgagaagcttgtggacaaggctatccgtcaagaggagcagtgtaacaaaatgaaccgtaagaggaaggcagcccagttcaggactccccaggggaagtgtcagaagcctcgtttcacgatgggacatcagggtggaccttccaccatgattatccggcagcaccgtccctaccacccgggtaatttcaacaagaacaacaacagtggcagtcacagcagcctcaacccgactccaagtccattaatgattccagctcagtcagatcagtcagatcagctagctcagccagctctgccagaacagcccaagaggttgggagaaaagcccgaactctgcttcaattgtaacaaacccggacacacggttggaaagtgcccgaagccaagacgtgctggacccaagtttgttcaggcccgtgtcaatcatgcgtctgcagaggaggcgcagtcagcaccagaggttatattgggcacattccccgtcaactcgacaccggcagtaatattgtttgattctggtgcaacccattccttcatttccaagcgttttgctggtgcacatgggttatccttagtgaagcttaagataccaatgcgagtgcatactcctggaggtggcatgaccacaactcactactgcccatctgtgacagttgaaattcaagggttgatttttccagccaacctcattcttctcgaatccaaggacctagatgtcatacttggaatggattggttaacaaggcacagaggagtgattgattgcgccagccgcaccatcaagttaaccaatgcaaaaggagaggtggtaaccttccagtctctagtgccgcggaagccagggatcagtttaaaccaggttgctggtgaagaacaagaggtagcagtggagaaaaccactaagaagctggaggatattcccatagtcagagagtatccagaggtttttccggacgatctgacaacaatgccaccaaaaagggatatcgagttccggattgacttggtacctggaactgcaccgatccacaagaggccttacagaatgggagccagcgagttggcggaagtcaagaagcaagtcgatgaacagttacagaagggatacatccgcccgagcacgtcgccttggggtgctccggttatctttgtggagaagaaagacaaaaccaagaggatgtgcgttgactaccgcgcactcaatgaggtcaccatcaagaacaagtatcctttgccaaggattgatgacctgtttgatcaattgaaaggagctactgtgttctctaagatagacctgcgatcaggctatcaccagttgaggatccgcgaagaggatattccaaagacagcattcatcactcggtacgggttgttcgaatgcacagttatgtctttcggactcactaatgcacctgccttcttcatgaatttgatgaacaaggtgtttatggaatttctagacaagtttgtcgtggttttcatcgatgacatacttatctactccaagtccgaggaagaacatgagcagcatcttcggctggtacttgaaaagttaaaagagcaccagctatatgccaagttcagcaagtgcgacttctggcttaaggaagttcagtttctcggtcacatcgtgaatgctcaaggagtagctgtggatccagcaaatgtggagtcagttaccaaatggaccccaccaaggacagtcactcaggatggcaaagtggtttcttatgcttcacggcagttgcgtcctcatgaaggcaactacccgacgcatgatctggaattagccgcagttgttcatgctttaaagatttggcggcactatctcatcggtaaccgttgtgaggtatatacagatcacaaaagtctaaagtacatctttactcaacctgatttgaatctcagacagcgaagatggttggagctaatcaaagattatgatatgggaatacactatcatcccggcaaggctaatgtggttgcagatgccttgagcaggaagagctactgcaatgttgcatgggtagagcaactatgttgtgaggttcaacgcgatttggaacatctgaaccttggtatagttgagcacggattcgtggctgccctagaggcacagcccacactggtggagcaggttcgcatagctcaagcaagtgatcctgaaatagcagagctcaaaaagaacatgagggttggaaaagcccgaggttttgttgaggacgaacaagggacaatctggatgggagaaagattgtgtgtacccgaaaacaaggaattaaaagacctgatactaaccgaggctcatcaaactcagtattccattcatcccggtagtactaaaatgtaccaagacctcaaagaaaagttctggtgggtcagcatgagaagggaaatagctgaattcgtagcactatgtgacgtctgtcaacgagtaaaggcagaacaccaaaggccagcaggtttgctacagccacttcagattccagaatggaagtgggaagaaatcggaatggatttcatcaccggtttgcccaggacgtcatcggggcatgattctatttgggtagtcgttgaccgactcaccaaagtggctcacttcattccggtgcacactacctactcagggaagaaattagcagaactctatctatcaagaatcatgtgtttacatggtgtacctaagaagatcgtgtctgatcgaggaagccaattcacttcaaagttctggcagaaattacaagaagaattgggaacccgtctaaacttcagcactgcttaccatccacaaacagatggccagaccgagcgagtcaatcaaatactagaggatatgttgagagcctgtgcgcttgactttggtggagcatgggacaaaagcttgccgtatgctgagttctcttacaacaacagttaccaagctagtctgcagatggcaccgtttgaagcactgtatggacggaggtgtcgtactccgctcttctgggatcagacaggggaacgccagttgtttggtacagaagttttaaatgaggcagaagagaaagtcagagctgttagggaaagattgagaatcgcgcaatctcggcagaaaagctatgcagacaaccgccgaagggagctcgttttccaagtaggggattatgtgtatctccgtgtcactccgctcaggggagtacaccgcttccaaaccaaaggaaagttggcaccacgctttgtgggaccatatcggattttggaacgcaggggtgaagttgcttaccagcttgagcttccctccaacatgcttggcatccataatgtgttccacgtctcccagttgaagaaatgtttgagagttcctgaggaacaggcaagtccggatcaaatcgaaatccaggaagacttgacgtatgtggagaagccaactcgtatcctcgaaaccagcgagagaaagaccagaaacaaagtaataagattctgcaaggttcagtggagtcaccactcagaggaagaggccacttgggaaagagaagatgagttgaaggccacccacccgcacctcttcgccagctcttccgaatctcggggtcgagattccgtttaa

SEQ ID NO: 53244 - DNA, 4402 bp, Oryza sativa
  Clone ID: PAT_MRT4530_55464C.1
atggagacaaggaatggttcacgcgactccaacaatgccagtggcagcgaagagccgatcgatggagcacgtgccaacggtgcatctgacaacaatccgtccccaccgcctaagaacccaacaattgctcaggtgttggacaatcagactcagatgatgacaatgatgatgcaacagatgcagcaacagtaccatcaggtgttgcaacaggtgcagcagcaagcacagcagcagcaacagaacctgcagtttggtcctccacctcctcagtccaaactattagaatttcttcgtgtcaagccgcccactttctcaagcaccaccaacccaatcgaggcccatgactggcttcatgccattgagaagaagctgaatcttttgcaatgcaatgagcaggagaaggttgcttttgctacacaccagctacaaggtcccgcttctatttggtgggacaactacatggtgacccgtccaactggggcagaagttacttggacagagttttgtcatagtttcaataaagcacaggttcccgagggaattgtggcacaaaagaagagagagttccgttccctgcaacaaggaaccagaacagttatagagtatttgcatgagttcaaccgcctcgcgcgctacgcccctgaggacgtgcgtaccgatgccaagaggcaggagaagtttctgtctggtcttgatgatgaattgattaaccagttgatctctagagattatgaggactttgagaagctggggaagagtcagaagcctcgttccacgatgggacatcacggtggaccttccaccatgattatccggcagtaccgtccctaccacccgggtagcttcaacaagaaccaccatagtggcagtcacaacaaccgtgagcagcacagcctcaaccctactccgagttcactaaagattccagctcaatcagttcagccagctctgccagaacagcccaagaggttgggagaaaaacccgaactctgcttcaattgtaacaaacccggacacacggttggaaagtgctcgaagccaagacgtgctggacccaagttcgttcaggcccgtgttaatcatgcatctgcagaggaggcgcagtcagcaccagaggttatattgggcacattccccgtcaactcgacaccggcagtaatattgtttgattctggtgcaacccattccttcatttccaagcgttttgctggtgcacatgggttatctttagtgaagcttaagataccaatgcgagttcatactcctggaggtggcatgaccacaactcactactgcccatctgtgacagttgaaattcaagggttgatttttccagccaacctcattcttctcgaatccaaggacctagatgtcatacttggaatggattggttgacaagacacagaggagtgattgattgcgccagccgcaccatcaagttgaccaatgcaaaaggagaggtggtaaccttccagtctccagtgccgcagaagtcagggatcagtttaaaccaggctgctggtgaagaacaagaggtagcagtggagaaaaccactaagaagctggaggatattcccatagtcagagagtatccagaggtttttccggacgatctgacaacaatgccaccaaaaagggatatcgagttccggattgacttggtacctggaactgcaccgatccacaagaggccttacagaatgggagccaacgagttggcggaagtcaagaagcaagtcgatgaacagttacagaagggatacatccgcccgagcacatcgccttggggtgctccggttatctttgtggagaagaaagacaaaaccaagaggatgtgcgttgactaccgcgcactcaatgaggtcaccatcaagaacaaatatcctttgccaaggattgatgatctgtttgatcagttgaaaggagctactgtgttctctaagatagacctgcgatcagactatcaccagttgaggatccgcgaggaggatattccaaagacagcattcatcactcggtacgggttgttcgaatgcacagttatgtctttcggactcactaatgcacctgccttcttcatgaatttgatgaacaaggtgtttatggaatttctagacaagtttgtcgtggttttcatcgatgacatacttatctactccaagtccgaggaagaacatgagcagcatcttcggctggtacttgaaaagttaaaagagcaccagctatatgccaagttcagcaagtgcgacttctggcttaaggaagttcagtttctcggtcacatcgtgaatgctcaaggagtagctgtggatccagcaaatgtggagtcagttaccaaatggaccccaccaaggacagtcactcaagttcggagtttcttaacgacttgcgggctattaccgcctgttcattgagaacttctctaaaattgctaagccaatgacacagctattgaagaaggaagaaaagtttatctggtctgctgaatgcaataggagttttgaagaactcaaacgacggttggtgtctgcaccagtcttaatcctgcctgatcagacgaaagatttccaggtctattgtgatgcatctcgccaggggctaggatgtgtgttgatgcatgatggcaaagtggtttcttatgcttcacggcagttgcgtcctcatgaaggcaactacccgacgcatgatctggaattagccgcagttgttcatgctttaaagatttggcggcactatctcatcggtaaccgttgtgagatggcaccatttgaagcactgtatggacgaaggtgtcgtactccgctcttctgggatcagacaggggaacgccagttgtttggtacagaagttttaaatgaggcagaagagaaagtcagagctgttagggaaagattgagaatcgcgcaatctcggcagaaaagctatgcagacaaccgccgaagggagctcgttttccaagcaggggattatgtgtatctccgtgtcactccgctcaggggagtacaccgcttccaaaccaaaggaaagttggcaccacgctttgtgggaccatatcgaattttggaacgcaggggtgaagttgcttaccagcttgagcttccctccaacatgcttggcatccataatgtgttccacgtctcccagttgaagaaatgtttgagagttcctgaggaacaggcaagtccggatcaaatcgaaatccaggaagacttgacggtgtcgccgctgcccgtccgtgcctccgcgtcgccggtcatcgccgccgtcttcatccttcgcgccggccgccgtgctcacagtgaggagctcctctcctccatccttccatctgtcccgcacgcgctgccgctccctgcgctcgccatcgccttcgtccgccgccgccggtctgtgcgccgcccgccgccgcctcccacgccgctggttgccgtcaccggcgaccgcatgccgccgccgttcgccatgcttgccggccggcttgaagccgaggccgagcccggcaccggtggcgagggtgggcgtgatggagttgggtcggccggggtgtccggttgtccagctgccggattcaccgcggcgcaagaggggaccgcccactgccttttgaggggtggggcctctcatggtctacttgtccatcagatgaatgttaagacagctttcctcaatggagagttggaggaggagatctatatggatcaaccagatgggtatgtactagaaggtcaggagggaatggtgtgcaagctgttgaagtccttgtatggtctcaaacaagcgcctaagcaatggcatgagaagtttgacaatacacttacatatgttggctttgttgtgaacgaagctgacaaatgtgtgtactatcgctatggtgggggagagggagtgatcttgtgtttatatgtcgatgacatattgatctttgggtccagccttaatgtgattgaggaggtcaaggactttctatccaaaagctttgaaatgaaggatttgggagtggctgatgttattcttcacattaaactactgagaggagatgagggtgggattacacttgtgcaatctcactatgtggacaaggtcctgagtcgctttggttatagtgactgcaaggcagctcctactccttttgatcctacgcgactgctctgcatcatcttcactaacatgttgacaaccggcgacaacaacaacactagagacaaggagaaggagcttcccgtcaacaccaacggaggcaatactgtctcaaactccagcggagggccattctcagggcagcagcagttgcgatggcgcggctcggtgtggggaggcggcgcaaccgggaaggcggcggagcaggtggtgggcggccccggcgaggttggggaagaagaagcggcatggatggtgggttaa

SEQ ID NO: 53245 - DNA, 4974 bp, Oryza sativa
  Clone ID: PAT_MRT4530_55465C.1
atggcgaaggtcgtcgtcactacgaccggcggcgaggttgaggatgacggagaggctgaggacctctccctcggcttcttcagcttcaaagtgattggttcttatgtaagtcctcgcgaaggaggcaaatatatgccgcgaagggcaaatgtgatatttaccgaggcgcaggaagcgcatggaggagggttgatgggacattttggagctaagaagacggaagatgttttggccatgcatttcttttggccaaggatgagaaaggatgttgagagaactaagagggggagggatagtattttcgtggtggtggatcgtttttctaagatggcacatttcataccatgtcataaaagtgatgatgctgttcatattgctgatctatttttccatgagattgttcgcttgcatggtatgccttgtactattgtttcagatcgtgatgcaaaattcttaagtcatttctggtgcacactatggaacaagttgggtacaaagctattgttttctacaacatgtcacccacaaacagatggacaaacgaagatagtcaaccgcactttggataccatgttgagggctattttgaagaaaaatttgaagatgtgggaagaatgtttgcctcatgtggagtttgcatacaatcgggcaacacattctactaccaaggtaagtccttttcaggtagtgtatggtttcaaccctcgtgctccaattgatattttgcctttacctactagtgagaggattcataatgatgctaaggcacgcgctgaatttattttgaaaatgcatgagtcaaccaagttcaatattgaaaagatgactgaaaagtatagaattgctggaagtaaaggtaggcaagaggttaagtttgaaccgggtgatttagtatggttgcacttgcggaaggatagatttccagaattgagaaagtctaagttgatgcctcgtgttgatggcccttttaaaattgttgagaagattaatgataatgcatataaacttgagttgcctcctgagtttggggttagtcccacgtttaacatttcagatttgaagccatacttgggagaaaaggatgagcttgagtcaaggacgacttcaattcaagagggggaggatgatgcggacatcactacctcggatacacacagcaatcctccaacggtcattcaaggaccgataacaagagctcgtgcgcgacaattgaatttagaggggacaaggagacacttggagaaggacttagagccatggaggatcatcggggaagtccaagtcaaggtggaggcccaaaccaagtcgacgtcgggtgcaattcggagtccaggaccagtctgcactaaaacgggcacccagggaatagccttctcagcgaggtcatccgcgtttcgacacggaacctttcggaagatcgggaaccctagtgcacatcacctacacaacatgtttcctttcgagaggtacatgggcgttctgaagaagtatgtttgtaaccgtgctcgtccagaggcaagcattagcatggggtatggaatagaggagatggtgaagacaaggaatggttcccgggaatccaacaacgccagtggcagcgaagagcagatcagtggagcacgtgcaagcgatgcatctagcagcagttcatctccaccgcccgagaacccaacgattgctcaggtgttggacaatcagactcagatgatgacaatgatgatgcaacagatgcagcgacagcaccatcagccgcccattttctcaagtaccaccaacccaatcgaggccaacgactggctccatgcgattgagaagaagctgaatcttttgcaatgcaacgaccgggagaaggtcgcttttgctacacaccagctgcaaggtcccgcttctgtttggtgggacaactacatggtgaccagtccagctgggacaaaggttacttggtcagagttttgtcagaatttcaataaagcacatgttccagagggaatcgtggcacaaaagaagagagagttccgttctctgcaacaaggaaccagaacagttatagagtatctgcatgagttcaaccgcctcgcgcgctatgctcctgaggacgtgcgcactgatgctgagaagcaggagaagtttttgtttggtcttgatgatgaattgaccaaccagctgatctccagagactatgaggactttgagaagcttgtggacaaggctatccatcaggaggagcagtgtaacaaaatgaaccgtaaaagaaagatcagtcagttcagtcagctctgccagctcagccagaacagccccagaggtttggaggaaagcccaaactctgcttcaattgtaacaaacccggacacacggttggaaagtgtcaatcatgcgtatgcagaggaggcgcagtcagcaccagaggttatattgggcacatttcctatcaactcgacaccggcagtaatattgtttgactctggtgcaactcattccttcatttccaagcgttttgctggtgcacatgggttatctttagtgaagcttaagatacctatgcgagttcatactcctggaggtggcatgaccacaactcactattgcccgtcagtgacagttgaaatccaagggttgatttttccagccaacctcatttttcttgaatccaaggatctagatgttattctgggaatggattggctgacaaggcacagaggagtgattgattgcgctagccgcaccatcaagttgaccaatgcgaaaggagaagtggctgctggtgaagaacaagaagtagcagtggagaaaaccactaagaagttggaggatattcctatcgacagagagtatccagaggtttttccagatgacctgacaacaatgccacctaaaagggatatcgagttccggatcgacttggcacctggaactgcaccgatccacaagaggccttacagaatgggagccaacgagctggcggaagtcaagaagcaagttgatgaacagttacagaagggatacattcgcccgagcacgttgccttggggtgctccggtcatctttgtggaaaagaaagacaaaaccaagaggatgtgcgttgactaccgcgcactcaatgtggttactgttaagaacaagtaccctttgccaaggattgatgatctgttcgatcagctgaaaggagctactgtgttctctaagatagacctgcgatcaggctatcaccagttgaggatccgcgaagaggatattccaaagacagcattcatcactcggtacgacaagtttgtcgtggttttcatcgatgacatacttatctactccaagtccgaggaagaacataagcagcatctccggctagtacttgaaaagttaaaagagcaccagctatatgccaagttcagcaagtgtgacttctggcttaaggaagttcagtttctcggtcacatcgtgaatgctcaaggagtagctgtggatccagcaaatgtggagtcagttacgaaatggaccccaccaaggacagtcactcaggttcggagtttcttaagacttgcgggctattaccgccggttcattgagaacttctctaaaattgctaagccaatgacacagctattgaagaaggaagaaaagtttatctggtctgctgaatgcaataggagttttgaagaactcaaaggacggttggtgtctgcaccagtcttaatcctgcctaatcagacgaaagatttccaggatggcaaagtggtttcttatgcttcacggcagttgcgtcctcatgaaggcagctacccgacgcatgatctggaattggccgcagttgttcatgctttaaagatttggcggcactatctcatcggtaaccgttgtgagcgaagatggttggagctgatcaaggattacgatatgggaatacactaccatcctggcaaggctaatgtggttgcagatgccctgagcaggaagagttactgcaacgtcacatgggtagagcaactatgctgtgaggttcaacgtgatttggaacatctgaaccttggtatagttgagcacggatttgtggttgccctagaggcacagcccacactagtggagcagcgagtaaaggcagaacaccaaaggccagcaggtttgctacagccacttcagattccagaatggaagtgggaagaaatcggaatggatttcattatgggtttgcccaggacgttatcggggcatgattctatttgggtagtcattgatagactcactaaagtggctcacttcattccggtgcatactatctactcagggaagaagttagcagagctttatttggcaagaatcatgtgtctacatggtgtacctaagaagatcgtgtctgatcgaggaagccaattcacctcaaagttctggcagaaattgcaagaagaattgggaacccgtctgaaattcagcacagcgtaccatccacaaactgatggccagactgagcgagtcaatcaaatactagaggatatgttaagagcttgtgcgcttgactttggtggagcatgggacaaaagcttgccgtatgctgagttctcctacaacaacagttaccaggctagtctgcagatggaaccatttgaagcactgtatggacggaagtgtcgtactctgctcttctgggatcagacagaggaacgccagttgtttggtacagaagttttaaatgaagcagaagagaaagttagagctgtcagggaaagtttgagaatcgcgcaatctcgacagaaaagctatgtagacaaccgccgaagagagctcgtttttgaaacaggggattatgtgtatctccgtgtcactccgctcagggagtacatcgcttccaaaccaaaggaaaattggaaccacgctttgtgggaccatacaggatcttggaacgtagaggtgaagttgcttaccagcttgagcttccctccaacatgcttggcatccacaatgtgttccacgtctctcagttga

SEQ ID NO: 53246 - DNA, 13126 bp, Oryza sativa
  Clone ID: PAT_MRT4530_55466C.1
atggagacaaggaatggttcacgcgactcgaacaacgccagtggcagcgaagagccgatcaatggagcacgtgccaacggtgcatctgacaacagtccgtccccaccacctgagaacccaacaattgctcaggtgttggacaatcagactcagatgatgacaatgatgatgcaacagatgcagcgacagtaccatcaggtgttgcagcaggtgcaacagcaagcacagcagcagcagcagaacccgcaatttggtcctccgcctcctcagtccaaactgttagaatttcttcgtgtcaagccgcccaccttctcaagcaccaccaacccaatcgaggcccacgactggcttcatgccattgagaagaagctgaatcttttgcaatgcaacgagcaggagaaggttgcttttgctacacaccagctacaaggtcccgcttctatttggtgggacaactacatggtgacccgtccaactggggcagaggttacttggacagagtttcgtcatagtttcaataaagcacaggttcccgagggaattgtgggacaaaagaagagagagttccgttccctgcaacaaggaaccaaaacagttatagagtatttgcatgagttcaaccgcctcgcgcgctacgcccctgaggacgtgcgtaccgatgccgagaagcaggagaagtttatgtctggtcttgatgatgaattgaccaaccagttgatctctagagactatgaggactttgagaagcttgtggacaaggctattcgtcaagaggagcagtgtaacaaaatgaaccgtaagaggaaggcagcccagttcaggactccccaggggaagtgtcagaagcctcgttacacgatgggacgtcacggtggaccttccaccatgattatccgacagcaccgtccctaccacccggctcaatcagttcagccagctctgccagaacagcccaagaggttgggagaaaaacccgaactctgcttcaattgtaacaaacccggacacacggttggaaagtgcccgaagccaagacgtgctggacccaagttcgttcaggcccgtgtcaatcatgcatctgcagaggaggcgcagtcagcaccagaggttatattgggcacattccccgtcaactcgacaccggcagtaatattgtttgattctggtgcaacccattccttcatttccaagcgttttgctggtgcacatgggttatctttagtgaagcttaagataccaatgcgagtgcatactcctggaggtggcatgaccacaactcactactgcccatctgtgacagttgaaattcaagggttgatttttccagccaacctcattcttctcgaatccaaggacctagatgtcatacttggaatggattggttgacaaggcacagaggagtgattgattgcgccagccgcaccatcaagttgaccaatgcaaaaggagaggtggtaatcttccagtctccagtgccgcagaagccagggattagtttaaaccaggctgctggtgaaggacaagaggtagcagtggagaaaaccactaagaagctggaggatattcccatagtcagagagtatccagaggtttttccggacgatctgacaacaatgccaccaaaaagggatatcgagttccggatagacttggtacctggaactgcatcgatccacaagaggccttacagaatgggagccagcgagttggcggaagtcaagaagcaagtcgatgaacagttacagaagggatacatccgtccgagcacgtcgccttggggtgctccgattatctttgtggagaagaaagacaaaaccaagaggatgtgcgttgactaccgcgcactcaatgaggtcaccatcaagaacaagtatcctttgccaaggattgatgatctgtttgatcagttgaaaggagctactgtgttctctaagatagacctgcgatcaggttatcaccagttgaggatccgcgaagaggatattccaaagacagcattcatcactcggtacgggttgttcgaatgcacagttatgtctttcggactcactaatgcacctgccttcttcatgaatttgatgaacaaggtgtttatggaatttctagacaagtttgtcgtggttttcattgatgacatacttatctactccaagtccgaggaagaacatgagcagcatcttcgactggtacttgaaaagttaaaggagcatcagctatatgccaagttcagcaagtgtgacttctggcttaaggaagttcagtttctcggtcacatcgtgaatgctcaaggagtagcggtggatccagcaaatgtggagtcggttaccaagtggaccccaccaaggacagtcactcaggttcggagtttcttagggcttgcgggctattaccgccggttcattgagaacttctctaaaattgctaagccgatgacacagctattgaagaaggaagaaaagttcatctggtctgctgaatgcaataggagttttgaagaactcaaacgacggttggtgtctgcaccagtcttaatcctgcctgatcagacgaaagattttcaggtctattgtgatgcatctcgccaggggctaggatgtgtgttgatgcaggatggcaaagtggtttcttatgcttcacggcagttgcgtcctcatgaaggcaactacccgacgcatgatctggaattagccgcagttgttcatgctttaaagatttggcggcactatctcatcggtaaccgttgtgaggattatgatatgggaatacattatcatcccggcaaggctaatgtggttgcggatgccttgagcaggaagagctactgcaatgttgcatgggtagagcaactatgttgtgaggttcaacgtgatttggaacatttgaaccttggtatagttgagcacggattcgtggctgccctagaggcacagcccacactggtggagcagatggcaccatttgaagcactgtatggacgaaggtgtcgtactccgctcttctgggatcagacaggggaacgccaattgtttggtacagaagttttaaatgaggcagaagagaaagtcagagctgttagggaaagattgagaatcgcgcagtctcggcagaaaagctatgcagacaaccgccgaagggagctcgctttcgaaacaggggattatgtgtatctccgtgtcactccgctcaggggagtacatcacttccaaaccaaaggaaagttggcaccacgctttgtgggaccatacaggatcttggaacgtagaggtgaagttgcttaccagctcgagcttccctccaacatgcttggcatccacaacgtgttccacgtctctcagttgaagaaatgtttgagagttcctgaggaacaggcaagtccggatcacatcgaaattcaggaagatctgacgtatgtggagaagccgactcgtatcctcgaaaccagcgagagaaggacaagaaacaaagtaataagattctgcaaggttcagtggagccaccactcagaggaagaggccacttgggaaagagaagatgagttgaaggccacccacccgcacctcttcgccagctcttccgaatctcgggcgccgccgcttgccgccgcctttggccgcgagccgccgccgctagagtcgccgccgcgccaaaccgccgccgctgttagcttcgccgccgcaagagctttcccggccgccgcctcgcgtcgccggaatcccaccggagcacctctcccctcgcgagccgggtgtcgccgccgcccgtccgtgcctccgcgtcgccggtcatcgccgctcgtctcttcccacgccggtcgccgccatcgcctcggtgaggaatcccctttcctccttcctttcctctcccccgtgagcgccgccgccctccgcgcgtgcgccgtcgtcttcggctgccgccgccgccttcgcgccggccgccgccgtctccccgcgccgccggtcaccgccggcggcaccggtggcgagggtgggcgtgatggagttgggtcggccggggtgtccggttgtccagctgccggattcaccgcggcgcaagaggggaccgcccactgccttttgaggggtggggagctggagatcttcctagttggagctgttttgtcaaagttggtttcgtcgctgccgtcaaggattgcctgtggagtggagtcgcccgctgctgaaatggagataaggaatggttcacgcgactcgaacaacgccagtggcagtgaagagccgatcaatggagcacgtgccaacggtgcatctgacaacagtccgtccccaccacccgagaacccaacaattgctcaggtgttggacaatcagactcagatgatgacaatgatgatgcaacagatgcagcaacagtaccatcaggtgttgcagcaggtgcagcagcaagcacagctgcagcagcagaacctgcagtttggtcctccaccaccacccagtccaaactgttcgagtttctccgtgtcaagccacctactttctcaagcaccaccaacccaatggaggccaacgactggcttcattgtattgagaagaaactgaaccttttgcaatgcaatgaccgggagaaggttgcttttgctacacaccagctacaaggtcctgcttctgcttggtgggacaactacatggcaacccgtccagctgcaacggaggttacttgggtggagttttgtcgaagcttcaggaaggcacaggttcccgaggggatcgtggcacaaaataagagagagttccattctttgcaacaagggaccagaacagttacagagtatcttcacgagttcaaccgcctcgcgcgctacgcccctgaggacgtacacaccgatgccgagaggcaggatatgtttttgtttggtcttgatgatgaattgaccaaccagctgatctccagagattatgaggactttgagaagcttgtggacaaggctatctgttaggaagagcagcgcaacaaaatggatcgcaaaaggaaggcagctcaattcaggacttcccaggggatcagtcagaagcctcacttcatgacaggacatcagggtggaccttccaccatgattatccggcagcaccgtccctaccacccaggcagcttcaataaaacctacaacagtggtagtcacaactacagtgagcagcacagcctcaacccaactccaagtccactaatgactccagctcagtcagatcagtcagatcagctagctcagccagctctgccagaacagcccaagaggttgggagaaaaacccgaactctgcttcaattgtaacaaacccggacacacggttggaaagtgcccgaagccaagacgtgccggacccaagttcgttcaggcccgtgttaatcatgcatctgcagaggaggcgcagtcagcaccagaggttatattgggcacattccccgtcaactcgacaccggcagtaatattgtttgattctggtgcaacccattcctttatttccaagcgttttgctggtgcacatgggttatctttagtgaagcttaagataccaatgcgagttcatactcctggaggtggcatgaccacaactcactactgcccatctgtgacagttgaaattcaagggttgatttttccagccaacctcattcttctcgaatccaaggacctagatgtcatacttggaatggattggttgacaaggcacagaggagtgattgattgcgccagccgcaccatcaagttgaccaatgcaaaaggagaggtggtaaccttccagtctcaagtgccgcagaagccagggattagtttaaaccaggctgctggtgaagaacaagaggtagcagtggagaaaaccactaagaaactagaggatattcctatagtcagagagtatccagaggtttttccggacgatctgacaacaatgccaccaaaaagggatatcgagttccggattgacttggtacctggaactgcaccgatccacaagaggccttacagaatgggagccaacgagttggcggaagtcaagaagcaagttgatgaacagttacagaagggatacatccgcccgagcacgtcgccttggggtgctccggttatctttgtggaaaagaaagacaaaaccaagaggatgtgcgtggactaccgcgcactcaatgaggtcactattaagaacaagtaccctttgccaaggattgatgatctgttcgatcagctgaaaggagctactgtgttctctctaagatagacctgcgattaggctatcactagttgaggatccgagagaaggatattccaaagacaacattcatcactcggtacgggttgttcgagtgcacagttatgtctttcggactcactaacgcacctgccttcttcatgaatttgatgaacaaggtgtttatggaatttctagacaagtttgtcgtggttttcatcgatgacatacttatctactccaagtccgaggaagaacatgagcagcatcttcggctggtacttgaaaagttaaaagagcaccagctatatgccaagttcagcaagtgcgacttctggcttaaggaagttcagtttctcggtcacatcgtgaatgctcaaggagtagctatggatccagcaaatgtggagtcagttaccaaatggaccccaccaaggacagtcactcaggttcggagtttcttaggacttgcgggttattaccgccggttcattgagaacttctctaaaattgctaagccaatgacacagctattgaagaaggaagaaaattttatctggtctgctgaatgcaataggagttttgaagaactcaaacgacggttggtgtctgcaccagtcttaatcctgcctgatcagacgaaagatttccaggtctattgtgatgcatctcgccaggggctaggatgtgtgttgatgcaggatggcaaagtggtttcttatgcttcacggcagttgcgtcctcatgaaggcaactacccgacgcatgatctggaattggccgcagttgttcatgctttaaagatttggcggcactatctcatcggtaaccgttgtgaggtatatacggatcacaaaagtctaaagtacatcttcactcaacctgatttgaatctcagacagcggagatggttggagctgatcaaggattatgatatgggaatacattatcatcccggcaaggctaatgtggttgcagatgccttgagcaggaagagtcactgcaacgtcgcatgggtagaggaactatgctgtgaggttcaacgtgatttggaacatttgaaccttggtatagttgagcacggattcgtggctgccctagaggcacagcccacactggtggagcaggttcgcatagctcaagcaagtgatcctgaaatagcagagctcaaaaagaacatgagggtcggaaaagcccgaggttttgttgaggacgaacaaggaacaatctggatgggagaaagattgtgtgtacccgaaaacaaggaattaaaagacctgatactaaccgaggctcatcaaactcaatattccattcatcccggcagtaccaaaatgtaccaagacctcaaagaaaagttctggtgggtcagcatgagaagggaaatagctgaattcgtagcactatgtgacgtccgtcaacgagtaaaggcagaacaccaaaggccagcaggtttgctacagccacttcagattccagaatggaagtgggaagaaatcggaatggatttcatcaccggtttgcccaggacatcatcgcacactacctactcagggaagaaattagcagaactctatctagcaagaatcatgtgtttacatggtgtacctaagaagatcgtgtctgatcgaggaagccaattcacttcaaagttctggcagaaattacaagaagaattgggaacccgtctaaacttcagcactgcttaccatccacaaacagatggccagaccgagcgagtcaaccaaatactagaggatatgttgagagcctgtgcgcttgacttgggtggagcatgggacaaaagcttgccgtatgctgagttctcttacaacaacagttaccaagctagtctgcagatggcaccatttgaagcactgtatggacggaggtgtcgtactccgctcttctgggatcagacaggggaacgccagttgtttggtacagaagttttaaatgaggcagaagagaaagtcagagctgttagggaaagattgagaatcgcgcagtctcggcagaaaagctatgcagacaaccgccgaagggagctcgttttccaagtaggggattatgtgtatctccgtgtcactccgctcaggggagtacatcgcttccaaaccaaaggaaagttggcaccacgctttgtgggaccatatcggattttggaacgtagaggtgaagttgcttaccagctcgagcttccctccaacatgcttggcatccataatgtgttccacgtctcccagttgaagaaatgtttgagagttcctgaggaacaggcaagtccggatcaaatcgaaatccaggaagacttgacgtatgtggagaagccgactctcgccgtccgcgtttcccgcgcccactccaccccaccccgcgcgctgcgcccacgtcgccgcctctcccccgcctctcccgccctcgcgcgccccgcaaatgggcgggattcgaatttgaatcccacctctacagaataacgcccatctccggccgcgcgccgccgccgctagagtcaccgccgcgccgcgtagtcgccaccgtcacgctcaccgagcccgctgcacctcggccaccattcggttgccgccaatcgtcgccgaagcgccgtttctctcgcacgccggtgagctctccatttccacccaactccggccggccgctctagccgccgtggtcgctctccctacccctaacccctctctgttttctcctagcgtgccgccgccgcccgtccgcacctcggcatcgccggtcgtcgccgccgcttccttccttcgcgccggccgtcgtgctcgccggtgaggaatcccctctcctccttcctttcctctctctcccatgagcgccgccgccctccgcgcgtgcgccgtcgccggccgccgccgtctcccgcgccgccggtcaccgccggtgaccgcgcgtgccgccgccgccgccccatggctggccggccggcttgagccgtgccgagcatgccgccgccacctccctcccttgtgccgctgccaatggggcccacgtgccggcgcccccttcctctctcttgaaccgctgacaagcggggcccgcctgtcggcgcccccccccccttggatgacgtcccgatcaatggagcacgtgccaacagtgcatctgacaacagtccgtccccaccgcccgagaacccaacaattgctcaggtgttggacaatcagactcagatgatgacaatgatgatgcaacagatgcagcaacagtaccatcaggtgttgcagcatccacctcctcagtccaaactgttagaatttcttcgtgtcaagccgcccaccttctcaagcaccaccaacccaatcgaggcccacgactggcttcatgccattgagaagaagctgaatcttttgcaatgcaacgagcaggagaaggttgcttttgctacacaccagctacaaggtcccgcttctatttggtgggacaactacatggtgacccgtccagctggggcagaggttacttggacagagtttcgtcatagtttcaataaagcacaggttcccgagggaattgtggcacaaaagaagagagagttccgttccctgcaacaaggaaccagaacagttatagagtatttgcatgagttcaaccgcctcgcgcgctacgcccctgaggacgtgcgtaccgatgccgagaagcagcagaagtttctgtctggtcttgatgatgaattgactaaccagttgatctctagagattatgaggactttgagaagctggtggataaggctatccgtcaggaggagcactgtaacaaaataaaccgtaagaggaaggcagctcagttcaggactccccaggggaagagtcagaagcctcgtttcacgatgggacgtcacggtggaccttccaccatgattatccggcagcaccgtccctaccacccgggtagcttcaacaagaaccaccatagtagcagtcacaacaacaaggaggcgcagtcagcaccagaggttatattgggcacattccccgtcaactcgacaccggcagtaatattgtttgattttggtgcaacccattccttcatttccaagcgttttgctggtgcacatgggttctctttagtgaaacttaagataccaatgcgagttcatactcctagaggtggcatgaccacaactcactactgcccatctgtgacagttgaaattcaagggttgatttttccagccaacctcattcttctcgaatccaaggacctagatgtcatacttggaatggattggttgacaaggcacaaaggagtgattgattgcgccagccgcaccatcaagttgaccaatgcgaaaggagaagtggtaaccttccagtctccagtgccgcagaagccagggatcagtttaaaccaggctgctggtgaagaacaagaggtagcagtggagaaaaccactaagaagttggaggatattcccatagtcagagagtatccagaggtttttccggacgatctgacaacaatgccaccaaaaagggatatcgagttccggattgacttggtacctggaactacaccgattcacaagaggccttacagaatgggagccaacgagttggtggaagtcaagaagcaagttgatgaacagctacagaagagatacatccgcccgagcacgtcgccttggggtgctccggtcatttttgtggagaagaaggacaagaccaagaggatgtgtgtcgactaccgcgcactcaatgaggtcattgttaagaacaagtaccctttgccaaggattgatgatctgttcgatcagctgaaaggagctactgtgttctctaagatagacctacgatcaggctatcaccagttgaggatccgcgaagaggatattccaaagacagcattcatcactcggtacgggttgttcgaatgcacagttatgtctttcggactcactaatgcatctgccttcttcatgaatttgatgaacaaggtgtttattgaatttctggacaagtttgtcgtagttttcaccgatgacgtacttatctactccaagtccgaggaagaacatgagcagcatcttcggctggtacttgaaaagttaaaggagcaccagctatatgccaagttcagcaagtgtgacttctggcttaagaaagttcagtttcttggtcatgtcgtaagtgctcaaggagtggctgtggatccagcaaatgtggagtcagttaccaagtggaccccaccaagtttggagtttcttaggacttgcgggctattaccgccgttgcgtcctcatgaaggcaactacccgacccacgatctggaattggccgcagttgttcatgctttaaagatctggcggcactatctcatcggtaaccgttgtgaggtagaggaactatgttgtgaggttcaacgtgatttggaacatctgaaccttcgtatagttgagcacggattcgtggctgccctagaggcacaacccacactggtggagcaggttcgcatagctcaagcaagtgatcctgaaatagcagagctcaaaaagaacatgagagttggaaaagcccgaggttttgttgaggatgaacaaggaacaatctggatgggagaaagattgtgtgtacctaaaaacaaggagttaaaggacttgatactgactgaagctcatcaaactcagtattccattcatcctggcagtaccaaaatgtaccaagacctgaaagaaaaattctggtgggtaagcaagagaagggaaatagctgaattcgtcgcactttgtgatgtttgccagcgagtaaaggcagagcaccaaaggccagcaggattgctacagccacttcagattccagaatggaagtgggaagaaatcggaatggactttatcaccggtttgcccaggacgtcatcggggcatgattctatttgggtagtcgttgatcgactcactaaagtggctcacttcattccggtgcatactacctactcagggaaaaagttagcagagctttatttggcaagaatcatgagtctacatggtgtacctatgaagattgtgtctgatcgaggaagccaattcacctcaaagttctggcagaaattgcaagatgaattgggaacccatctgaacttcagcacagcctaccatccacaaactgatggccagaccgagcgagttaataaaatattagaggatatgttaagagcttgtgcgcttgactttggtggagcatgggacaaaagcttgccgtatgctaagttctcctacaacaacagttaccaggctagtctgcagatggcaccatttgaagcactgtatggacagaggtgtcgtactccgctcttctgggatcagacaggggaatgccagttgtttggtacagaagttttaaatgaggcagaagagaaagtcagagctgtcagggaaagattgagaatcgcgcaatctcgacagaaaagctatgcagacaaccgccgaagggagctcgttttccaagcaggggattatgtgtatctccgtgtcactccgctcaggggagtacaccgcttccaaaccaaaggaaagttggcaccacgctttgtgggaccatatcggattttggaacgcaggggtgaagttgcttaccagcttgagcttccctccaacatgcttggcatccataatgtgttccacgtctcccagttgaagaaatgtttgagagttcctgaggaacaagcaagtccggatcaaatcgaaatccaagaagacttgacgtatgtggagaagccgactcgtatcctcgaaaccagcgagagaaggaccagaaacaaagtaatcagattctgcaaggttcagtggagccacctctcaaaggaagaggccacttgggaaagagaagatgagttgaaggccgctcatccgcacctcttcgccagctcttcccaatctcggggtcgagattccgtttaa

SEQ ID NO: 53247 - DNA, 122 bp, Oryza sativa
  Clone ID: PAT_MRT4530_55467C.1
aggccgacgagggatctagcgttatctctgatttcgccgagtacgtattcaaggaggaagactaccccgtcgttgactacgtgttagtgttccatgtcgtcaagtcgacgacgactagatag

SEQ ID NO: 53248 - DNA, 423 bp, Oryza sativa
  Clone ID: PAT_MRT4530_55468C.1
atgccggaggtggtggttgcgcggccgacggcgcacgggtggaggaagggccgactggggaaattccggcaaggcggatggagaggccggcgcggcacggcggtgttccggcgaaaccgagggcaggccggggtggagggtgacgccgcaatgtcgacgaaggatacggcgacgtcggccgacgctcgggcgcggcgatcggggcgactgaaggcggtacagtggcggcaacgccactgttttgctggcgaggacgcgtctccaggggtctccgcgcgaaacggagggcaggccgggggagaggaggctgctgtgacgacggggaaggcaacggcacagccggccggcgcgctgacgcggcggcagggcggctggaggcggccggcgcgggggaaagagaagggcgaccgcggggaggggtga

SEQ ID NO: 53249 - DNA, 512 bp, Oryza sativa
  unsure (1)..(512): unsure at all n locations
  Clone ID: PAT_MRT4530_55469C.1
cattcatgactcactnataccactctcatcccatcccgccttgccgccggcagcaccgacctgatcccttatttggtcaatatgtctcggcaggagaatgtctacatggcctatctggtcatccaaccatgataggtatgatgatacggttgatatacctggataaagcagcatacactgctgatgcaaaatatctcattgatgaggagagcatcctatagattgttgcttacaataatgcgctaaggaacccgcctgccctacagtggtctagtcttatccattgaacaacccgaggaaaggtcgaggcaatctacaacatgtatctcataacaaagagctccggggctaaattgactctgtgctgatcatgatttgcaactgtccctctaaatgctaggctcacacctctgtgccctgatcgactgctagtagactctaaggtgtgccacctgacatattaaggggcttttccacagagcctcttgcacaatttaagactgttgcctcta

SEQ ID NO: 53250 - DNA, 1029 bp, Oryza sativa
  Clone ID: PAT_MRT4530_5546C.1
atgccgttgctcgccatgtgctcgctgccgtcgccgcccgagctccgaaatgctctcaccgccggagatcgacctctcgtggcctcgtcgccgtttccctcttctcccgccgccggttgccgccgccgcaatccgccgccgccgagcaacctccggcgaatccgagccgttggctcgtctcctctcgtcccgtactaccgcccggcgtgctcgccttcgccggtatcgccgtggcccgctctaccgctcgccgccgtcgcccgccgttcatttgcggccggtcgtcgtctacctcctgccagcccacgtggccgccacgtaggcgccacgtcggcgccagctcggctgagctcgggacgggccgaccccggccgatccctccccgggagccttgatgccgagagacatgtggattcgccggggtggtgtcggggaggacccctgggcttcctggcacagtatggtctgggacctaacctgttgttggtctgggacccctctcgtcggcatatggcaaacctgcatcggctttcgaaatgccttgtcatgaaagcttggaggtctcccgacgtggctgatccccacgggctgggtgacccggccgtgcccacggtcatgggcggatgtgagcctccaacctatgtctcatggaagcccgttgccggcaccgcttctccttcgctgacggggctttgcctctacccccgccggtgcaccgagccctcctccggctccttctctgccgatggcctcccttgcccgagccatcaccggcctgccaccggcaccatcctctgcgtcctcaggtggagggtgggcccgccctccgccggtgccaaccttccgctcttcactcaggatcgtgtgggctcggggctcgtcgtcatcagtgccttcaagcccgtctccgtcaccagacaccaaattctatccatcaagccgctatggacaactctcatccctgcgccgttgttccaggccacagcctcggggtgctggactcgccgctactccgtccaccttcactga

SEQ ID NO: 53251 - DNA, 334 bp, Oryza sativa
  Clone ID: PAT_MRT4530_55470C.1
ataaagacataaaaacggggctttcatatattcaactcgcatatacctcaccaaactgcatattgcaacatcatattccactcttacatatactattacagagttcaagtgatacatatgcataaacaaaccatgccattaagaaacaaagaccaatctcaatcttataacacacagaacaagctctgagacactatataatcacacctgaacaatttaacactgctatcactcacgaaccctgttttttttgcagcactatacacttatcaatatggctcaaatgctatgcaccacataagctgcacctgtctaacgctgggaagccatgcat

SEQ ID NO: 53252 - DNA, 491 bp, Oryza sativa
  Clone ID: PAT_MRT4530_55471C.1
cccacgcgttcgcttatcccagccgtcgtcgccgcaggctcatcctctagtcatgtgcagtcctttacttcaagtcagatacctgattaatgaaaccatggttaaggagaagagcacaaagcattgtggtccttggtcacgtcgactgtggcaaggcgaccaccaagggccatctcatctacaagctcggaggcatcaacaagcgtgtgatagagaggttcgagaaggacaccgctgatgatgaacaataagtccttcaagcacgcgtgggtgctctgacaagctcaaggccgagcgtgagagagggatgaccatcaatattgccctgtggaaggttgagaccaccaaggactactggacggtcatcgatgcccctgagaacggcgactttattaagaacatgatcacaggtacctcccacgctgactgtgccgtgctcatgattgactccaccaatgggggttttgaggctggtatctccaaagatagcc

SEQ ID NO: 53253 - DNA, 147 bp, Oryza sativa
  Clone ID: PAT_MRT4530_55472C.1
atggagaaaagactttcttctgagaaaccagagaaaggacagcagtattccttgctgctacagctgcccctggtaggggacattcctgacctggggttgatcgacggggacgtcgatctctctgggacgttcctggcctggggttga

SEQ ID NO: 53254 - DNA, 676 bp, Oryza sativa
  Clone ID: PAT_MRT4530_55473C.1
ggagagaactagtcttgagtttttttttttcggctcgcggctgaaattttctgttttttttaatcgctgctgtctgagaacataaatgccagcaactaaacacaacatgatacatacacttcagtatcaagtgttgaacaagagtcaagaatatggctgaaaaaaccacaatgcttctcacaaggtggacaatgatagcaatggctccctctactaatacatttctcacaggctacatctacccagaataacatcattgaaaattatagtttatctaagatccctagtacttttacagccttgttagaccttgatcaatggcttccctagccatggtcacaacttcctggagcttcaaactctagattttccatcatgagctcatcatgggtatgttagaactttgaaggagaggagatcgatcgatcaattcttcctgcattacgcgtcgatgaaatggatatcaaaggtgttggggtggatctgccaaacattcagggaagcatactcctccaagcattccttcagttgagcctcgctgtaaccctttctggagatcaagttaagggcatgagcatatctgacatccatgctgttagttcttgcagcttcatctctcagaatggaatatatgtcagaaatcgcgtccaatccagaccgctggcggtcatctgag

SEQ ID NO: 53255 - DNA, 1416 bp, Oryza sativa
  Clone ID: PAT_MRT4530_55474C.1
gcccggcccgaagcggctcgggacgcggggggaatggcgtcgtgggaggagatggcgtcgtgggaggagcagctgcgggacgagctcgccgcccgagacctcgccgtcgcctccgtccccggcaagggccgcggcctcttcgccgcacgcagcttcttcccaggagaagtcgttatttcgcaagagccttacgcttctacaccaaacaagatttctgtgggctccaactgcgacaattgtttcgcctccagaaacctgaggaagtgctccgtttgtcgagttgcttggtactgtgggagtgcgtgtcagagagaagaatggaagcttcatcaacttgaatgtcgagcaatcgccgcgcttacagaggatagaaagaagatgcttactcccacaattcgtttgatggtgcggcttgtacttagaagaaaactgcaggatgacaagatggccaatcttgtccaactgattcttccttcattcgagcttgatcttaaggaaattacacataccttttccaagtttgcctgcaacgctcataccatatgtgatcctgaactgaggccccttgggactggactataccctgttttatctattattaaccacagttgtgtaccaaatgcagttttgatatttgaaggtcggacagcatatgttcgtgcattgcaacctataagtaaaaatgaggaggattctgaggaagatgcgctccttgagggatacagatgcaatgaccaaaagtgtgatggatttcttctgcctaatgcagtagataacagtgaggtaggttctatgtacaagaccattgaagagctagagcggaagctttaccatcctttgtcaatcactttgcttcacacacgggaaacactcttgaagatatatatggagttacaagattggcagactgcattgatgtattgcagattgacaattccagtttatgaaagaatttacccaccttttcacccaatgattggattacagttctatacttgcggaaagcttgaatggttgcttgagtacacagaggatgctctgatgtctttaaccagggcagcagatatacttcgcataacgcatgggactaaatccgagttcatgaaggaacttttgggcaagctagaagaagtaagggctgaagcttcttttaggctctcggctggagatgaacaataattgagtaaccattttattgtgaagctccaggtcatcgtgatggcaaatagaatgtaacaatgttgcaacaatgttcaaataggatagtactaagtagacaatctctaaatttagaatagctttgttaattcaacattgggatataagctgccctgaagggctcgcatcgggacaagaactgtgaactggtgatatggaaaattcattgttcacctataaagtgtgggttttaacttc

SEQ ID NO: 53256 - DNA, 2265 bp, Oryza sativa
  Clone ID: PAT_MRT4530_55475C.1
ccccacgcgtccgccttcgcgtctagcgccgcctctctccacctccctcgtttcgatctagctcgccggcggcgatgtcgcagccggcggcggtggccgctggggcggcggcggggcagcagccgcagggccgggcgcaggcggcgaggcaggcgggcggcggactggggcagaccatcgccgggatcgtgcggatggccgtgttctggtacttcgccgccaagttcttcggcccgaagcggcccccggcggagccgggcatgctcatgtccaacctcttccagaagggagagccgctggatatgtggatgtatttatcagaaaatgagaaattcaatgacttcagtaatgaggatgcactcgtctggcatgaggcaaacataccatatgcagtctggggacctaccagtacgagaacgcacacattgacatactatccttctgaggctatcaagaacaatggttctttgtatgctcatgtttattttgcccgctcgggttaccctgtggatcctactgatcctgaatatgagcaaagttctgcatttggcaggacacaccctgttgtggcttacttgcgaaaaccaaaagatggtaaaaagaagagcttgctgggagattcaagtgaatctaatgaacaaccaccacctaaggagaataaagattctgtagacaaagatgagggcccagttgaatatatttcttattggaaaccaaatgtaacaataaatcttgttgacgacttcacacgaaatacagatttgaatgttgatccatcttcaaacaactactacccaactgtattcttcaatgagttttggctactgagagataaattgatagcactcaatgagactgtggaggaactgcctttgaaccttgaagttggtcctattagcatgaccaagtggcaaatatttcttcagatggagcagtccttccaagttcatcgcagttatggaagtatgcttgaaggggaggctgatgagctcaagagagttttccttgaaggaaatccatactttttgggattgaccatgattgtttctctgttccactctctgtttgattttctggctttcaaaaatgatattcagttctggaataagaacaagtccatggaaggtctatcagcaaaatccgtggttctgaactttgtatgccagctgattattttcctctacctgctcgacaatgagacttcatggatgatccttggtagctctggaattggtgtttgcattgaattttggaagattggaaaagcaatgcatgttgagatcgatagaagtggaaagattcccatgttgaggttccgggaccgtgaatcatatgcacagaataagacaaaggagtatgacgcaattgcaatgaagtatcttacatatgtacttctcttccttgtgttctgtttctccatctattcccttaagtatgagaaacacaagagctggtactcatggatactctcttctctcacaagttgtgtgtacatgtttggtttcatcatgatgtgcccacaactattcatcaactacaagctgaagtctgttgctcatatgccatggaggcaaatgacctacaagttcctcaacaccataattgatgaccttttcgcatttgtgatcaaaatgccgatgctgcatcgtctctcagttttcagagatgatgttatcttcttgatatacctctaccagagatgggtgtacccagttgacaagaagcgtgtcaacgagtacggcttcggtggggaagacgagccacaagctccccagacattggaagggagcgatccagcagctgcatcccagcaagccggggctgaggcggaggccgagacgagcacggaggacaagaagacgaagtgagcccctcctgctctgcacctccagatcatccaaccacagaacacatctcggctgccaccgggcgtaaattttctgtgccgagcttggaacgctggactcgcctcacccgtcgctgaatgctgctgaccataagagattgtagtaacaggctttgagtgggcgcatcgacgaacacacatacacttgcccaatctatggacgggcaacatcgtcaaacattatcgccactatttcccagtttgtcttaatctttttttaggtaacaacaaccaccaccattaccagatgtcgataacgatgcactagacgcgtattttattggtttatgtataagttttgcattggctgaaaaaaaaaaaaaaaaaaaaaaaaaaaaaaaaaaatatagaaaaattag

SEQ ID NO: 53257 - DNA, 455 bp, Oryza sativa
  Clone ID: PAT_MRT4530_55476C.1
ttgacgcgtgggttgtggcttacttgcgaaaaccaaaagatggtaaaaagaagagcttgctgggagattcaagtgaatctaatgaacaaccaccacctaaggagaataaagattctgtagacaaagatgagggcccagttgaatatatttcttattggaaaccaaatgtaacaataaatcttgttgacgacttcacacggtatccacacaataatgttccacccaatgttgctccatatttgaatgttgatccatcttcaaacaactactacccaactgtattcttcaatgagttttggctactgagagataaattgatagcactcaatgagactgtggaggaactgcctttgaacctttgaagttggtcctattagcatgaccaagtggcaaatatttctttagatggagcagtccttccaagttcatcgcagttatggaaagattgtttgaag

SEQ ID NO: 53258 - DNA, 583 bp, Oryza sativa
  Clone ID: PAT_MRT4530_55477C.1
gcggtggaagaggcgacctcggtgcgtggtggagctgccggtgggtgcgaggcggcatcgccggaagcagcggcccgtggctcgcggtctgcccgtggcccgtgtctcgtgccggcggtcaagtacacacagagccccgaggaggagttcgcggaggacatcgacgacgaggaggaggcggtgtcacgccctgaaattcccgaatagaatttcaagaaaaacgtgcattaaaacccctgtctaggtccggccaaggcatcctcgacagcacagacgaagcctactcctcggagaaaccaccatcggaagcgtacttgaactctgagggttgggagatagagcaagactcagtactacccactgtactcagcaagtcataccagaacggagggaacttcgacgactatctcgaaaccctagcgatgtcagcacaagggggcgcctacatgcgggccccacatgtcatcggctcggggacgccggtccacggtggaccgagtccacggtatcgggagaggggatcgccacgtggcgcacacgtggcgccgacgtggcggccacgtgggcttgccacgcgggcggt

SEQ ID NO: 53259 - DNA, 515 bp, Oryza sativa
  Clone ID: PAT_MRT4530_55478C.1
gagcatttcccatctctcccactccttccgccatggccgactaccaccgcccctaccggagcgacctcgacctccgcccaccgccgccgccgccgtcctccgcctccttcccgcactccaacggctactacctcccctcctcctcctcctcctcccccaccgccaacggctacttctcctccaagggcaccggcggctttgcggccaacggcgaccggcggatcgagatctacaccacggcgccgcccccgccgctgccccctccgccgcgcctcgcgctcccgccgccgcccgggaggcgggacggctacctgggaggtggcggagcggggggtggcggtggaggaggcggaagcggtggcatgtggtgcttcagcgacccggagatgaagcggcggcggcgggtggcgagctacaaggcgtactcggtggagggcaagatgaaggcgtcgctgcggagggggctccgctggttcagggcaagtgctccgagatcttccacggatggtaaaaac

SEQ ID NO: 53260 - DNA, 972 bp, Oryza sativa
  Clone ID: PAT_MRT4530_55479C.1
gcgtttcatctgctagctctccctgccattccagtcattggcattgttgtttcctgtccactgactcgcagttcatcccggattcttctcctctttcttcgccgccggctagccggtgttcgcgctccggcggcatcagacatgtcgaagaaaatcgtggtgaagctgaacgtgcacgacaaggcggagaagcagaaggccatgaaggccgtctcggcgctcatcggcatcgacgagctgtccatggacatggcgagccagaagatgacggtgatcgggatggtggacccggtgaacgtggtgagcaagctgcgcaagtcgtgggcggcgaccatcgagtccgtcgggccggcgaaggagccggagaagaaggaggagaagaaggacggcggcggcgacggcaagaaggacggcggcggcgatggcaagaaggaaggcgaggccggggacaagaaggacggcgatgcggccaagaaggacggcgacaaggacggcgaggccaagaaggaggacggcgacaagaagccggcggcgccgacggagcagcagctcttcgccgagctcatgaaccagtactaccaccggccggcggcgtacggctacaacccttacatgtccgtgccaccacactacgtcgtgcagagcatggaggaaaaccccaactcctgcgccatctgctgaactcgatcgatgccgccatggctagaggtagtagccgagtacgtacacagcatgtgtagtactgtatacgtctacgtgtacgcacgagttacgacgcaaatcactatgcatgaatgcaagcatgctagctactacatgtccagttacatggttaaaagttgttatatcttactaccgaggtagtaactagttctaatgctgtaattttggtgataaggaagatatgtatgcaccatatgtctgtatatactactctccgtatagtacgtgtcaacaggcaggaaatcttat

SEQ ID NO: 53261 - DNA, 1083 bp, Oryza sativa
  Clone ID: PAT_MRT4530_5547C.1
atggcatcgacgtcacaggctcggggctggtcgtctctcccgacggacgtgctcgtcctgattctggggagtctgcggtggtcgagccacccgagcgtcgcgttggtgtgccggcactggcgctctgccgcgtcgctctgtcccttttacccggcgtggatcactccgctcctgctcaacaccgccgaggttggcaccgccaacatccgatactatagcccctactacgataagaatttcgaggtcgatgacactctcaaggtgcctggcgcgaagatttgctgctccacgggacggcacctcaagatgtgcgcggacaaagccttggtgtatgatatcgaccttgtcaccggcgccctcgttgaagtattgccgcaagaaccttatatgttgtttaattttgtcgtctccgaccgtgatgatgagaggctatttggtgtcaaggcaactatcaccatcaaggttgctagctccattcgacacaccagtgatgagtgggagggctggaagtcgacggagaatcatctctactgtccacggcttcgggcatcaccagtcaccaaccctgtcctccataacggtttgctataccttcttgctcaagacgggaaattggtggtgtataatccttgcaggcctgatgaagggtttgagattcttaacaagcccaacggcttcggattcaaatgtgaagacagctacttggtcgagtccaataaagatgctctcaccgccggagatcgacctctcgtggcctcgtcgccgtttccctcttctcccgccgccggttgccgccgccgcaatccgccgccgccgagcaacctccggcgaatccgagccgttggctcgtctcctctcgtcccgtactaccgcccggcgtgctcgccttcgccggtatcgccgtggcccgctctaccgctcgccgccgtcgcccgccgttcatttgcggccggtcgtcgtctacctcctgccagcccacgtggccgccacgtaggcgccacgtcggcgccagctcggctgagctcgggacgggccgaccccggccgatccctccccgtgcgcgcattccaccgcaagccgtga

SEQ ID NO: 53262 - DNA, 2067 bp, Oryza sativa
  Clone ID: PAT_MRT4530_55480C.1
ccccgcgcagcagctcagccgtcgctaccaccacctcaagctcccgcctcgcgtgcagctagctgagagcgagcgctcgccatggagaacggcgccggcgccggggacgacgagtacacgcgcgacggctccgtcgacctccgcggcaaccccgtcctccgctccaagcgcggcggctggaaggcctgctccttcatcgtcgtgtacgagctgttcgagaggatggcgtactacgggatcgcgtcgaacctggtgatctacctgacggagaagctgcaccagggcaccgtggaggcggccaacaacgtcaccaactggtccggcaccgtcttcatcacgccgctcatcggcgccgtcgtcgccgacgcctggctcggccgctactggaccttcgtcgccggctccgccgtctacctcatgggcatgctgctgctcacactggccgtctccgtgccagcactgaagccgccgccgtgcgacggcggcggcggcgccgcctgcccgcgcgcgtcggcgctgcagctgggcgtctacttcggcgggctgtacaccatcccgcccgccgacggcggcccgacgccgtccttcctgtccttggcggccgaccagttggacgatttgccgcgctcagaagcgaggtacaggtacaaggtcgagtcgtacggagacgatcgacactcccccgtgatcctcttctccaccaccgtcctcgtctacctccaggacaacgtcagctggaccgtcggctacggcatccccaccctgggcctcatggtctccgtcgccgtcttcctctccggtacgccgctgtaccgccacaaggtgccccagggtagccccctcgccacgatggggagggtcgtcgccgccgccgtgtggaagtggcgcgtcccgctccccgccgactccaaggagctccacgagctcgagctcgagcactacaccacccgccgcgggttccgcatggacgcgacggtgtccatggcgttcctgaacaaggcggcggtgaagccgggcgaaggaggaggaggatcggtggcgcggctgcccgggtggacgctgtgcacggtgacgcaggtggaggagacgaagcagatcgtgaagctggtgccgctgctcgccacaatggtggtgccgtgcacgctggtggcgcaggcgggcacgctgttcgtcaagcagggcgtgacgctggaccgccgcatcgggaagttccacgtgccgccggcgagcctcggcgcgttcgtgacggcgacgatgctcatctgcatcgtgctctacgaccggttcctcgtccccgccgtgcgccggcggaccaagaacccgagggggatcacgctgctgcagcggatcagcctggggatgctgctccagatcgtgacgatggtggtgacgtcggtggtggagagccagaggctggggtacgcgaggaggcacgggctggtcgccaccggcgggcagctgccggtgacgatcttcatcctgctgccgcagttcgtgctgctgggcgtcgccgacgcgttcctggtggtggggcagatcgagttcttctacgaccaggcgccggagagcatgaagagcctcgggacggcgatgtcgctgacggcgtacggcgccgggaacctgctgagcagcgccatcctcgcggccgtcgagcgggtcaccggcggcggcaaggggaggacgccgtgggtgaccaacaacctcaacgcctcgcgcctcgactactactacgcgttcctcgccaccctcgccgccgcgaacctgctggcgttcgtcgtgctcagctgcaagtactcgtaccgcgtcgagtccacggagaccatcgacgtcgacgtcgccatggacgacgtcgcgcagggcggcggcgtggtgacggtcaaatcagaggcagccccaatggcatgacagcacttccggaattgtatcctgtctattcccgtctggattctgaagttgcaatgtaatgaagaaacggtgatgatacatattagcactttaaaaatgttaaatgaaaattttatttactcgttctgtaaaggaacggtaatacggaccaaaaaaaaaaaa

SEQ ID NO: 53263 - DNA, 783 bp, Oryza sativa
  Clone ID: PAT_MRT4530_55481C.1
ggttctttatcgagcttatcaacaaaagcatgatccagcgaatagaagacacatactaccttggcactattagtggttgtcacatccatgacatggtgctggacctcatccgcatgtcggcaaaagaagagaactttgtaaaaatattggatagagcacatgaggagcacaactcatcttcgcattgcagatcagtccgtaggctagcactgcataagagttggaaccagcataaaaacaataatccggcgatgggcatggagcagcagctgaggtcattcaatgccattgagtgccctattagcatgattcccctgcctgcgagattccaggttctacgtgtgttagcgctggaaggttgtgatgtcacaggaggctgtaaactgaagcatcttgggaagctgcttcagttgaggtaccttgggctgagaaatacacgtgttgttgagctcccaagcaaaacactgcgggatctcgttcacctgcaggtactggacgttagggacactgacttggtggcactgccagcgacagttagcgaactaagccaattgatggccctgcgctccaacggcagcacaagaatgctggccagtgttgggaagctgacgttcctgcagcaactgcagctgagcctatctgccgagagcttgcgaagtttcgctctggagctgtgcaaactgaccgacctaaggatgctcgagctcgacattgatgtgtttgggatcgagatggttgagcgcacggcctccctcggcgctctggtggagtctatccacaccc

SEQ ID NO: 53264 - DNA, 2208 bp, Oryza sativa
  Clone ID: PAT_MRT4530_55482C.1
atggatgaagtcgggcgtcgatggacattctccagggcaaatgaaggctacacgagctgcggcccggtagtcgagatgtcatacggcggagggttggtgcccaatgctaggggctcagttctgcctgcctgtcccgggtatcccggccgtaggcaggattgggtcggtactcttgtctaaggctaggatgggttggaaactatgtcacatctttacgacgggttccaaggccatggaatgcggagtaaagatgtgtcttgtgggttggcctgggttggcttgggacgagctgggacccaggtcgggttgccagttcggtccaaatcatcgtaggccttgggttaaggcagtactagatggtcaggtcagtgaagaagaagacatcgtcagttgtttgccgaagctccggaagactgcaggatccgctagcgaaatggaggaagtagtgaagccagctgttcataacagcaaagaagacttagatctgttaaggtcctatccttagtttctaatctgtctctcccctttgttttccctctctccctctccaaacctttgcaacagatggctgacaatgagaaaggcaataaggtcagaagtcaggacattggtacttcaagctcccgagtgaatgaagcaccagacaccagttgtgtgacactagtccaacacctggttaaccagaaccgattgcttatagagatactacagcagcaccagacgccaattctgaacttgagtcaaatacaacctcaagtgcagttggaggcagtccaagcactcacaccacaagtcagcgcaccgccaacatcccagaaggcccctcatgccatgccacatgttgacccaaaagaagcaagtatcatctgttttatgtgtgatgagcaagggcactacgcaaggaactgtcctcagcagaaaagaaaagcaccaatgcgaaccgaagatgaagtccgtaagatgatcattaccagcacagaatggcctccaccaggaatgacaagacgtcagagaagaaataccttccgaggtgcaacacagttgacagagcatcttttagctaatggaggtagagtgtctggtagtgaagattcagatcaagtctcctccgatgatgaagatgagaagtctccccaaggttttaaccagaataaaatagaacttaaggcatgctctcgttgtggagaaatcggtcatgttgccagctcgtgtgcctctacatgcgttcattgtgaggaagaccatccacccgacaggtgtccaacgagcaggatcacttgtttcttttgtgaaggaactgatcatgtaccaaaagattgtcaattcagttttctgctgacgaagaagatggctaaccaacccgccagttccaacggagagaagcatcaaggcaacaccaatcctcgccaagattacagtttcagcctaactccagtgccaggacagaggaatcgaaatgagaaaagaaaatgccgagtccgggaagacatctgttgcttcaattgtcaaggaatgggtcatttcgccgacaagtgcccaaaaccgagaaacatagctgccagcacgtcagtccacgcaactccctgcaatcagaagcttgctcctcaacgaattgtcatccatgcatcccgaagcagtcctatagcccgcgttgcaacagctccaactccagcgagtgcattaccacaaggtgtcaatgctcaatttcagccccagccatcagttgacaagacagaggccagtatcggcattgtacctttggatgttccagcacagcagccaagaaatcaagtacaggatgaagaacccaagcgtaagaaagttatttacaacggtagtacctgttaaggaagcagacgtgccaatcgccaagtggtcactggagcaaatgcagtacccatggtatcctagtaatgacaagctgatatcgacgcataacatgaagtggtaacttgtatgaggttgaccccaaagatatgagctatgcgaagttctggaactgaagccccatcttcaagtgccgcaacccagtcgaagtcagctaaaggttcaaccagggacaagtcaggtgaagagaagattccatctgcaacaggagatcgagccaagcagtccagagtggagaagttgtgctaggcaagtttgttatagaagacggagcggaagaagtcagacaagaagagaagaccgcccaacctatcttcttgc

SEQ ID NO: 53265 - DNA, 297 bp, Oryza sativa
  Clone ID: PAT_MRT4530_55483C.1
atggcgaaccacggcgccgcggctctcgcgatcatcgcgtccctcctcgtggcggtcaccctcgccgacgcgaggctcaccgcgcaccacggttacgtggtggtggaggatgtgaaggcgccggtcccggcgctgacatgcaacaaggtgcacggggtgcaggcgtccgagacgtgcttctccgtgtcgcagagcgccgggctgactcaggaccagttcctcgccttcaacccaaacatcaactgcgcgaaggtcttcgtcggccagtgggtctgcctcgacgctgccgccgcttaa

SEQ ID NO: 53266 - DNA, 1955 bp, Oryza sativa
  Clone ID: PAT_MRT4530_55484C.1
ttagcgcagccgcctccgcatcgcctttgcgccgtcgccttcgccgccggttgccgtcgccggcaacgcattcgcgcgcgcgccgtcgccgtcgccgcggtcggtcggccggccgtgagccaagccgagccggtgccgctgccccttctctcccgcgccgttgaccagtgggtcccgcgtgtcggcgcccttcctccctctctcgagtcgctgaccggtgggccccgcatgtcggcgccgcgcccccgtgctgacgtcagtcccttgccgctttctctccccgtcggaatcaagctcgcgcccgtcgtcctctctctccgccgtcgccgccgagcttcggttcgccgccgtcgtcgccccggccctcctcccgcttcggcatcgcctccttcggcttcgccgcgtcctcgtcgacctcgtccaccccttcgtttcgcccgccgaccgccggaacgccgccgtcctcgtcgacccgagccgcgccgccgcctctctccgcttcggtcgccgttcccgtcgtcgccgtcgacccggggtgagccgaggaccgccatttcacttcccccttccctcccctctctcgggcgccggtccgtcgcgccggaggtcgccgccggcgaccatcggggcgcgggcgcgtcgcctcccgtcggccatgccggcgaggccgccttcgggcgcgccccgcggctgccatgtggggcccggccgtcagccgcccgcgccctcgggtgcggctgacgcgtgggacccacggcgccggccggcgcaagccgcgtgcacccggtccaccgtggacccacctcggccatataaggaccggtcttcgggcctctgttgcaaagcactaccgtacttccacatgtctagtgggtaaggcatactttgtggctcagtctggtcgtgggcaaaagtacacggatagagatggacaaagttggggtccgatggacatctctagggcaaatgaaggctacacgagctgcggcccggtagtcgagatgtcatggcacagggctggtgtcctgctgctaggggctcagtcctgcctacctgtctcggaggttccagccgtaggtggggttgggtcggtactcttgtctatggctaggatgggttggaaactatgtcatgtcttccgtccgtatgccgtggtggttcatggctatgtgggtacctacctcgctaacatggtggttgaggcatccggaggcacaacagatcacgcctgtcaagaggcagcatacctgatgatggccagactatgggagcgccacaactacatcttctgcaacacggcgtaccggtttcaccctcgtcgagcaagtggcgatgacgtcagtacctttcgtccgacagccggcgagaacgacaccacctttggtcatatgtgtgccgtgatgagggtaatggacaggatgcactcggatctgcgcaaggcgtctaaggccttgaatgatgggaagctcgtgaggatcatagctctgaaggatgagatcgcacgcctgaagaaggagaatgctcagttgaagggtctccccattcccggaggagtccggatccgcaacacgccccgcaagtcgacgacggcacccgtgcgcattcagcttgtgcccaggaacccacctccgcccgcagttcccgcagttcccacagttcctgcagctcctgcagctccagctccagtcccagctcctgttccagtgtcagctcccgcgtccgctctctccttcgctccagcatcagccgtcaggggtccagccagtggcaacgggggttggttgcctgctactcccagtggcaaccgcgaccacagcagcagcagttcaagtggctcggagctgtgcagcggcgagacgtatctgccagactccaggagccgctcagagggacctggtgacgagcaggaggacgccttcgactccaccgaccgcaggagccgttccgagcattag

SEQ ID NO: 53267 - DNA, 2102 bp, Oryza sativa
  Clone ID: PAT_MRT4530_55485C.1
cccccttacaagaatctcgtcccggagattcgaggaggctagcatgaagatagctgacttcgactgggttgcggcacttgaggatggggcttcagttccagaacttcgcatagttcaaatctttggagtcaacctcatacaagttacccacttcatgtcatgtgtcgagatcagctcgtcattaccaggctttcctgctctccgagtgccagctacttctgctattcgatgcaaggagaacggtcttctgcttggtatcgccctcctgagattgattgccctttgctcggcctggagtaggtcggggagagacacaacttcttccatcgacaacaattctttgctgaggctgtcggtgcagagaatggttggtgctgaaggtattattgctatgatttattgcagagtcaggtggagcaggaggagcattggtgttgtggatgatattgtcgatgttgctattggagctgactagctgatgagacaaccgtagggttgttcgttggatttctgcggtcttggtcaacaacacactgagttggcaatccttgggcacatggtttgtaccttcgcacagaaaacatgtcaccttgcgggtgggacattcacctggtggatggtcttcctcacaatgagggcagagtgtaagacacatgctagcaacgtgtccaatttctccacaacgggtgcatgcctttgattccatttcttcctcgccgagatgtcggggagactcatcttcatcatccgaggagacttgatctgacccttcactatcagatactctgccaccatggcttaggaggtgctgggtcaactgtcgtgcacctcggaaggtatttcctctttgatgtctaggaatagttatccctgctggaggccattcggtgctggtaatagtcatcttacgtacttcttcttcagttcgcatcggtgcttttctcttctgattcttactcttcttgcctttggcttgcttagtacgtgaccccacgtggtacgaaaggctaggaggaaagcaattctcgggattcaatggattctctccattgggctctctacttggcacactaggctgcaagcttgacttggtgcgaggaggctggtttagcgatgcctgccctgctaaaccaaaggaaggagcttctttggcatatacccatggacaattcagggcatagtgtccttgctctctacaatcgtgacaaaaggggacatcctcttctggcattggaagctcatcgacctgggtggcaaatgctcgatcaaacacatactgattttggtcttgacttccaaccaatggtagctgtgaaccaagcagcatgctcggaatggaccaagggtgtgccctggttaactctcttgaggccagtggtggattgagttgaaaacttgagttacttgaggcatacccgctgacattctttcctttttctctgttaaacatctgaccatctagtactagttgaaatttgaagaaggaagaaaagggtaaacctgccttaacccaaggcctacgatgattcagaccgaactggcaacccgaccctgggtcccagctcgtcccaagccaacccaggccaaccattccacattttagcaccacggtatacggacggaagacgtgacatagtttccaacccatcctagccatagacaagagtaccgacccaatcccacctacggccggaacccccgggacagatgtccatcgacccccgacatcttccatctccatccgtgtacttttgtttataaccggactgagccacaaactaagccttacccactagacatgtggaagtacggtagtgctttgcaacagaggcccgaagaccggtccttatatggccgaggtgctactatcaaaaccatgcaccccgagcccagcctaaaaccattttgagggattttgaatagagggggagatgatgtgacttgccttgctcgctttcccaaacgtcggcttcaacttccacgaagagcggatcttccgaagctgcagcgtctacacgaccaacggaaaagaaaaggcttttactctaataaactccatataacaagcaggaacaaagcacaaaaatgggttcttgacttct

SEQ ID NO: 53268 - DNA, 11647 bp, Oryza sativa
  Clone ID: PAT_MRT4530_55486C.1
atggtgcgctgcggtggattgtgttatgcaaggggtattgtcacagctcctttccgagctcctggtttggaatggtatattcctggtttggagataggactgtgcagccgggatgattgttcagaatggttgggcctatacaacaggatgccgcgctacaagcctgagtacttgtttggtgttgagggatttgtccaggagttgcgtacaatgtcctttgccataggatttgggactgcccctttttatgcccagattcctcatgatcgtcacgaagagaagtgccgagtcaaagtcaccttgaacagtaatagtgaagatatcccctcagtgatgttcgaagctggaggaagaaactacatccatgcatgtcaggaggtggcaaggatcgccataggagagctccgcgatcgctacagtgatcagttggccgacactgagtatcgctaccatcctcgtcaaccacagggaagtgaccgtggcagctaccttgagactgaaggaattgagaatgatgctaccacaaggcatttggttgagatgctgtgggctatggatgaaacccgtgcggagaccgtgttagcaggtcaagatcgtgaagatcggaatcgtggtaagatttgcaagctagaggacaaggtggatcgtttggagaaggaactagccgcattaaagggagaagcaccaccgcagaaggccaggattcatcttaccgcaaggaagagagctctatttgtccctcgctaccaattggcgccaaaggtccgtgtggtggagaaagaagttaccccagccccagcggatcctccggtcgtcaataacaagttagcagaatttcttcgtgtgaggccgcctattttctctagcaccactaatcctgttgaagctggtgattggctgcatgccatagagaagaagttggatttgcttcagtgcactgatcaggagaaggtctcatttgcatcacaccagctgcatggccctgcctctgaatggtgggatcacttccgccttaacaggactactgctgaacctatcacttggcttgaattcaccgctgctttccggaagacgcatataccatcgggagtggtgtctctcaagaagaaggaattcaggtcgctcactcaggggtctcgctctgttacggagtatctgcacgagttcaatcgtctggctcgttatgctccggaagatgtacgcactgatgaagagcgccaggagaagttcttggaaggacttaataatgagctttcttatccactcatgactggagattatcctgatttccagaagttagtggataaggctattcgccaggaggacaagtacaaccgcatggagcaaaagaaacgccggattgctcaattcaagacacaacaggggaataatcagaggccgcgtcttactttaggaccccagtccatgccacagggaggttcttcgtctgttgttcgtccgcagtgtcagttcttaaacaacaacgcagtcaacaacatccgcaatcaagctccacgtccagttgtagcctcgacgcagcaacaacctgccaagagggagcaaggcagcaagcccgtggtgtgtttcaactgtggagacccaggacattacgctgacaagtgtccgaagccccgacgcgtgaaggttgtccctgctcagagcaactctaccgcaccagcatcaaaggcccgtgtcaatcatgttgctgctgcagaagctcaagatgctccagatgtgattttgggtacgtttcttgttaacttagttcctgcaacagtgcttttcgattctggtgctacacattcattcttatctatgagttttgcgggaaatcatgggatggaagtagaaaattttagacgtcctatgatggttagtaccccaagtaatcaggcactctatttgcaacgtagcccctctgtcagaatagaaattcaaggcataccatttctggccaatcttatcctgttagaatccaaagaccttgatgtcatcctagggatggactggttagccagatataaaggtgtgatagactgtgctaacagaaaagtaactctcacgagtgatgatggtcgagttgtaactgttcatgcattgtcttctgagtctttaaggtcaagactgaaccaaataactttggaagagattcctatagtccgggagtatcctgatgtgttcccagatgatttacctggtatgcctcctaaaagggatatagagttcagaattgatttggtaccaggaacaactccaatccataagagaccttatcgaatggcagccaatgagttggcagaagtcaagaggcaagtggacgatttgcttcagagagggtacatcagaccgagttcatctccatggggagctccggttatttttgtcgaaaagaaagatcatacccagaggatgtgtgtggactatcgtgcactaaatgatgtgactatcaagaataagtatccgctgcccagaattgatgatttgtttgatcagcttaaaggtgctaccgttttctccaagatggatcttcgatcagggtatcaccagttgagaatcaaagaggaagatatacctaagacagcttttaccactaggtatggattgtttgaatgtactgttatgtcttttggacttaccaatgcccccgctttcttcatgaacttgatgaataaggtgcttatggaatacctagacaagttcgtggtggtctttattgatgacattcttatctactcccgaaccagagaagagcatgaagaacatcttcgctttgcactagagaagctacgagaacatcaactgtatgccaagtttagttgtgttctgatgcaagatgggaaggtggttgcctatgcatctcgtcagttacgcccgcatgagaagaactaccctactcatgatcttgagttagctacagtagttcatgcgttgaaaatttggcgtcattatcttttcggtactcgtacagaggtgtataccgatcacaagagtttaaagtatatctttactcagccggatctgaacatgagacaaaggagatggctagaattaattaaggattatgacatgggaattcattatcacccaggaaaggctaatgttgtagcagacgctcttagcaggaaaggctattgcaatgctacggaaggacgacagttgccattggaattatgcaaggaatttgaaagattaaatttggaaattgtcagtagagctttcgttgcagccttagaagcgaagcccactctaattgatcaagttagagaagcccaaattaatgatcctgatattcaagaaatcaagaagaatatgagaagaggaaaggctatcggtttcttggaagatgagcaaggaactgtatggttgggtgagagaatctgcgtccccgacaacaaagatttaaaagatgcaattctgaaagaagctcatgatactttatattccattcaccctggtagtaccaagatgtaccaggatctcaaggaaagattttggtgggcaagtatgaagcgtgaaatcgcagagtacgtagcagtatgtgatgtttgtcagcgagtcaaggcagaacatcagaaacccgccggtttattgcagcctttgaagattcctgaatggaaatgggaggaaatcggtatggatttcatcactggtctacccagaacgtcatcaggccatgactctatttgggtgatagtcgacagacttaccaaagtggctcatttcatcccagtaaagacaacctattccggaagtcggttggccgaattgtatatggcaaggattgtgtgtttgcatggcgtccctaagaaaatagtgtctgatcgaggcagtcagtttacttcaaatttttggaagaagcttcaggaagagatgggttctaagctgaactttagtactgcttatcatccgcagacagacggacaaaccgaaagggtaaatcagattttggaagacatgttgagagcttgtgctttagacttcggtggaagttgggataggaatctaccttatgcagaattttcgtacaacaacagttatcaagctagtcttcagatggctccttacgaagcactgtatggtcggaagtgccgcactccgcttttgtgggatcaaacaggagaacgtcaggttttcgggacggacatcctaagggaagcagaagagaaggtgaaaatcattcaagaaaggttgcgtgtggcccagtctcgtcataagagttatgccgacaatcgtcgtagagatctaagttttgacgaaggagattatgtgtatcttcgtgtcacgcctcttcgaggagttcatcgttttcacaccaaaggaaaattggtaccgcattttgtgggaccttataagattgtcaatagaagaggagaggttgcttatcagttggagttacctcaatctttggcaggagttcataatgtgttccatgtgtcgcaattgaaaaagtgtttaagggtacctaccgaagaagctaatcttgaacagatagaagtccaagaggatctgacctatgttcagaaaccaatccgtatcttggaaatagaagagagaagaaccagaaatcgagttatccgtttttacaaagtccaatggagtaatcactcggaagaagaatcaacttgggaacgagaagatgaattgaaccatggattcgaggtcgattcggatcggtctctctcctccgaaccctaacctttccttcttgtcgctggtcgccgtgggccttcgccaccgcctccttgcccctataaaaggatccccaagtccgccgctacccgtcgccacccttgccttcgtctctcgccgtcggaagcgccctagcgccccgtgcttcgccgtcgttccagtcgtcgccgtcgctcggggagaccgccatcgtggtcgtcatcgcgtcgccgtcctcgtccgccccttcgccgtcgctgtagaccgccggagcatcgccgtcgtcgtcaagccgaaggaccccgccgccttttcctcgacgccgccgccgtctgttcatcttccgccgtcgttttggtcatcggtgagttcgccgcgtcgcgctctacgtcgttcgccggcgagcttgcgctcccgagccgccgccggaggtgacgtcgccgctgacgtcatcgggaccgtccgccattccgacgtttccggagagtccgttttcgcaggagaagaatttgaagagttcctaggccagcaaggcaactcctggtttggaatggtatattcctgatttggagatagatctgtacagccgggtatggttgttcagaatggttgggcctatacaacaggatgccgcgctacaagcctgagtacttgtttggtgttgagggttttgtccaggagttgcgtacgatgtcctttgtcattggatttgggactgcccctttttatgcccagattcctcatgatcgacatgaagagaagtgccgagtcaaagtcaccttgaacagtaatagtgaggatatcccctcagtaatgttcgaagctggagggagaaactacatccatgcatgtcaggaggtggcaaggatcgccataggagagctccgcgatcgctacagtgatcggttggccgacactgagtatcgctatcatcctcgccaaccccagggaagtgaccgtggcagctaccttaagaccgaaggaattgagaatgatgctaccacaaggcatttggttgagatgctatgggctatggatgaaagtcgtgcggagactgtgttagcagctcaagatcgtgaagaccggaatcgtggtaagatttgcaagctagaagacaaggtggatcgtttggagaaggaactagccgcattgaagggagaagcaccgctgcagaaggccagggttcgtcttaccgcaaggaagagagctctatttgtccctcgctaccaattggcgccaaagatggtgctcactcgcagcaacaggaatggccccaacaacaacaataacaacaacaatggagagaatcccacacttgcccaagtcctggctcaacaggcacagcttatgaacatgatgatgcagcaactccagaaccagcagaaccagctcaaccaagggaacaaccatgcacctcctcagaataagttagcagaatttcttcgtgtgaggccgcctattttctctagtaccactaatcctgttgaagctggtgattggctgcatgccatagagaagaagttggatttgcttcagtgcaccgatcaggaaaaggtctcatttgcatcacatcagttgcatggccctgcctctgaatggtgggatcacttccgccttaataggactactgctgaacctatcacttggcttgaattcaccgctgctttccggaagacgcatataccatcgggagtggtgtctctcaagaagaaggaattcaggtcgctcactcagggatctcgctctgttacggagtatttgcacgagttcaatcgtctggctcgttatgctccggaagatgtgcgcactgatgaagagcgtcaggagaagttcttggaaggactcaatgatgagctttcttacccactcatgactggggattatcctgatttccagaagttggtggataaggctattcgccaggaggacaaatacaaccgtatggagcagaagaaacgccggattgctcaattcaagacacaacaggagaataatcagaagccgcgtcttactttaggaccccagtccatgccacagggaggttcttcatctgttgttcgtccgcagcgtcagttcttcaacaacaatgctggcaacaacatccacaatcaagctccacgccctgttgccgcttcgacacagcaacagcctgtcaagagggagcaaggcagtaagcccgtagtgtgcttcaactgtggagacccaggacattatgctgacaagtgtctgaagccccgacgtgtgaaggttgtccctgcccagagcaactctaccgcaccagcatcaaaggcccgtgtcaatcatgttgctgctgcagaagctcaagatgctccaaatgtgattttgggtacgttctttgttaactcagttcctgcaacagtgcttttcgattctggtgctacacattcattcttatctatgagttttgcgggaaatcatgggatggaagtagaagatcttagacgtcctttgatggttagtaccccaagtaatcaagcactttctttgcaacgtagcccctctgtccgaatagaaattcagggagtaccatttctggccaatcttatcttgttagaatccaaagaccttgatgttatcctagggatggactggttagccagacataaaggtgtgatagactgtgctaacagaaaagtaaccctcaccagcaatgatggtcgagttgtgactgttcatgcattgtcttctgagtctttaaggtcaagactaaaccaaataactttgaaagagattcctatagtccgggagtatcctgatgtgtttccagatgatttacctggtatgccgcctaaaagggatatagagttcagaatagatttggtaccaggaacaactccgatccataagagaccttgtagaatggcagccaatgagttggcagaagtcaaaaggcaagtagatgatttgcttcagaaaggatacatcagaccgagttcatcaccatggggagctcgagttatttttgtggaaaagaaagatcatacccagaggatgtgtgtggactatcgtgcactaaacgatgtgactatcaagaataagtatccgttacccagaattgatgatttgtttgatcagcttaaaggtgccaccgttttctccaagatagatcttcgatcagggtatcaccagttgagaatcaaagaggaagatatacctaagacagcttttaccactagatatggattgttcgaatgtactgttatgtcttttggacttaccaatgcccctgctttcttcatgaacttgatgaataaggcgtttatggaatacctagacaagttcgtggtagtctttatcgatgatattcttatctactctcgaaccaaagaagagcatgaagaacatctttgccttgcattggagaagctgcgagaacatcaactgtatgccaagtttagcaagtgtgaattttggttgtctgaagtaaagttccttggtcacgtcatctcagcaggaggagttgccgtcgatcctagcaatgtggaatccgtaactaattgaaaacaaccaaagacagtttcagagattcgcagtttcctaggcctcgcaggatattatcggaggtttatagagaatttttccaagattgctaagcccatgacacggctgcttcagaaagatgtgaagtacaagtggtcagaagaatgtgagcagagttttcaagaattgaagaatcgcttaatatcagctcctattttgattttacctgatccaaagaagggtttccaagtgtattgcgatgcatccaaacttgggttaggttgcgttctgatgcaagatgggaaggtggttgcctatgcatctcatcagttacgtccgcatgagaagaactaccctactcatgatcttgagttagctgcagtagttcatgcattgaaaatttggcgtcattatcttttcgggactcgtacggaggtatataccgatcacaaaaggttaaagtatatttttactcagccggatctgaacatgagacaacggagataggtgggaattaattaaggattatgacaggggaattcattattccccagaaaaggctaatgttgtcgcacacactcttagcaggaaaggctattgcaatgctacggaatgacgacagttgccattggaattatgcaaggaatttgaaagattaaatttgggaattgtcagtagaggttttgttgcagccttagaagcgaagcccactctaattgatcaagttagagaagcccaaattaatgattctgatattcaagaaatcaagaagaatatgagaagaggaaaagctatcggtttcttggaagatgagcaaggaactgtatggttgggcgagagaatctgcgttcccgacaacaaagatttaaaagatgcaattttgaaagaagctcatgatacattatactccattcaccctggtagtaccaaaatgtaccaggatctcaaggaaaggttttgatgggcaagtatgaagcgtgaaatcgcagaatacgtggcagtatgtgatgtttgtcagcaagtcaaggcagaacatcagaaaaccgccggtttgttgcagcctttgaagattcctgaatggaaatgggaagaaatcggtatggattttatcactggtttacccagaacgtcatcaggccatgactctatttgggtgatagtcgacagacttaccaaagtggctcatttcatcccagtaaaaacaacctattccggaagtcggttggcggaattgtatatggcaaggattgtgtgtttgcatggcatccctaagaaaatagtgtctgatcgaggcagtcagtttacttcaaatttttggaagaagcttcaggaagagatgggttctaagctgaactttagtactgcttatcatccgcagacagacggacaaaccgaaagggtgaatcagattttggaagacatgttgagagcttgtgctttagacttcggtggaagttgggataagaatctaccctatgcagaattttcgtataacaacagttatcaagctagtctacagatggctccttacgaagcactgtatggtcggaagtgccgcactccgcttttgtgggatcagacgggagaacgtcaggttttcggaacggatatcctaagggaagcagaagaaaaggtaaagatcattcaagaaagattgcgtgtggctcactctcgacataagagttatgccccaatcgccgcagagatttgagttttgaagagggagattatgtgtatcttcgtgtcacgccttttcgaggagttcatcgttgtcataccaagggaaaattggcaccgcgttttggggaccttataagattgtcagtagaagaggagaggttgcttatcagttagagttacctcaatctttggcaggagtccataatgtgttccatgtgtcgcaattgaagaagtgtttaagggtacctaccgaagaagctaatcttgaacagatagaagtccaagaggatttgacctatgtggagaaaccgatccgtatcttggaaacaagtgagagaaggaccaggaatcgagttatccgtttttgcaaagtccagtggagtaatcactcggaagaagaatcaacttgggaacgagaagatgaattgaacgttggaatcaagttcgattcggatcgggttccctctctccgagccgcgagtttccttcgccgttgccgtcgccgtgggcctccgccgtcgcctccgagcccctttaaaaggatccccgtgctcttctctttccgccgccaccctcgccttcgcctctcgtcgccggagtagccctagcgccccgtgcgccgccgtcgttccagccgtcgccgtcgctcgggaaggccgccgtcgtgctcgccaagtcgtcgccgtcctcgtccgccccttcgccgtcgccggagatcaccggagcagcttcgccgtcgtcgacccgaaggttcccgccgcttcctcctcgtcgccgtcgccgtccgttggtcgtccgcctccgtttgtgccgaagcgccgccgttcgccggtgagcgtgcgccgcccgagccgtcccagctgccgagccgccgccgccgtcggtgacgtcaccgctgacgtcatccgagtcctctcccattccgtcgtttccggagagtccgttttcgcagaagaagagtttgaagagttccaaggccagcaaggcaactcctggtttggaatggtacattcctggtttggagatagaactgtgcagccggggtggttgttcagaatggttgggcctatacaacaggatgccgcgctacaagcctgagtacctgtttggtgttgaagggtttgtccaggagttgcgtactatgtcctttgtcattggatttggaactgcccctttttatgcccagattcgtcatgatcgtcatgaagagaggtgccgtgtcaaagtcaccttaaacagtaatagtgaagatattccatcagtgatgttcgaagctggaggaagaaattatatccatgcatgtcaggaagtggcaaggatcgccataggagagctccgtgaccgctacagtgatcagttggccgatactgagtatcgctaccatcctcgccaaccacagggaagtgaccgtggcagttaccttgagactgaaggaattgagaatgatgctaccacaaggcatttggttgagatgctgtgggctatggatgaaagtcgtgcggagactgtgttagcggctcaagatcgtgaagaccggaatcgtggtaagatttgcaagctagaagacaaggtggatcgcttggagaaggaattagccgcattgaagggagaagcaccgccgcagaaggccaggattcgtctcaccgcaaggaagagaactttgtttgtccctcgttatcaattggcgccaaagatccgcgtggtggagaaagaagttgccccagcaaatcctccggtcatcatcataagtagtgatgaagaagaagaatctaagcgcaaccattccaagattgagtgg

SEQ ID NO: 53269 - DNA, 5002 bp, Oryza sativa
  Clone ID: PAT_MRT4530_55487C.1
atgcccagagctgataaggccttgtcggattcttcagagacgaaagaccatataagatctggtcgtatatacaaagactaccaggaaggccaacgccaatccatcgactggaagactttctccgccagcggcgccatcgacttcgccagagctctagcgccgtgcaacctagcgccgccgtcgccgccgtcgctccagccgtgcgccgccgccgttccggtcgtcgccgtcgctcgggaaggccaccgtcgggatcgccaagtcgtcaccgtcctcgtccgcctcttcgtagtcgccgaagaacgccggagcatcgccgtcgccgtcaacccgaagaccgccgccgtttcttcttcgtcgccgtcgccgtccgttcctcttccgccgtcgctttggtcgccggaaggtgcgctgcggtggattgtgttatgcaaggggtattgtcacagctcctttccgagctcctggtttggaatggtatattcctggtttggagatagatctgtacagccggatgccgcgctacaagcctgagtacttgtttggtgttgagggatttgtccaggagttgcgtacgatgtccattgccataggatttgggactgcccctttttatgcccagattcctcatgatcgtcatgaagagaagtgccgggtcaaagtcaccttaaacagtaatagcgaagatatcccctcagtgatgttcgaagctggaggaaaaaactacatccatgcatgtcagaaggtggcaaggatcgccataggagagctgcgcgatcgctacagtgatcagttggccgacaccgagtatcgctaccatcctcgccaaccacagggaaagactgtgttagcagctcaagatcgtgaagatcggaatcgtggtaagatttgcaagctagaggacaaagtggatcatttggagaaggaactagccgccttgaagggagaagcaccaccgcagaaggccaggattcgtcttaccgcaaggaagagagctctatttgtccctcgctatcaattggcgccaaaggttcgtgtggtggaaaaagaagttaccccagccctagcagatcctccggtcgtcaacatggtgctcactcgcagcaacgggaatggccccaacaacaacaacaataacaataacaacaacaatggagagaatcccacacttgcccaagtcctggctcaacaggcacagcttatgaacatgatgatgcagcaactccagaaccagcagaaccagggaaataaccatgcacctccccagaacaagttagccgaatttcttcgtgtgaggccgcccattttctccagtaccactaatcctgttgaagctggtgattggctgcatgtcatagagaagaagttggatttgcttcagtgcactgatcaggagaaggtctcatttgcatcacaccagttgcatggccctgcctctgaatggtgggatcacttccgcctgcatcggactactgctgaacctatcacttggcttgaattcaccgctgctttccggaagacgcatataccatcgggagtggtgtctctcaaaaagagggaattcaggtcgctcactcaggggtctcgctctgttacggagtatctgcacgagttcaatcgtctggctcattatgctccggaagagaagttagtggataaggctattcgccaggaggacaagtacaaccgcatggagcaaaagaaacgccggattgctcaattcaagacacaacaggggaataatcaaaagccgcgtcttactttaggaccccagtccatgccacagggaggttcttcgtctgttgttcgtccgcagcgtcagttcttcaacaacaatgccggcaacaacatccgtaatcaagctccatgccctgttgcagcctcgacacagcaacaacctgccaagagggagcaaggcagcaagcccgtggtgtgtttcaactgtggagacccaggacattacgctgacaagtgtccgaagccccgacgtgtgaaggttgtccctacccagggcaactctaccgcaccagcatcaaaggcccgtgtcaatcatgttgctgctgcagaagctcaagatgctccagatgtgattttgggtacgtttcttgttaacttagttcctgcaacagtgcttttcgattctggtgctacacattcattcttatctatgagttttgcgggaaatcatgggatggaagtagaagatcttagacgtcctatgatggttagtaccccaagtaatcaggcactctctttgcaacgtagcccctctgtcagaatagaaattcaaggcgtaccatttctggccaatcttatcctattagaatccaaagaccttgatgtcatcctagggatggactggttagccagatataaaggtgtgatagactgtgctaacagaaaagtaactctcaccagcaatgatggtcgagttgtaactgtttatgcattgtcttctgagtctttaaggtcaagactaaaccaaataactttggaagagattcctatagtccgggagtatcctgatgtgttcccagatgatttacctggtatgcctcctaaaagggatatagagttcagaatagatttggtaccaggaacaactccaatccataagagaccttatagaatggcagccaatgagttggcagaagtcaagaggcaagtggacgatttgcttcggaaagggtacatcagaccgagttcatctccatggggagctccagttatctttgtggaaaagaaagatcatacccaaaggatgtgtgtggactatcgtgcactaaatgatgtgactatcaagaataagtacccgctacccagaattgatgatttgtttgatcagcttaaagaagagcatgaacaacatcttcgccttgcactggagaagctgcgagaacatcaactgtatgctaagtttagcaagtgtgaattttggttgtccgaagtgaagttccttggtcacgtcatctcagcaggaggagttgccgtcgatcctagtaatgtggaatccgtaaccaattggaaacaaccaaagacagtttcagagattcgcaattttctaggcctcgcaggatattatcggaggtttataaagaatttttccaagattgctaagcccatgacacgattacttcagaaagatgtaaagtacaagtggtcagaagaatgtgagcagagttttcaagagttgaagaatcgcttaatatcagctcctattttgattttacctgatccaaagaagggattccaagtgtattgcgatgcatccaaatttgggttaggttgtgttctgatgcaagatgagaaggtggttgcctatgcatctcgtcagttacgtccgcatgagaagaactaccctactcatgatcttgagttagctgcagtagttcatgcgttgaaaatttggcgtcattatcttttcggtactcgtacagaggtgtataccgatcacaagagtttaaaatatatctttactcagccggatctgaacatgagacaacggagatggttggaattaattaaggattatgacatgggaattcattatcacccgggaaaggctaatgttgtagcagatgctcttagcaggaaaggctattgcaatgctacggaaggacgacagttgccattggaattatgcaaggaatttgaaagattgaatttgggaattgtcagtagaggtttcgttgcagctttagaagcgaagcccactctaattgatcaagttagagaagcccaaattaatgatcctgatattcaagagatcaagaagaatatgaggagagggaaagctatcggtttcttgaaagatgagcaaggaactgtatggttgggcgagagaatctgtgtccccgacaacaaagatttaaaagatgcaattctaaaggaagcccatgataccttatactccattcaccctggtagtactaagatgtaccaggatctcaatgaaggattttggtgggcaagtatgaagcgtgaaatcgcagagtacgtagcagtatgtgatgtttgtcagcgagtcaaggcagaacatcagaaacccgccggtttgttgcagcctttgaagattcctgaatggaaatgggaggaaattggtatggatttcatcactggtctacccagaacgtcatcaggccatgactctatttgggtgatagtcgacagacttaccaaagtggctcatttcattccgacagacggacaaaccgaaagggtgaatcagattttggaagacatgttgagagcttgtgctttagacttcggtggaagttgggataagaatctaccttatgcagaattttcgtacaacaacagttatcaagctagtcttcagatggctccgtacgaagcactgtatggtcggaagtgccgcactccgcttttgtgggatcaaacgggagaacgtcaggttttcgggacggatatcctgagggaagcagaagaaaaggtgaaaatcattcaagaaaggttgcgtgtggcccagtctcgtcataagagttatgccgacaatcgtcgtagagatctaagttttggcgaaggagattatgtgtatcttcgtatcacgccttttcgaggagttcatcgttttcacaccaaagaaaaattggcaccgcgttttgtgggaccttataagattgtcaatagaagaggagaggttgcttatcagttggagttacctcaatctttggcaggagtccataatgtgttccatgtttcgcaattgaaaaagtgtttaagggtacctaccgaggaaactaatcttgaacagatagaagtccaagaggatctgacctatattgagaaaccaatcggtattttggaaatagatgagagaagaaccagaaatcgagttatccgtttttgcaatgttcaatggagtaatcactcggaagaagaatcaacttgggaacgagaagatgaattgaagtcagctcatccgcatctgttcgccagttcttcagaatctcgaggacgagattctgttaaaggggggtag

SEQ ID NO: 53270 - DNA, 204 bp, Oryza sativa
  Clone ID: PAT_MRT4530_55488C.1
atggcggtggcaagaaaccactgcgaacgaaatcttctaccactaccatgcgaactagggcgggggaggggcagtgtacctccttcttctctggccatggtctgctccaaaggaagagccccatcggtggagagcttcgcaagcatcgccaagtcagaggttgatcggccgaggtccgccatcggagcaagatcaccggagtga

SEQ ID NO: 53271 - DNA, 823 bp, Oryza sativa
  Clone ID: PAT_MRT4530_55489C.1
caatcatcaattgaacatatggcttatgaaattgcggtaggataagtagcaaaagcatgatgttcccttgtcactttgtcagtcatgaatcataaggcatgttcaaacatctaccgtaactaaggacagactggcattgtacaacatcttttcagggtaagctgcaaactagtcgaaatgtcaatcagctgaacgggggctgctcagaaggggtgtcaaagcataagctgagcatggacaacagatctgatccgaagggctctgttggaatggaattcttctactcataagcagctgatgtgtcattgccgtagcatatcacgtaactgaagcacttgctgtcgttgttctggaggcagcatgttgatctggtcaggtgacatactcaagacttgctgtacaagcatcttttccatctcaggcgtcaaaggtgcttcagggcgagccgaatggataccaccaattccttgggtcatctgtccgggcaagccaggcaaatgcccagggaaatgggggccagctgaagaggcttctgcgttaccacgcccccatggagttgatctatccatttgcatactttgagaattgtagtgtgaggcagcatgtgaactacactggtatagctggggtggtggctggttaggcaatggcggtggctggttaggcaatggcggttgacctgtaaggaaggaagtttgtgggttcccaccaggatgaaacattgatcgttgcaacatgtgttgaggagcatttgtatgactcaagccaaatgaactgggtacttgcggatgcatttgcctgcagcccgggggatccactagtt

SEQ ID NO: 53272 - DNA, 114 bp, Oryza sativa
  Clone ID: PAT_MRT4530_5548C.1
ctgcagtgtgaagaagcactgtaatgattgaaattgatcagtcattggaaagcatgcagttcgcctttcattgtgtgccgcagcccatcacataaacagtctatggctgattct

SEQ ID NO: 53273 - DNA, 1857 bp, Oryza sativa
  Clone ID: PAT_MRT4530_55490C.1
atggacatctctaggacaaatgaaggctacacgagctgcggcccggtagtcgagatgtcatggcacagggctggtgtcctgctgctaggggctcaatcctgcctacctgtcccggaggttccggccgtaggtgggattgggtcggtactcttgtctatggctaggatgggttgggaactatgtcacgtcttccgtccgtataccgtggtgaataagcctaacatacatcataacagcaaaagacttagatctgttaaggtcctattcttagtttctaatctgtctctcccctttgttttccctctctccctctccaaacctttgcaacagatggctgacaatgagaaaggcaataaggtcagaagtcaggacatcggtacctcaagctcccgagtgaatgaagcaccagacaccatttgtgtgacactggtccaacacctgattaaccagaaccgattgcttatagagatactacagcagcatcagacgccaattctgaacctgagtcagatacaacctcaagtgcagttggaggcagtccaagcactcacaccacgagtcagcatgccgccagcatcccgaaggacccatggtgacgtgccacatgttgactcaaaagaagcaagtatcatttgttttatgtgtgatgagcaagggcactatgcaagggagtgtcctcagcagaaaagaaaaacaccaatgcgaaccgaagatgaagtccgaatgacaaaacgtcagagaagaaataccttccgaggtgcaccacagttgacagagcatcttttagctaatggaggtagagtgtctgatagtgaagattcagatcaagtctcatcagatgatgaagatgaaatggaacgtaaggcatgctcttgttgtggagaaatcggtcatgttgccagctcgtgtgccactacatgcgttcattgtgaggaagaccatccacccgacaggtgtccaacgagcaggatcacttgtttcttttgtgaaggaactgatcatgtactaaaagattgtcaattcagttttctgctgacgaagaagatggccaaccaacccgccagttccaacggagagaagcatcaaggcaacacaaatcctcgccaagattacagtttcagcctaactccagtgccaggacagaggaatcaaaatgagaaaagaaaatgccgagtccgggaagatatctgttgcttcaattgtcaaggaatgggtcatttcgccgacaagtgcccaaaaccgagaaacatagctgccagcacgtcagtccacgcaactccctgcaatcagaagcttgctcctcagcgaattgtcatccatgcatcccgaagcagtcctatagcccgcgttgcaacagctccaactccagcgagtgcattaccacaaggtgtcaatgctcaatttcagccccagccatcagttgacaagacagaggccagtatcggcattgtacctttggatgttccagcacagcagccaagaaatcaagtacaagatgaagaacccgagccaccaaccattctctgcaccgacagcctcagcaaagaattgtcgtcgatggaagaagttgtgtctctccccgacctactccaggccgagcaaagggcaatcaacctcaggagggcgataccaagcagaagaccgttattcgcttcaaccagcaatcagaaggaagcttctcctgtgaatgatagcaatatgcagtcctatcacatcatcacagaaccaatcaaggatgatgcagtcactagaacaatgccagctatacctcttcagaatcaaaatgagcagccacgcttgtggttttcagttcgctacttatcattgcgtaatcgaaagtttgcagcaatcatgtaa

SEQ ID NO: 53274 - DNA, 2342 bp, Oryza sativa
  Clone ID: PAT_MRT4530_55491C.1
taagaagtaaagaacccatttttgtgctttgttcctgcttgttgtttggagtttattagagtaaaagtctttttctttttccgttggtcgtgtagacgccgcagcttcggaagatccgctcttcgtggaagttgaagccgtcgtttgggaaagcgagcaaggcaagtcaccctctcttcctctttcaaaacccctaaaacctgttttcggtggggtttgggtgcatgccagttatgggaagtagcaccccggccactataaggactaaagctcgggcctctgttgcaaagcactaccgtacttccacatgtctaatgggtaaggcttagtttgtggctcagtctagtcataaacaaaagtacacggattggagatggatgaagtcgggcttcgatggacattctccagggcaaatgaaggctacacgagctgcggcccggtagtcgagatgtcatggcacagggctggtgtcctgctgctagggggctcaattctgcctgcctgtcccgggggttccggccgtaggtggggttgggtcggtactcttgtttatggctaggatgggttgggaactatgtcacgtcttccgtccgtataccgtggtgatgtttaacagagaaaaaggaaagaatgtcagcgggtatgcctcaagtaactcaagttttcaactcaatccaccactggcctcaagagagttaaccagggcacacccttggtccattccaagcatgccgcttagttcacagctaccattggttggaagtcaagaccaaaatcagtatgtgtttgatcgagcatttgccacccaggtcaatgagcttccaatgccagaagaggatgtccccttttgtcacgattgtagagaacaaggacactatgccctgaattgtccatgggtatatgccaaagaagccccttcctttggtttagcagggcagacatcactaaaccagcctcctcacaccaagacaagcttgcagcctagtgtgcaaagtagagagcccaatggagagaatccatggaatcccgggaattgctttcctcctagcctttcgtaccacgtggggtcacgtactaagcaagccaaaggcaagaagagtaagaatcagaagagaaaagcgccgatgcgaactgaagaagaagtacgtaagatggctattagcagcaccgaatggccttccgcagggataactattcctagacgtcaaagaggaaataccttccgaggtgcacgacagttgacccagcaccttctaagccatggtggcagagtatctgatagtgaagggtcagatcaagtctcctcggatgatgaagatgagtctccccgacatctcggtgaggaagagatggaatcaaaagcatgcacccgttgtggagaaattggacacgttgctagcatgtgtctcacactctgcgcttattgtgaagaagaccatccaccaggggagtgtcccacccgcaaggtcacatgttttgtgtgcgaaggtacaaaccatgtgcccaaggattgccaactcagtgtgttgttgaccaagaccgcagaaatccaacgaacgaccctacgattgtctcgtcagctagtcagctccaacagcaacatcgacgatatcatccacaacaccaatgctcctcctgctccacctaactctgcaataaatcatagcaataatatctttagcaccaaccattctctgcaccgacagcctcagcaaagaattgtcgtcgatggaagaagttgtgtctctccccgacgacatgaagttgataacttgtgttaggttgacgccgaagatatgaatcgtgagaagttctggatctgaagccccatcatcaagtgccacaacccagtcgaagtcagctaaaggttcaaccagagataagtcaggtgaagagaagattccatccgcaacaggagatcgagccaagcagtccagagtggaggagttcctccccgtgcttccctccttcgtttccgccgctcgccgccctctctccccgtcggaatcgagcccgcgccgtcgtcctctctctccgccgtcgccgccgagctccggttcgccgccgtcgtcgccccggacttcctcccgtctcggcgtcacctccatcggcttcgccgcgtcgtcgtcgacctcgtccgctcctccgtttcgcccgccgaccgccggagcaccgtcgtcctcgccgtcccgaaccgcgccgccgctttcctccactccggtcgtcgtttccgccgtcctcgtcgtcccggggtgagccgtggaccgcccctttcgcttccctctcttctccgctctctcgggcgccgctccgccgcgccggtggtcgccggcggtgaccat

SEQ ID NO: 53275 - DNA, 5598 bp, Oryza sativa
  Clone ID: PAT_MRT4530_55492C.1
atggactccccagcgacccccgtgggcttatctccgccacttctcagtctggtgccccgcaatgaaccatgctatacaaaaggaaaaggagatttattgcgtcagcggctagggtttgcggtggaccgggcgcacggcggcggttcacaagaacggacggccgagatcaatccatccaaaacggacggccgagatcgattggtgcacgaccggctcacagcgaacggccccgatgacgtcggcgatgacgtcacctaccggcggcggctcgggctcacacgctcgacggcgaacggtggtgcttcagcacgaacggagggcaccagcacgtagaggacgacgcggcgaactcaccggtgaccaaaacggcggcggaagaacaacggacgacgacggcgatgaggaagaagcggcggcgctcttcggcttgacgacggcgacggtgctccggcggacaacaacgacggcgaaggggcggacgaggacgtcggcctccccgcgcgcgcgcgccgctgacaggcgggcccgcccgccactctcgctgacgggtgggacccacctgtcatccccaaccccgcgccgcgcccgccgccgcccgtgccctagcgccgccgccgccgcggattccgccgcatcccgccgtccccgcgcgcattaaagagaggggaattactccccgcgtttccctctcccgattccccctcttttccctctctctctccctcggattcgtccggattcatcccgcgaagttcgccggcgtcttcaatggcgcccgagatctccgcgcgcggtttcctctctccccggccgcgctctccccctcccgttgctataaaatcgtccctcgtgcttcgctcttccgtttccgccgctcgccgctcgctctcgccgtcggtttcgtgcccgcgccgtgctcctctctctccgccgtcgccgccgagctccgtttcgccgccgtcgtcgctccggtcctcctcccgactcggcgccacctccatcggcttcgccgagtggttgccgaccccgtccgccgctccgcttcgcccgccgaccgccggagcaccgtcgacatcggcatcccgaaccgcgccgccgcttttctccactccggccgtcgtttccgccgtcctcgttgtcccggggtgagccgtggaccgtccctctcgcttccctctcctctccgctctctcgggcgccgctccgccgcgccggtggtcgccggcggtgaccatcggggcgcgggcgcgccgctcccgtcggccgtgccggcgaggccgccttcgggcgcgccccgcggctgccaggtggggcccggccgtcagccgcccgcgcccgcgggtgcggctgacgcgtgggacccacggcgccgaccgccgccagccgcgtgctcccggtccaccgtggaccgagaggctgacgcgtgggccccacttcccgtggacccgggcaaatgaaggctacacgagctgcggcccgatggctgacaatgagaaaggcaataaggtcagaagtcaggacattggtacctcaagctcccgagtgaatgaagcaccagacaccagttgtgtggcagtggtccaacacctgattaaccagaacaaattgcttatagagatactacagcagcatcggatgccaattttgaacccgagtcagatgcaacctcaagtgcagttggaggcagtccaagcactcacaccacaagtcagcgcaccgccaacatcccagaaggcccctcatgccatgccacatgttgacccaaaagaagcaagtatcatctgttttatgtgtgatgagcaagggcactacgcaaggaactgtcctcagcagaaaagaaaagcaccaatgcgaaccgaagatgaagtccgtaagatgatcattaccagcacagaatggcctccaccaggaatgacaaaacatcagagaagaaattccttccgaggtgcacaacagttgacagagcatcttttagctaatggaggtagagtgtctgatagtgaagattcagatcaagtctcctcagatgatgaagatgagaagtctccccaaggttttaaccagaataaaatggaacgtaaggcatgctctcgttgtggagaaatcggtcatgttgccagctcgtgtgccactacctgctttcattgtgaggaagaccgtccacccggtgaatgccccatgagcaggatcacttgtttcttttgtgaaggaactgatcatgtaccaaaagattgtcaattcagttttctgctgacgaagaagatggccaaccaacccaccagttccaacggagagaagcatcaaggcaacacaaatccccgccaagattaccgtttcagcctaactccagtgccaggacagaggaatcgaaatgagaaaagaaaatgccgagtccgggaagacatctgttgcttcaattgtcaaggaatgggtcatttcgccgacaagtgcccaaaaccgagaaacatagctgccagcacgtcagtccacgcaactccctgcaatcagaagcttgctcctcagcgaattgtcatccatgcatcccaaagcagtcctatagcccgcgttgcaacagctccaactccagcgagtgcattaccacaaggtgtcaatgctcaatttcagccccagccatcagttgacaagacagaggccagtatcggcattgtacctttggatgttccagcacagcagccaagaaatcaaaattggaacaacccagcaggggcaaccaatgttcaagtacctacagtccagcaacagtgcaagttatcagaatttctcaaaactgagactccaacctttgccattgccgtcgaacctatggaagccagtgattggttgcgcacagtcgagaagaagctggggttgattcagtgcacagaccaggagcgggttgtcttcgcaactcatcagttggttggactggcttcagaattgtgggatagctacgaagcatcacggccagaaggacataccatcacctgggacgagttttcattagtattcaagagatcccatgttcccgcaggaatgatcacactgagaaaacgagagttccgctacctgaagcaagaagatttgaccgtcacagagtacctgcacgagttccatcgtttggctcactatgcaccagaagatgtggaaaatgatgaagacaaacaagagaagtatctccaggggttaaaagatgagatcgcagtgcaactactcctagaggaatatgaagattttgagaaacttaactgtaagagaaggattgtcagcatcccagtattcccatgtggtaaccaaagacagcgcacggagccacttcagatcaccggatcttctgttgcgcatcaagagtttccgccccaagaagatggacacaatgcagacaacaacattagcaatactaatgatgatgataccaccaacaaccatgcttcttgccccattagtgaccactcaaatcaagcgtgcaatgtcaacatcattcaccaaggtgtcgacgatagtatcaatgatggcacccaaaatgacaaccctagcaattgtgactctaagaaagactccaatggtgatagcaactatggtaccactgatgccaatgttagcaaggatttccaaccaccaattccaactccaagtcagaatgatcgtccccagacggatagctcagcaaagaagacgttgatttgctacaattgcaaagaaccagggcattactcgagggactgcctgcaaccaaggcaaagtcgacctccacattaccgccaatttacacgaagcagacatcccaatcgtattgtggtcactggagcaaacgccgtacccgtttctctgaaagacagcacgcccaaggacctcattgccccagaagcatcctcaacacccggagcgaagagtacctggttgagaaaggtcgaaagtgccggccaccctccagcccgcgtcggcacgccgcccggccgtgccgtcgcctccccttccccggcctgccctcggtttcgccggaatgccgtcgcccgcgccggtctcaccctccgcctcgccggagttccttcggccaccccttcggccgtgcccgtgcgccgcggcatgttccacgctgtcctcgcatccgtgcagctactgccggctgcccttgtcgcctcctcgccggccccggtcgtcgtcgtcgtccacctcctcctctcgtcgttcccggtcgtcatggcgttcgtccctccgtcaagccgttcgcgttcgccgcccgtggttcgtcaagtgagctgctgcagccccatcgtcgtcttcatccttagctccacgtcgtcaagcctcgtgccagccgcgtctcgcattcgtccaaggatcgccgccgaagtcgtcccctcgccgttcgtctccgttgttcccggccgtctccgccgcgcccgttcgtcgttgtcgttcccacgcctcgtcgcgtggtgcaggaggagacagcaaggctatggcaaattacttgccgagattcgtgacgacttcatctccaattttcaaggtaccttcgaacgtcccggcacctacttcgacctctacaatgtgatccagaagcccagtgaataccttcaggattatatccgacgtttttctgagcaacgcaacaagatctctgacatcaccgacgatgtcatcatagccgctttcactaagggtgtccatcatgaactgttagtcggcaaattcggacgcaagcctcccaggacggtcaagcagatgtttgaaaacaccaacgagtatgccaaagccgatgatgccgtcaccgcgtccgagctatcgggcagcaattggaagccaaagaaagatgcgccagcagtcggggggagtggaagtaccaaccataaggattgcaagcgtaagcctgaagaccttgtggcaagtacaacaccttcttcccagcagcggtcacatatcaatactttcgacaagatcatgaatgctcaatgctcgcatcacccgaattcaaaccatgcagccaaagattgttttatctatcagcagttcgcagagcaatatgccaagaaaggaaggaagccgacagacggggagcaaagcacttcaaaaaagatggatgatgaagacgacggtccgactggctttcaagactctcgcaaagaactcaaccatattttcggtggaccccaagcttacgaatcaaaacggaagcaaaagctgactgacagggagatcaacgccgtccagcccaacacgcctcaataccttcggtggtcagagacagcaattaagttcgaccgctcagatcatcctgaccgagtggtccacctggggcggtaccccctggtactggacccagtggttcgcaatgtcaagctccgacgatccctcattgatggtggcagtgcactcaatatcctttttgccaaaacactggatgatatgcacatccctcatactgagctgaagctgagtagtgcgccctttcacggagtcatcccatggttgtcttctactccactcggccagatcactttacccgtcaccttcggtacctgggagaacttctgcacagagaatatttgcttccaggttgctgatttcgagatggcatatcacactacacctacatga

SEQ ID NO: 53276 - DNA, 915 bp, Oryza sativa
  Clone ID: PAT_MRT4530_55493C.1
atgttcgcgccgacgttcgcggtggccgccgctctggcgccgccgccgcctcgaggaggcggaggcggaggaggggagttcgaccacttcgtggtggtggacttcgaggcgacgtgcgagaggggcaggcggatctacccgcaggagatcatcgagttccccgcggtgctcgtggacgccgccacgggccgcctcgtgtccgcgttccgcgcctacgtccgcccgcgccaccacccgcggctcaccgacttctgccgcgagctcacggggatcgcccagggcgacgtcgacgccggggtgggcctcgccgaggcgctcctcaggcacgacgagtggctgcgtgcggccggggtcgtcgagggcggcgggcggttcgccgtcgtcacgtggggcgacgccgactgccgcaccatgctggagcaggagtgccggttcaagggcatcgcgaagccggcctacttcgaccggtgggtcgacctcagggtccacttcgaggcggcgttcggcggcggcgggcagcgggtgaagctgcaggaggcggtcagggcggcggggctggagtgggtggggcgcctgcactgcggcctcgacgacgcctgcaacacggcgcgcctcctcgtcgagctcttgcgccgcggcgtccccatctccatcaccggctcgctgccggccgcgccgccgccgcttgagcaagctcgtaagcagcagcagcagcaggagatgcagcagctgctcgtcccgtgcggcgcggcggtgtgctgctactgcggcgtggcgagcacgggaggggtgatggcgatgccggggtcgacgcagcggcggtgcttctacggctgcggcaactggacggcggtgtccggggcgacgtgccccttctttctcatgggcggcgtagtggattgtcctataaattag

SEQ ID NO: 53277 - DNA, 2225 bp, Oryza sativa
  Clone ID: PAT_MRT4530_55494C.1
atgacggagctcgtggctcctcaccgggagaccgcgcaggcccccctttgccggttcggccgggggcttagggtgagatctcaagctctcgctgtgtgtggaaagatcgcgtgccaggaagaaacacgagacacggacgatgtatacaggttcgggccgctgggaagcgatgaagcctggcatatatcgatcggggctaacgtgccatctccgggatgtaacacgctagctccagctgaggacgagtgcctagaggctctcgtcttgacgggatggggcgaggcgtgcgtcagaccgccatgcaaaccccacaaggggtcggggcaccttggccctcggggccggggcaggagcaacccgaccccccctcggggaaatcaggaggagggcggatacctcaccctcgggcccgacgtccccgaaggtgccaggccacgtgggcgattccatctgcctcaagcctccgggcgcaatacccccggtcccatatcaccgacagagcgggaacaccactccacaggcatcctcgacggcacggacgaagcctactcctcggagaaaccttcatctgacgcatacccacacagccccacgacacgtttccgtgcgccgacatgtcaccacgacataccggaaagaggccgtgacaggacccttcgcataaccccctctagccaagcacaccacacctcaggtttcacccccgtccccagcgggcaacgggcagtcccctctcgtgcctaggtgaatccggaagcgacagaggccgtcgcagggcccgccccgctccatcacgcccacccttgcctggatgcgtcgactagaggaaagctaccaaggggcggccggcgccgacacgcgggccccacacgtcagcgagtcaaaggggcggcgcacggtggaccaagtccacacgtggcctcggggcgtgtccaccacgtggatggcccagatcggcccgaagccgatcggacggccacgaggcggcgcggctagggcacaggcacggcatgaaaccggctcggccgagcgatagcgcgcggcggcgtgcggccagacgaccgccggcgacagcggcgcgtcgcggcagcgggcacggggagcggcggaggaggaaaaagggagaagggacggtggggattcttaccgaggacggcgacggcgagacgaccacagggaggcggctggcggcggaaagggatggtgaacgcggcggcggcgttccaggggcagggaggggaaacggagtaggggccggggtgcggcgaggaacggcgatgccgatggcggtggtagcgcagcgcggcagcgacgggagcggtggtggcgcgcgactggaggtgacgaaaggcggctgtggctcggtgcacggtgggaatggtgctgcgggggtggaaggggaggacggagtggatgccggggtgtggcacgacgcggcgaagctgttggaggcaaaagcacggccgggcgaggcggcgctcgcgcggcggggagcggatggaggcggctaaaggcgaaggtggctcggggtggcggtggaagcggcgttgcggcggtggattggcgaagaggagcggtggacggggtgcgcacggcgactgtggtgccggggagggcgacggcgcagtgcggggttggcgagaatggcggctaggggcggccggagctcgccggagagcggcgacggctcgattttgcgtggggagggcgggggagagtgcggggagtacgggaaaattggggaaaagggggagggtggcacggggatcatttttataggctcggggaggagaaatcgtggccggacgggcggcaacggccggcggagtggggaggtgaagtggagctcgtggggaggtcaaaccggcgccgtttcttgcggggtgagtgggggagatggtggaggaaggggatgacgtggggtggaccgcgcccacacgcgcgcgggaaccggaagacgcgcggggaggggcggcgacgtgggcggctcgggcggccatggcaggaaaggagagaggaggagacggttggggggacgatgacaggtggggcctcgggtccacctgtcggcgaggggaggagggaggaggctgggggttaagtggacttggaggagggggagccgagctgggccggcccacgcggagaaaggagggaaggaggaaagggagaatgggccgagcccaaagacaaagaggggaagtttattttgttttctttttatt

SEQ ID NO: 53278 - DNA, 1824 bp, Oryza sativa
  Clone ID: PAT_MRT4530_55495C.1
atgacctcaagttctcggcccttaccatggcctgatccacagctttgtcaaggcaacggaggtgtggtggtaaagctcttacaaccctggtcgtctcctattcaagaaggtgttcgagctgaaattgaagcactgaatttacatggtgagcatcctgaaatctctttgaactacagtgttgcccagttcatgagtagaacaattacttccactaagggcttgctgcaaaatctggttgttggatggtgtatttgctatgagctgcattcatctggtacatgttggactgcctaccagcatatgcagtattcaatctatggttggtcatttgatgatcctgatcaggaggcccaaaaggtattggtcaatggtaggaatttgcagggagtgctgattcctacagagctcaaaattccatggccaccaccaaacttgactgttcagatatatggagtgctcactacaattacgttgtgtaatggggataatttctcaattaactataccattggtggtattcacaatgagatggtttggggagaatcactagaagatagcagtcatatctccaattgcttcaccatgttgcaaagtgctgaattggtccagtacaaggttgattttgctggtagctcattgcttgaaaatctagctttgcaaggggatgattccctgtcatttttacttcctgaaggggtcactgtagaagatcaagaaatggtgactcggattaagatgacggaacaatctgtctccaaggatgaaatggatggaccaaagcttggtgttgccaagttcagtttggataaattaccaaatcattcagttggaagtatcatggctatggcattattgcttgtgcaatcttcggcacagatcgttccaagctccatcttggagatgggtttgttcaggtgcaaccaagttcgacttcagattgaaaattcaatattttcagcaagttgtttcatgagcatgcattttcaaatgagaaatgatagcagcagttttcaaggcatgaaggagaaacaaactgttgatattgtggaaacttctgcaattcaggaggctatagttattgagttggagaagaactggccctgggatcctggtgtttccagttcagcatctcctcaatgtcggcaagggtaccatcctttggatcgacttggggacaaatcgaatttcaagtgcgttcgtgacaatatggtatcagagcagtcgattcgtggggttttaggtgtggagatgaagtggaagagcgctggtggtcagaggaacagccagcaacctggtggtggtgtctttggaggagatgcccaccacctgttcaatgaaatgccgagctgtccaagaggcgactcagctgctgtcctttgcgtcaccgtgagccagatcatatatccagtgacatctgaggtgttgcatcaagtgtacgatacctatggagcagtggcggtgcaggttcttgcggtgagcacatggcaagtcaaggctcttgtgtcgttcatgtccagccatgacgcggagagggctcggtccaccacccatggtcacgacatctacgacgagggctgcttactggatatgcagcacgtccagatgttccctggagatggcgccactgccacgcacaccacctgttcgacgatggtaccaagtagcgccaccgccaggccagtggccaagagtactgctgctgcaccagaacgcgtgttccctgctactacagcttcatctgtaccctcaattacatcagcagccatggtgacatcggttcctttcaacgagaccaagaaggctgatgctgatatggacaaggcg

SEQ ID NO: 53279 - DNA, 5070 bp, Oryza sativa
  Clone ID: PAT_MRT4530_55496C.1
acttccggacgagtgccaaagagatagtgacgccaaatcttcaaggcatggaccacagccgctaactcaagatcttgggtaaggtaattcttctcgtgagggcgcaactgacgagatgcataggctaccaccttcccatcttgcatcaacacacaacctaacccaagctgagatgcatcgcagtacacttggagtcccttctttggattaggcaagatcaaaataggtgccgatactaggcgcttcttcaattcttgaaaactctgctcacattctgctgaccacttgtacttcacatctttctgaagcagacaagtcattggtttagcaatcttggagaaattctctataaaccaccgatagtaacctgcaagacctagaaaatacgaatctcagaaattgtctttggttgcttccaattagttacggattccacattactggggttgacagcaactcctccggctgagatgacatgtccaagaaacttaacttcagacaaccaaaagtcacatttgctaaactttgcatacatctgatgttctcgtaacttctccagtgcgaggcgaagatgtacttcatgctcttctttggttcaggagtagttaagaatgtcatcaataaagaccactacgaacttgtccagatattccataaacactttattcatcaagttcatgaagaaagcgggggcgttggtaagtccaaaagacatgacagtacattcaaacaacccatactccctaaagctcaactggtgatatcccgatcgaagatcgatcttagagaaaacagtggcacctttaagctggtcaaacaaatcatcaattctaggcagagggtacttattcttgatggtcacatcattcaatgcacgataatccacacacattctctgagtatgatccttcttctccacaaaaataactggagctccccagggcgatgaacttggtctgatgtatcctttctgcagcaaatcatctacctgcttcttcacttctactaattcattagctgccattctgtaaggtctcttgtgaattggagctgttcctggtactaggtctatcctgaattctatatctctcttaggcggcatgccgggtaggtcatcagggaatagatccggatattcacacacaatgaggatctcttccacggtgacttgattaagagacacttgagaggatgcaggaggcaatgcatgaacggttacaacttgtccatagctgttggtgagttttacctttctattggcacaatctatcatacctctattcttggttaatcagtccatcccaaggatgacatcaaagtctttggattctagcaaaataaggttggccagaaatggaacaccttgaatctctattctgacagaagggctacggtatgatgagagtgcttggttactgggggtgctaaacatcaaaggacacctaagctcttctatttccatcccatgacttcccgcaaaactcttagacaaaaaggaatgagtagcaccagaatcaaaaagcactgttgcaggaactgagttaacggggtacgtacccaaaatcacatctggtgcactttgagcttctgcggcagcaacatgattgacacgggccttcgatgtgggtgcattggagttgttctagacatgagcagtcctcacaccacgaagcttcgggcacttgtcagcataatggcccggatcaccgcacttgaaacatacccctggcttgtttccttactccttcttgacaggctggtgctgggctggagctgcagcaggacgcggagctaggttgcggttgccattgccactgccagtgttgttgttgtagaactggcgttgcgggtgaacagcagaagaagatcctccctgaagtgctgcctgaggtcctaaagtaaggcgcggcctctgactgttcccttgctgtgccttgaagtgagtaatcctgcgcttcttctattccatgcggttatacttgtcctcctgacaaatgatcttgtccaccaacttctggaaatcagcataatccccagtcatcagtgggtaagacagttcatcattcaacccttccgtcaacttctcctgacgttccttgtcagtgtgaacatcctctagagcgtaacgagccagtcgattgaactcatgaaggtactcggtgacagaacgagaaccttgagtgagtgccctgaactccttcttcttgagagctactactcccgatggtttatgagtcttcttgaaagcagcagtgaactcgagccaaatgattagctcagcagtagccctgttgagacggaagtgatcccaccactcagaggcagagccatgcagctgatgcgaagcaaaagagactttttcctggtcagtgcactgaagcatgtccggtttcttctctatggcatgcagccaatcgtcagcctcgaccggattggtagtgctggagaaagtgggtggcctcacacgcagaaattctgctaacttgttctggggaggagcatgattgttcccctggttctgttggttctggagctgttgcatcatcagattcatgagttgagtctgctgggctaggacttgggcaagagatgggttttcccattgttggcagacccacttccagtgttgcgagtgttatctagggcttcctggcatcggagcggactaaaggctctccctcatcatcattttcttgagtggcaccccactcaaccactgaatgggtgcgttcagggtcttcctccgagtcttcttcctcatcatcacacagttggatgacaggggaatccacaggtggggcagcttcctccaccacgcgaaccttaggagccagctggaagcggggagcaacgagggctctcttccaggtggtcagacaagctctggccctatgcggcggtgcttctcccttgagttcagctagttccttctccagacgatcaaccttgtcaagaagcttgttgatcatgccattgttcttgtcttcacgctcttgagcagctagggcctcctccgtgcgatgtccatccatgggcccaaagtagctcgaccacatggcacaaggtagcatcgtcttcaagtccctcaggatccacgtagctggcttgggtacgatcatgggtttggcaaggatggtagcgatactccgtgttgaccagctgatcgttgtagaggttgcggagttctccaatggcgacccttgccacctcctgacaagcatgtgataccttcttccaccagcttcaaacatcaccgatgggatatcttcatgatcacttgttatggtgaccttgacacggcatttctcctcatcacgatcatgggggatctggtcataaagaggggcagtcttgaatcctatggcaaaggccatcgtacatagctcccggataaaaccttcaactccgagcaagtactgggcttgcggatcggcgtgggtgtgacaagttggtatcagagccatctcgactgtaggataagccaaatggtcaaacaattactccccgtgatctcctccccctttccccctattttcccctctctctcgccttcaaacggccggatttgatcccgcaactctcgccggcgccattgctggcaaaaaaaacctcccgcgccggtttccttccctgccggccgccctctctcccttccaaccctatttaaaccctccccgcacctcctccgtccgtttccgcctctcgccgcccttcctcctcgccggattcgagctcgcgccgtcgccctctctctcctccgtcgccgacgacctccggccggccttctccgctcgccgggactgtctcccgccccggcgtcgcctcctccggcttcgccggaacgccgtcgaccccgtcgaccacctcgccgagctcgccgaccgccggagcgccgtcgtcctccgtccacccgagccgcgccgccgtctttttcgtcgtcgccgtcgacctagggtgagccgtggaccgccgcctcttttcccccttcccttcccctctctcggccgccgctccgccgtgcctatggccgccgccggcgaccataggggcgcgggcgccgcctcccgccggccgcgccgagtggctaccttcgggcgcgccgagtggccgccgcgtggggcccggctgtcagccgcccgcgcccttgggtgcggctgacgcgtggggcccacggcgccggccggtgcgagcccgggtgcgcccggtccaccgtggaccgtgaggctgccccgtgggccccactcccgtggacccggtccgcgcggcccctcccctcggctgacgcaataaaccctccacccagctgcatcgcctcctccccattaccactcctgagccgagcaaaccgagggggagagctccggcttttcttttccatctcgaccttgccgctggccgtgaagacgacggccgtcgccatcgcctttgtgccgtggtcgtttcctcttctcttgcgttccataatttcctcatcatgccgatcatcttctattttgacaccacgtcatttcatccactgcagccacgggaacgcagagctcgccgacgatgctctggagcgcgcactggacgccgtcgtcgggttctcgtcgtcgttccgaccgaaccgagccaccccaagccgaactcttgcgccaccaggatcacctcgacgtcctcttcaagataccccaagaaaacccatccaatggcgcaggattcttggagatcgacatcgtgttctccaactccattcaatcgcttccatcatcgattccattctctccggtgagcgtcagtcaaattccatgcatgaatagcctccctagatagcttttgacctcttgcatgcaccgtactagtgactccccttacagatcgagcagccgacgtcattcctggagttgtgccatgccgccatggagcttcgccgtcgctgtggctctgcagacatccctagccttgtctagcatctcgatgattgcttaaacggtaaagaagtgatttagatgctgacattttcctgattcaaggttttagatttagtctttgaagtgatgcgggtaatcgaatgcttcttctaaggattgg

SEQ ID NO: 53280 - DNA, 3351 bp, Oryza sativa
  Clone ID: PAT_MRT4530_55497C.1
atggcgtgtggacttggcaccggcaagtccccgccgcggcggccgcggcggtggcggtggcggcggcgctctaggggcgaggagacctccgctcccgagcgatacgagggggaggagagtgacgcggccagcgtggcgccgaacgcggcgaagctgtacctccacgtcggcggcgcctccgcctccgcgcgctgggtgccggccgagcggcgggcgacctacgccttcgtcgacaaggcgacggcggcgggcgacagcgattgtggcggcccgaggtgggttctggaggttggtccgggtcccagggtctccgcccccgtcggcccggcgctacagctcaaggcgctccccgcgcagcgccgggccgatttcgccgcgggcggctccgtctgggcgctgcggctgccgaccgacgccgccttccgccgattccggcaggagtacgaccggtgcctgttcgagaacacgtatggcgtcgaggccacggatgagggccggaaggaggtgttcggcgctgacttcgccgcgtgggcgcgccccggtgagtccgacgacgccgtctgggccgacgcagaggactccttcacccctcccgttgcgaccccggcgagagacctgctcgaggagttcgaggaggaggccggggacggcagcatccagagcctcgcgctgggcgcgcttgacaacagcttcttggttggagggtcagggatacaggtggtcaagaatttccggcatggcgtgcacggcaagggcgtctctgtgaggatatctgatggccgtggtggtgggaacgcgtacatgacaccgcagaaggctctgcttatgcgtggcgagacgaatatgcttctgatgagccctggagagactggcactcgccattccaatggcgtccatcatgttgatatagagactggcaaggttgtggctcagtggaggtttgagaaggatggaactgacatcacaatgcgagacatcgccaacgacagtaagggcgcgcagctggaaccctctggatcaaccttcttaggattggatgacaaccggctatgccggtgggatatgagggattccaggggcagggtgcaaacaattgggagctcatctgagtcaccggtgctgcaatggtcgcagggccatcagttctcaaggggcaccaatttccaatgctttgcaagtacaggggatggttcgattgtggttggttctgtggatggcaagattaggctctattccaagagttcgatgcggatggcgaagacagcattcccagggcttggatcaccaatcacacatgttgatgttacttatgatgggaagtggattctgggcactactgatacatatttgatcttgatctgtaccatctttaaggacaaggatggtaaagagaagacaggattcagtgggcgtatgggaaataggattgcagcaccaagattgctgaagctctccccattggattcaattttggcagggtccgagaacaaattccatggcgggcagttctcttgggtgaaggacagcaaccatgagtgctaccgcgatcaggaagggctcaagagctgctattgttacaaagttgtcctgaaagacgaatccattgttgacagccgtttcatgcacgagaaatttgcaacaaccgactcccctgaggctcctctggtggtggcaacacccatgaaactcactgctgttcctttcgtggtgcgagaatctacaggatggcgcggccgacgggggcagggcgccatgggcggaggtacagcggtgcaggtggcagggtggcgcggcgacacggacggagtcgcgatgggcaacgcaagcgaagaagcagcgacgccggttgatttgcagtgggggcggcacgggcggaggccggatggtggcggggcctccactccggcgatctccagcacgagcgaaggagcagcggcgcctgcagtgggggcggcgcaggcggagtccggatggtggcggcgcgcggcggaggagcagtttcgtggtgcgagaatctacaggttcactgctgttccctattgggttcatttgattacttgattttggtgtagcaggcatgttgataatactagtactctttgtgaagattgctggagttgtaatacttgcttacgctgtaactaggtttcggtgtactctttgtataatgttgacgatagcgttctggggtgaagacctcatctcttctgggactggagttgtaactaagtcaccgtgagacagataataaaaccaataacatctgaggtgttgcatcaagtgtacaatacctatggagcagtggcggtgcaggttcttgcagtgagcacatggcaagtcaaggctcttgtgtcatttatgtccagccatgacgcggagagggctcggtccgccacccacggtcgcgacatctacgacgggggctgcttaatggatgtgcagcacgtccagatgttccctggagatggcgccaccaccacgcacaccacctgtttgacaatggtaccaagtagcgccaccgccaggccagcggccaagagtactgctgctacaccagaacgcgtgttccctgctacaacagcttcatctataccctcaattacatcagcagccatggtgacatcggttcctttcaacgagaccaagaaggctgagactgacatggacaaggcggtagagaacttagacaagaccattcaagacctgtgcaccaagatcgatcggatgctggaggcatttcgccacaccaaggtggatttatccttgagcaaggattccactagagatgtggcagcgttgagcgccaacactgatccaacttccatcgcattggaggtcagtacagaggccggctcaactaaccatgttgacacagccaagcttggcatgggaacaaccatcgagtgttcaatgaagtgtgagaaccagttggctgatgatgatggtggcaaagacatggccaaggaggagtggatggagctcatggaagtagataccaagttcaccactatgtatttatgcttcagagatccattgttaatcatcaatgcaattcctcccaggaactggagttggtgcttgagccgtgactactttggagttgtcggcctctctttcgtttcattgaaattggaagtactctatggttgctttgaccggagctcagaatacacagctagccctccaccagtaccaccttggagagcagcaattccacggaacaaagctgagatgacctcaggttctcggccgttaccatggcttgatccacagctttgtcaaggcagcggaggcgtggtggagggcaagggctcaatttttcttggaagtgtatatctgaagggaaactaa

SEQ ID NO: 53281 - DNA, 1887 bp, Oryza sativa
  Clone ID: PAT_MRT4530_55498C.1
atgaggatgcggtggtgggcggcgccgctcgccgccgtgctcgccgtgatcctgctgccgtcgtccaccgccacgctctctcccgccggcatcaactacgaagtggtggcgctgatggccatcaagacggagctgcaagacccctacaacgtgcttgacaactgggacatcaactccgtcgatccctgcagctggaggatggtcacctgctccgccgacggctacgtctccgcgctaggtctgcccagccaaagcttgtcaggcaaattatcccccggaattgggaacctcaccaggctgcaatctgtgctattacagaacaatgcaatatctggcactattcctgccagcataggcaggttggggatgctgcagacgcttgacatgtcagacaatcagattactgggagtatcccgagttcaattggcgatctcaagaacctcaactatctgaagttgaacaacaacagcttatctggagttctacctgattcattagccgccatcaatggccttgctctagtagatctttcattcaataatttgagcggtccattgccaaagatttcttcaagaactttcaacattgtgggaaatccaatgatctgtggtgtcaagtctggagataattgctcttctgtatcgatggatccactttcataccctccagatgatcttaagactcagccacaacaaggcatcgcaagaagccaccgtatagctattatctgtggagtcactgttggttcggtagcatttgcaactatcatagtcagtatgcttctttggtggcggcataggcgcaatcagcagatcttttttgatgtaaatgatcaatatgacccagaagtatgtttgggtcatcttaagcgttatgcctttaaggagcttcgagcagctaccaataatttcaactcaaagaatattttaggtgaaggcgggtatggaatagtatacaaaggttttctacgtgatggtgcaattgttgctgtcaaaagattgaaggactataatgctgttggtggggaggttcagttccaaactgaagttgaagtcataagcttggctgttcatcggaatctccttagactcattggattctgcaccacagagaacgaaagattacttgtttatccttatatgccaaatggaagtgttgcttctcagttgcgggaacttgtaaatggcaagccagctctagattggtcaaggagaaagaggatagcactaggcacagcacgagggttgctttatttgcatgaacagtgtgatccaaaaataattcaccgtgatgtaaaagcctccaatgtgcttcttgatgaatacttcgaagcaattgtgggagatttcggattggcgaaacttttggatcatagggagtctcatgttaccactgcagtacgtgggacagtagggcacatagctccagagtatttgtcaactgggcagtcatcggagaagacggatgtttttgggtttggagttttgttggttgagttgatcactggtcagaaggcattggactttggaaggctagcgaatcagaaaggaggagtgcttgattgggtaaagaagcttcatcaggaaaagcagctgagcatgatggtggataaagacctgggtagcaactatgacagggtcgagctcgaggaaatggttcaggtggccttgctgtgcacacaatactacccatctcatcgtcccagaatgtcggaggtgatcagaatgctggaaggggacggtctcgcggagaaatgggaggcatcacagaacgtcgacacaccgaaatccgtttcgtcagagcttctacccccaaaattcatggattttgcggcagacgaatcctcccttggcttggaagccatggagctctctggaccgaggtga

SEQ ID NO: 53282 - DNA, 1285 bp, Oryza sativa
  Clone ID: PAT_MRT4530_55499C.1
ttgatcagcagcgggcttacttccttcaccgcctgtgtggttttccggcgaagctgtctgtggctcctgctgctgctgccctgcgctcgtactgggttcaggatggaagttgattgggaacttggtgactcggggcttgtcagccagaatgttcctctgcaccctgtctattagaagctttgccgggggttcctccctcagttgctcatcgtcataatcattgttcacatagtaacctactctcatgaactcctgtcccatgtaggaacatgtcaatagcagcacagtgacgccgattatgtcttcttcacggatctttgagggatccggtgggtcagcctggagtacaaaacggtaggtcccaacattgacggggccaacaagcacactctctaattgttggtcataattttcatcttcagcagatccaacatatataagcttccactccagatctaaaaggtaaatcaacaaacaaggagagaccgagtcctcgggccacagtatccgcagatctagcatgattcacccaaactaagaagggggagtgtatgcgcgaggcgctgcagcttgggcaggtcctcctcagagcttggcctgtcgcggatctccgcgttgagcgcgaccaccgtgggcggttcttctcctgcttcgccgcctccgctttctcgacgcattcgttgatgtcggcgtcgatggagccgtagaggcgggcgaaggggtcctcgccggcgacgttggcgccgttgagcctctcgacgtcgtacttgtcgtacttcttgcagatggagtccacccgcgtgaggatgtcgatcacgctcatcttcgcgcgcccccgatcccgatcccgatcacgatccctccgcccgcccgcgacgcgagatcgaggcgaggtcctcctcgacgagcttggccttggttcgccggatctccgcgttgagcgcgaccaccgtggcgcggttcttctcctgcttcgccgcctccgctttctcgacgcattcgttgatgtcggcgtcgatggagccgtagaggcgggcgaaggggtcctcgccggcgacgttggcgccgttgagcctctcgacgtcgtacttgtcgtacttcttgcagatggagtccacccgcgtgaggatgtcgatcacgctcatcttcgcgcgcccccgatcccgatcccgatcacgatccctccgcccgcccgcgagcgagatcgaggcgaggattcgggaggaagcaagcaaccgcgacgctgcccttcctttctccgcccccgccagcccggggatccact

SEQ ID NO: 53283 - DNA, 480 bp, Oryza sativa
  Clone ID: PAT_MRT4530_5549C.1
ctaacatgccgcatacactgactcttctggcacctgttttctacacaaatccacgcccactacgaagctcccgcgcgcgcgggtcgttctgccccccgcattcctttttttttttttcgccagttttttttaacacagaaagtgcagaccgtagccgccgttaaagacacatctatgcacttgctatgaccggtcgacccccaccacttctgctcaatcgcgccggtgcaaatggcgactgtcgtcgagtgcacgcgtccggaaagcttctcgctggagtagtgcaagcgcatttgctccgccacagtatgcatttccacctcgttcgtctgtatcccatgacagtaatcgaccctactccatacccacgccagcttactcacccgatcgcgtcggtagcgcccatatgaaggttgatattttagattcatgccgccccgatcagaccccgtctgttatctgtgcgatacacgccggttc

SEQ ID NO: 53284 - DNA, 1127 bp, Oryza sativa
  Clone ID: PAT_MRT4530_554C.1
atctctggtgtctgcaaatagtatgccttgactgatcttcatgttgtcatgcatagaaccataaaccacacttacatttcccaggcggatcagacttgtatgcaggcatggacaccaaatcaaatgaatataatcaacagtagctacaggtcaggttggagaaacatatctgtctagttagcaagattctgtacattgtatacaggtcaatgagatgtgtcttgctgattaatcacagcagtttgaaggaatctgttccgatgctaattacattggagttaaggaaaggctggacttcaacaggaatgaatatttttcgatcacgaatcaaggtcggccttaaaaaaaaatattgatgtagtcatctagtcctaattaagaatcacaatgccgttgctattcatcagtgctctatacggtcagtaattcacaatttagttgacctcagaatagacatgtcataccagtcttcatggatcatctttcaacatgtagatgccatcatggtcaaaagaatgagagtaaagctgctgggtatgaagctagcagtgtcaaagacaacgagcttctcacttccataaaagctattcaacagaagccacctcctccctgctaattcaattgtcgttctatatcagaactccgagaaagtccatattattgaagaggaggtgccaccaaatacaatggcaagtggtgcaaaatcttcggctcttgtgggggactgggtgtgctgcaaggtcagtagcttcctgataaatctaacaataaatgactattcacttgacccactgtttctagacgaagaatctcgtgaacgacgcttcccctccatggcttctttcttttcttgacagccttggcaaaggaatggaccatcccagcgacgcaagttcccaggttgtgatgaatcttcatgtacggatatcccttgacttggttttaactccacttggcaaatggcacatatgaagagcttgaacatatttcgaactgggtattcggaatccaaccgtttggaaagaaatgcgcatccgtcctcccatatttcctccacaatgtctgggtccatatattctctatctgtatgggatgatgaatccctcgtgccgattcctgcagcccgg

SEQ ID NO: 53285 - DNA, 1527 bp, Oryza sativa
  Clone ID: PAT_MRT4530_55500C.1
atgaagtgggagagcgctggtggtcagaggaacagccaacaacttggtggtggtgtctttggaggagatgcccaccacctgttcgatgaaatgtcgagctgtccaagagctgactcagctgctgtccttcgcgtcactgtgagccagatcatatatccagtgacatctgaggtgttgcatcaagtgtacgatacctatggagcagtggcggtgcaggttcttgcggtgagcacatggcaagtcaaggctcttgtgtcgttcatgtccagccatgacgcggagagggctcggtctgccacccacggtcgcgacatctacgacgggggttgcttactggatgtgcagcacgtccagatgttccctggagatggcgccaccgccacgcacaccacctgttcgacgatggtaccaagtagcgccaccgcaaggccagtggccaagagtactgctgctgcaccagaacgcgtgttccctgctactacagcttcatctgtaccctcaattacatcagcagccatggtgacatcggttcctttcaacgagaccaagaaggctgagactgacatggacaaggtggtggagaacttagacaagaccattcaagacctgtgcaccaagatcgatcggatgctagagaggcatttcgcgacaccaagagatccatttttaatcatcaatgcaattcctcccaggaactggagttggtgcttgagccgtgcctactttggagttgtaggcctctctttcgtttcatcgaaattggaagtactctatggttgctttgaccggagcttagaatacacagctagccctccaccggtaccaccttggagagcagcaattccatggaacaaagctgagatgacctcaggttctcggcctttaccatggcctgatccacagctttgtcaaggcagcggaggcgtggtggttcagagcaaaaacaatggcgtaataggtgatacttcatggactcaattcagatcaaacaatggtgatgctgtgctgttggtgccacaaccatggccacagccgattctcttcccagttcatattatggttgagctagaggtttcgttgaagggaattattgtctcaacaaaaaagttggtcaacttgcaatctttggctcctccttcgctttggagaaatgaggtattcaatttgtgtgcaacaggagggcaagggctaaatttttcctggaaatgtatatatgaagagctacagcagttgcaatgtacctttgagtttactctttggaatcaacatggacagacatataagctattgttacaaaaggagcagctgaaacttggtgcagtctatctcagtttggaagtaaaatcttcagagacatgcttcacttgccggacttacgaggaggacatgttcttacaaatcacaaattttgtaggtcacaactatgaggggagtaacacttgttctacccatcaattcagtcatggttggcctaaatatttggtaagagctaaattcgttcaattccaaagaggcaagattctttag

SEQ ID NO: 53286 - DNA, 1077 bp, Oryza sativa
  Clone ID: PAT_MRT4530_55501C.1
atgcctgtggagacgaaggatcgccgcagcttcgctttcgcccacctctttccccttctctactcttttggtattgtactcggccatatggactccttcaccaacgaccagtacctcctgcagcaccttaggagccagcgctacttcctcgtcacctggtacggggagaacctagctgagacggactttttgcagtaccagctagttcgctccgagtccactcttgctgagctcagcgagcagctcgaggcactccgcgagcgctgcgatagccaggccctgaggatcgttgagctggagcatgccctcaccacccgtggtcgatcggtggcaccgactttggccacgctagcagcttcctccactacgaccctgcgacccattccggtgccggcatcagctttcgcaccactttgggccacaggatctgcgtcggcctccctgtcgatcggtgccaccggcaccgttgcctccggcagccccacgctccgcccggtgactccagcagagggagctgggctttccgccacgtcgggcacaactatgatctttgccacagcaccagctccagtctctaccccgaccccagcactccccaggagcggcacggtgctaggagctgcaccaccactgccactgccgctgcccctaccccctgctccagtgttccccagggtcagcacggtgcttggagttgcaccaccaccaccactgccatcacccccgccttcgactcagcacgtttcaccgaccgtgcccgctgcagaggcattcaccacgctaggcggtggcacacttggctcaggcactcggacttccgccattgaggtggagccgatggttgaggaggaggaggaccccgaggagagggtcatggagctagtcaagcagataccgccactgactcagccacctccagtcgagcactttggcggtagggggcgtaggtgcagcggtgacccggagccctccgggaagcgccgccgcggccgcccccaccgcgactccacaccggttctgatcggcaaccccaacgcacccacgacagcctaccgcagccgcagtcgctccccttag

SEQ ID NO: 53287 - DNA, 726 bp, Oryza sativa
  Clone ID: PAT_MRT4530_55502C.1
accaacgacactctccctctccggcactccacctccctctcccccatcatgtctcttctcaacaacgagagtgagcgccgcccttcccatttcttctcccacccaccacgcatcagccgagagagagcaccgcgagtggataaacgcatccttatccactcgcctcctcctctcacccgtccctctctctccctctcgatcactccctctcatccccgcccccacccttctcgtctctcccttgtcggtagcagaggaggcggcagcgatggcgttaactgctcccgtgggctggatccgacggtggctgtggcatcggcggctcccgctggcgaatccggcggaggcggcggcggtgttgtttctggcaggcggattcggtggaggcttttccggcgggtggatccagcggttctctaccccctcgtcctcaccctccgcgcccaagcttgtcactccccctctgccccaagcttctcccgcggatccgccggcggcggcggcggcttctcccttggatccggtggcggcgacgacgttggtggcacccaccggcgatccggccaagggaatctgcctgacgccgccgacgtcccctcggcccgatccgccgttgttgttggttgtgtatttgttgtttgtatatgtgatgatgatgtcgttgttacgattgattttggggtttttatgtgatgatggtgttgttgctccccctccccccccctt

SEQ ID NO: 53288 - DNA, 1635 bp, Oryza sativa
  Clone ID: PAT_MRT4530_55503C.1
atgaagtgggagagcgctggtggtcagaggaacagccaacaacttggtggtggtgtctttggaggagatgcccaccacctgttcgatgaaatgtcgagctgtccaagagctgactcagctgctgtccttcgcgtcactgtgagccagatcatatatccagtgacatctgaggtgttgcatcaagtgtacgatacctatggagcagtggcggtgcaggttcttgcggtgagcacatggcaagtcaaggctcttgtgtcgttcatgtccagccatgacgcggagagggctcggtctgccacccacggtcgcgacatctacgacgggggttgcttactggatgtgcagcacgtccagatgttccctggagatggcgccaccgccacgcacaccacctgttcgacgatggtaccaagtagcgccaccgcaaggccagtggccaagagtactgctgctgcaccagaacgcgtgttccctgctactacagcttcatctgtaccctcaattacatcagcagccatggtgacatcggttcctttcaacgagaccaagaaggctgagactgacatggacaaggtcagtacagaggccggctcaactaaccttgttgacacagccaagcttggcatgggaacaaccatcgagtgttcaatgaagtgtgagaaccagttggctgatgatgatgatggcaaagacatggccaaggaggagtggatggagctcatggaagtggataccatgttcaccgctatgtatttatgcttcagagatccatttttaatcatcaatgcaattcctcccaggaactggagttggtgcttgagccgtgcctactttggagttgtaggcctctctttcgtttcatcgaaattggaagtactctatggttgctttgaccggagcttagaatacacagctagccctccaccggtaccaccttggagagcagcaattccatggaacaaagctgagatgacctcaggttctcggcctttaccatggcctgatccacagctttgtcaaggcagcggaggcgtggtggttcagagcaaaaacaatggcgtaataggtgatacttcatggactcaattcagatcaaacaatggtgatgctgtgctgttggtgccacaaccatggccacagccgattctcttcccagttcatattatggttgagctagaggtttcgttgaagggaattattgtctcaacaaaaaagttggtcaacttgcaatctttggctcctccttcgctttggagaaatgaggtattcaatttgtgtgcaacaggagggcaagggctaaatttttcctggaaatgtatatatgaagagctacagcagttgcaatgtacctttgagtttactctttggaatcaacatggacagacatataagctattgttacaaaaggagcagctgaaacttggtgcagtctatctcagtttggaagtaaaatcttcagagacatgcttcacttgccggacttacgaggaggacatgttcttacaaatcacaaattttgtaggtcacaactatgaggggagtaacacttgttctacccatcaattcagtcatggttggcctaaatatttggtaagagctaaattcgttcaattccaaagaggcaagattctttag

SEQ ID NO: 53289 - DNA, 806 bp, Oryza sativa
  Clone ID: PAT_MRT4530_55504C.1
ccggccgggctttcctcccggtttctctcctcccctcgctcgccttctcggtttccttctatccttctcctcgcgctcctctcaaccaacgacactctccctctccggcactccacctccctctccccatcatgtctcttctcaacaacgagagtgagcgccgcccttcccatttcttctcccacccaccacgcatcagccgagagagagcaccgcaagtggataaacgcatccttatccactcgcctcctcctctcacctgtccctctctctccctctcgatcactccctctcatccccgcccccacccttctcgtctctcccttgtcggtagcagaggaggcggcagcgatggcgttaactgctcccgtgggctggatccgacggtggctgtggcatcggcggctcccgctggcgaatccggcggaggcggcggcggtgttgtttctggcaggcggattcggtggaggcttttccggcgggtggatccagcggttctctaccccctcgtcctcaccctccgcgcccaagcttgtcctgcggcggtggcatcagcgctcccacgggcagatctggcagaagtggtggcggcggcgtttctgatgggtagatcaagcggtcctccacacactccccctctgccccaagcttctcccgcggatccgccggcggcggcggcggcttctcccttggatccggtggcggcgacgaccttgtcaccgccttcctcgtggatcgccaaattcgaagtttccaacgtctactccggtggcgacaaggacgggatatgggtccagatctcctag

SEQ ID NO: 53290 - DNA, 1323 bp, Oryza sativa
  Clone ID: PAT_MRT4530_55505C.1
atgaagtgggagagcgctggtggtcagaggaactgccagcaacttggtggtggtgtctttggaggagatgcccaccacctgttcgatgaaatatcgtcctgtccaagaggcgactcagctgctgtccttcacgtcaccgtgagccagatcatatatccagtgacatatgaggtgttgcatcaagtgtacgatacctatggagcagtggcggtgcaggttcttgcagcatttcgccacaccaaggtggatttatccttgagcaaggattccactagagatgtggcagcgttgagtgccaacactgatccaacttccatcgcattggaggtcagtacagaggccggctcaactaaccatgttgacacagccaagcttggcatgggaacaaccatcgagtgttcaatgaagtgtgagaaccagttggctgatgatgatggtggcaaagacatggccaaggaggagtggatggagctcatggaagtggataccaagttcaccactatgtatttatgcttcagagatccattgttaatcatcaatgcaattcctcccaggaactggagttggtgcttgagccgtgactactttggagttgtctgcctctctttcgtttcattgaaattgcaagtactctatggttgctttgaccggagctcagaatacacagctagccctccaccagtaccaccttggagagcagcaattccatggaacaaagctgagatgacctcaggttctcggcctttaccatggcctgatccacagctttgtcaaggcagcggaggcatggtggttcagagtaacaacaatgatgtactagatgatacttcttggactcaattcggatcaaacaatgtttgtgaggacaacatagtcttgcacacatgggcctatcgagtggttaaattagttgctgcaagattggttggtgatcaaggctctcatggagtatatgctgatagtagtggtgaagaaggcgtgaaggcttggtggttgaggcagcaaaagcatggtagagagtgtggttgtaatgctcaggttttatgtatgctggataagtggattcaacagtgggcagggtctacatcagatggttcgaaggtcatcaaacaattgttctgggattctgcccaacaagacatttccctgcaggaggctagacaagtgggctggctttgggcccattcagctagggagaaggagactagaaaagaggcaaagcagccagcagctagggtcatcgatgaatcaattaccagaacgcctcaggcgacagcttcttcctccttgctgctgcttcccctctcaattcctattctctag

SEQ ID NO: 53291 - DNA, 1062 bp, Oryza sativa
  Clone ID: PAT_MRT4530_55506C.1
atggaggggcaagacaaacaagcagtagcagatctccaggagcggaggcggccgcggcggcggtcgtggtggtacatggtccagatcgatgtcaaacggtggctacacaggaggaccatgttgtttctgagagacaattgcggcctgaattcactgtgcgaggataggtacatcaagctcacacgcttgggcactcatcgcattctcatccattatgccaggctgatgcagtgcttgtactacaacatcctcatgaacgaggttgggatgaagagctgggaggagtacactgagaaagatagggagaaggtccgggcgctgatagacaacatcgtcgagctctgccgtagttcgattcccaggtcgccgcacgacgtggttcgcgaacgtcgacgactggaagaggatctccttgtcgtgagggcattcacgaggcaggcaacctcgccatcgtacaaggcagcccaaccgtggccggagccgacgcaacgcttcattgtcgtgggagagaggatgatcgaggctttggtggagagtggaggacatgcactaggcagagacatgatgttcaagtttatcgcaacatcacgttatatggactttgtagcctcgtccctggaaagagttccagactacaataacaccaaccctattagagcagatataccgtttggcgaaacgatggggcttaaaacttcgctggctcaggctcttcctctcgagaggagacgagaatcatatgaatccacctgtggaatgccattggctcgccgtccttttcgaacaccgcccctcatgctcacacagtcacacagccgcagcttaacggttcaatcaatcagtacaaccacaccatcacaaaattcacaacgcagacgaatcctgtggattgcatacagcatgctggtccttgggacagagagagaccctgaagattttggccagaaatttctggagatttcctttgtgggagaagacgagctacgacagctaatgctgtcacctcttacagcttgtaggttgcaactaatcgagcctggtgataagaatctcaatttgtaa

SEQ ID NO: 53292 - DNA, 2403 bp, Oryza sativa
  Clone ID: PAT_MRT4530_55507C.1
atggagtgcgttcgtgacaatatggtatcagagcagtcgattcgtggggttttaggtgtggagatgaagtggaagagcgctggtggtcagaggaacagccagcaacctggtggtggtgtctttggaggagatgcccaccacctgttcaatgaaatgccgagctgtccaagaggcgactcagctgctgtcctttgcgtcaccgtgagccagatcatatatccagtgacatctgaggtgttgcatcaagtgtacgatacctatggagcagtggcggtgcaggttcttgcggtgagcacatggcaagtcaaggctcttgtgtcgttcatgtccagccatgacgcggagagggctcggtccaccacccatggtcacgacatctacgacgagggctgcttactggatatgcagcacgtccagatgttccctggagatggcgccactgccacgcacaccacctgttcgacgatggtaccaagtagcgccaccgccaggccagtggccaagagtactgctgctgcaccagaacgcgtgttccctgctactacagcttcatctgtaccctcaattacatcagcagccatggtgacatcggttcctttcaacgagaccaagaaggctgatgctgatatggacaaggcggtggagaactcggacaagaccattcaagacctgtgcaccaagattgatcggatgctggaggcatttcgtgacaccaaggaggatttacctttgagcaaggattccactagagatgtggcagcgttgagcgccaacactgatccaacttccatctcattggagttggctgatgatgatgatggcaaatacatggccaacaaagaatggatggagctcatggaagtggataccaagttcaccgctatgtatttatgcttcagagatccaatgttagtcctcaatgcaattcctcccagaaattggagttggtgcttgatccgtgactttggagtggtcagcctctctttcgtttcatcgaaattggaagtaatctatggttgctttgaccggagctcagaatacacagttagatctccaccagtaccaccttggagagcagtaattccatggaacaaggctaagatgacctcaagttctcggcccttaccatggcctgatccacagctttgtcaaggcaacggaggtgtggtggtaaagctcttacaaccctggtcgtctcctattcaagaaggtgttcgagctgaaattgaagcactgaatttacatggtgagcatcctgaaatctctttgaactacagtgttgcccagttcatgagtagaacaattacttccactaagggcttgctgcaaaatctggttgttggatggtgtatttgctatgagctgcattcatctggtacatgttggactgcctaccagcatatgcagtattcaatctatggttggtcatttgatgatcctggtatgtttgtgcaactgaagctaatttcctggccaatgcatgacacatggggtgagtgcttgtttaattgtgctaatgaagatcaggaggcccaaaaggtattggtcaatggtaggaatttgcagggagtgctgattcctacagagctcaaaattccatggccaccaccaaacttgactgttcagatatatggagtgctcactacaattacgttgtgtaatggggataatttctcaattaactataccattggtggtattcacaatgagatggtttggggagaatcactagaagatagcagtcatatctccaattgcttcaccatgttgcaaagtgctgaattggtccagtacaaggttgattttgctggtagctcattgcttgaaaatctagctttgcaaggggatgattccctgtcatttttacttcctgaaggggtcactgtagaagatcaagaaatggtgactcggattaagatgacggaacaatctgtctccaaggatgaaatggatggaccaaagcttggtgttgccaagttcagtttggataaattaccaaatcattcagttggaagtatcatggctatggcattattgcttgtgcaatcttcggcacagatcgttccaagctccatcttggagatgggtttgttcaggtgcaaccaagttcgacttcagattgaaaattcaatattttcagcaagttgtttcatgagcatgcattttcaaatgagaaatgatagcagcagttttcaaggcatgaaggagaaacaaactgttgatattgtggaaacttctgcaattcaggaggctatagttattgagttggagaagaactggccctgggatcctggtgtttccagttcagcatctcctcaatgtcggcaagggtaccatcctttggatcgacttggggacaaatcgaatttcaaggaatggagtgggttcgtgacaggtgtttag

SEQ ID NO: 53293 - DNA, 320 bp, Oryza sativa
  Clone ID: PAT_MRT4530_55508C.1
tggtacgcctcgcaggtaccagtccggacattcccgggtcgacaccacgccgtccgctggtgtcgaagttagctatgcacacgtctggacttaggacagaatgcatggagatcttctcggtaaccatgtcatcagcctgttggttaacgatattgacaggcacacccttggtagcttccctgtggaacgctcaggcttgatcacttcaggtcatgcagtgtcttcgttccattgggtgcatacatgttccgtgacgagcgtcatgtctcacccgtgttgcataatactagttctcattgactagactagcagtagctacc

SEQ ID NO: 53294 - DNA, 2463 bp, Oryza sativa
  Clone ID: PAT_MRT4530_55509C.1
atgggcggaggtacagcggtgcaggtggcagggtggcgcggcgacacggacggagtcgcgatgggcaacgcaagcgaagaagcagcgacgccggttgatttgcagtgggggcggcacgggcggaggccggatggtggcggggcctccactccggcgatctccagcacgagcgaaggagcagcggcgcctgcagtgggggcggcgcaggcggagtccggatggtggcggcgcgcggcggaggagcagtggcgggagcagtggggcggcgcggacggcggggcctccactccggcgatctccaactgcagacccgagcagtcaattcgtggggtttctggtgtggagatgaagtgggagagcgctggtggtcagaggaactgccaacaacttggtggtggtgtctttggaggagatgcccaccacctgttcgatgaaatgtcgacctgtccaagaggcgattcagctgctgtccttcgcgtcaccgtgagccagatcatatatccagtgacatctgaggtgttgcatcaagtgtacaatacctatggagcagtggcggtgcaggttcttgcagtgagcacatggcaagtcaaggctcttgtgtcatttatgtccagccatgacgcggagagggctcggtccgccacccacggtcgcgacatctacgacgggggctgcttaatggatgtgcagcacgtccagatgttccctggagatggcgccaccaccacgcacaccacctgtttgacaatggtaccaagtagcgccaccgccaggccagcggccaagagtactgctgctacaccagaacgcgtgttccctgctacaacagcttcatctataccctcaattacatcagcagccatggtgacatcggttcctttcaacgagaccaagaaggctgagactgacatggacaaggcggtagagaacttagacaagaccattcaagacctgtgcaccaagatcgatcggatgctggaggcatttcgccacaccaaggtggatttatccttgagcaaggattccactagagatgtggcagcgttgagcgccaacactgatccaacttccatcgcattggaggtcagtacagaggccggctcaactaaccatgttgacacagccaagcttggcatgggaacaaccatcgagtgttcaatgaagtgtgagaaccagttggctgatgatgatggtggcaaagacatggccaaggaggagtggatggagctcatggaagtagataccaagttcaccactatgtatttatgcttcagagatccattgttaatcatcaatgcaattcctcccaggaactggagttggtgcttgagccgtgactactttggagttgtcggcctctctttcgtttcattgaaattggaagtactctatggttgctttgaccggagctcagaatacacagctagccctccaccagtaccaccttggagagcagcaattccacggaacaaagctgagatgacctcaggttctcggccgttaccatggcttgatccacagctttgtcaaggcagcggaggcgtggtggttcagagtaacaacaatgatgtactagatgatacttcttggactcaatttggatcaaacaatggtgaggcatttagggtttcaacaagaaagttggtcaacttgcaaccttggcctcctccttcgcaatggaggagtgagacacatgagctattgttacaaagggagcagctgaaacttggtgcagtccatctcagtttggaagctagcactttcagtaagaattctcgtggaatagaactggttaaatgttcagagagatgcctcatttgtttagtttgtgaggacagcatagtcttgcacacatgggcctatcgagtggttaaattagttgatgcaagattggttggtgatcaaggtaaaaccatacaatttttagcaatttgggagtttgcaaacaaagaagtagctctcattcagacaaagaagcatatgcatgtttctcagcccactgatctcaatatttgcatgttacatctgggctctcatggagtatatgctgatagtagtggtgaagaaggcgtgaaggcttggtggttgaggcagcaaaagcatggtagagagtgtggttgtaatgctcaggttttatgtatgttggataagtggattcaacagtgggcagggtctacatcagatggttcgaaggtcatcaaacaattgttctgggattctgcccaacaaggcatttccctgcaggtaccttgggatcttgggggcattaatctggcgagtcagttgcatcggcttggggacaagccgattcttaacgggggaagaatgtcatgtacatggcctgctgtgatgtctttccaggaggctagacaagtgggctggctttgggcccattcggctagggagaaggagactagaaaagaggcaaagcagccagcagccagcagccagggtcatcgatga

SEQ ID NO: 53295 - DNA, 414 bp, Oryza sativa
  Clone ID: PAT_MRT4530_5550C.1
atgtctcctgcctccatccccacctcgtgcaaatcgggggaggtggacttcggcgtggaggaggtcggcggcgtggaggagttagcgaacctcgagtcagcacggaggcgaagcggagtttgtcggtggcggcggctgcagtacgaggccacgtcggcgtcgttcctgccgatgggtggtcgattcgacgagcgtgctgctagaccagtgcttctgtttacagatttgttggtctacatattagtaaattcagatgagctgatgaatcagggaattcagattgctatgcctaacatccttagtttatttgatgatgctacatccttcttcaactttaagtttcaggatattaactacgtcattcagatcccacactgttgctgttatgaagtgggaatctctattaccaaatga

SEQ ID NO: 53296 - DNA, 241 bp, Oryza sativa
  Clone ID: PAT_MRT4530_55510C.1
cccttccaccattgaataccaccttgccaacagctatgttttctcggagtctgctccgaaacactcacctaccatggcggacgaagccaaccatgctactatagcggcgctgctggttgggatgatctacaccaccgggacgctgatgcacccgcaaactcagatgcgctctacggggggtgacaagatgcatgctcacctcacactggaggaacttcgtctattggagagaatacacaca

SEQ ID NO: 53297 - DNA, 223 bp, Oryza sativa
  Clone ID: PAT_MRT4530_55511C.1
gaccggaactgcagggccgacccacgcgacccgttcgtgttactccccttggacgccgactccgaggagtgggtcgtgtatgagcgcccacgcggttacttcctaccggatccggaccgtaagaggaattgaccttagacgtgctatacaatgggaggatgcgtagcatgcttagtgcacacagggacctgggatacctggaggacggtggagaagcttctaa

SEQ ID NO: 53298 - DNA, 1928 bp, Oryza sativa
  Clone ID: PAT_MRT4530_55512C.1
ctccgctccattcccccctcccgtgtcgcagcgagaagcatccatcggaattctcgtcgaccaccgcaaccgccatgggcggcgcccacagccgcgaggacctcgacctcacctcctccgacgacgaggacgacgacgaggagtacgacgcccagaccgccacctccgccgcctctcgagaggacatcctccggacctctaccccctcctccctcgagttcctcgacgcgaagctgaaagcgctcgatctcaagtaccaggcgccgaacgcggcgaagctgtacctccacgtcggcggcgcctccgcctccgcgcgctgggtgccggccgagcggcgggcgacctacgccttcgtcgacaaggcgacggcggcgggcgacagcgattgtggcggcccgaggtgggttctggaggttggtccgggtcccagggtctccgcccccgtcggcccggcgctacagctcaaggcgctccccgcgcagcgccgggccgatttcgccgcgggcggctccgtctgggcgctgcggctgccgaccgacgccgccttccgccgattccggcaggagtacgaccggtgcctgttcgagaacacgtatggcgtcgaggccacggatgagggccggaaggaggtgttcggcgctgacttcgccgcgtgggcgcgccccggtgagtccgacgacgccgtctgggccgacgcagaggactccttcacccctcccgttgcgaccccggcgagagacctgctcgaggagttcgaggaggaggccggggacggcagcatccagagcctcgcgctgggcgcgcttgacaacagcttcttggttggagggtcagggatacaggtggtcaagaatttccggcatggcgtgcacggcaagggcgtctctgtgaggatatctgatggccgtggtggtgggaacgcgtacatgacaccgcagaaggctctgcttatgcgtggcgagacgaatatgcttctgatgagccctggagagactggcactcgccattccaatggcgtccatcatgttgatatagagactggcaaggttgtggctcagtggaggtttgagaaggatggaactgacatcacaatgcgagacatcgccaacgacagtaagggcgcgcagctggaaccctctggatcaaccttcttaggattggatgacaaccggctatgccggtgggatatgagggattccaggggcagggtgcaaacaattgggagctcatctgagtcaccggtgctgcaatggtcgcagggccatcagttctcaaggggcaccaatttccaatgctttgcaagtacaggggatggttcgattgtggttggttctgtggatggcaagattaggctctattccaagagttcgatgcggatggcgaagacagcattcccagggcttggatcaccaatcacacatgttgatgttacttatgatgggaagtggattctgggcactactgatacatatttgatcttgatctgtaccatctttaaggacaaggatggtaaagagaagacaggattcagtgggcgtatgggaaataggattgcagcaccaagattgctgaagctctccccattggattcaattttggcagggtccgagaacaaattccatggcgggcagttctcttgggtaacagagaatgggaagcaagaaaagcatcttgttgcgacagttggcaaatttagtgtcatttggaactttcagcaggtgaaggacagcaaccatgagtgctaccgcgatcaggaagggctcaagagctgctattgttacaaagttgtcctgaaagacgaatccattgttgacagccgtttcatgcacgagaaatttgcaacaaccgactcccctgaggctcctctggtggtggcaacacccatgaaagtcagctccttcagtttagccaatagacgattacactga

SEQ ID NO: 53299 - DNA, 318 bp, Oryza sativa
  Clone ID: PAT_MRT4530_55513C.1
atgccgggctgctacagcacctacgacagacaggccacggggacagtcgacccgcgacttcctcagcgctgtccacttcaccacacagcttcgagtccggggagtcacatccccggagatcccgcgggggacccggccgccagcctcgtccccagccctccggcagccagccagcacagccagcgtcagctcctggacagaccacatcaagccgcttggagcagccggtggggcgccctcgtccagctcacgcgccgcgcggccgctctagaggatccaagctaatacgcgtgcatgcgacgtcatagctcttcaaaa

SEQ ID NO: 53300 - DNA, 487 bp, Oryza sativa
  Clone ID: PAT_MRT4530_55514C.1
gtcgttattatgattcctgttacggcgccagacagggagagctgaaactcacaggggggcatgcactttaacagccataacagacagccaaggctaatttgcactaaacacctttagtccgaatagaaagctagctcaaatcgatcacgcgcttaccgtggtctgattgtggatgccatatttggatcaataacttcaagcgagcatttgtgcataggagtgcggacatcgacgagtgcattgatgatcaagacagcatatgctcaggatgcagagaagatggataaactgaacacaatttgtttcactctaatgacccatggacctgatgctgatgtaagtgatgtttcggagaaggaacaggcagaacaacatcattcataggaaggccggggcacgaggcagctatgtataggttatgtcttgattttgataaagtaactcttaattgatgtaggtgaaaagaaattttggctttttaattgat

SEQ ID NO: 53301 - DNA, 724 bp, Oryza sativa
  Clone ID: PAT_MRT4530_55515C.1
gtttctttgtcttcacaaccatggttcatcctataggcttgaggcatggttcatataggcttgaggtagaacagaagttctcctgaggaaccggccatctgcctgctgttgcatactgtatcatatatcacacgagtaaactcctacccaataagtgtgaggaaatgccacacggataaggaataagactcaaaatatttgacctgatcaaccatcaggcgttcttattctgatgttactgactgaagttgggggatgccagtacagtttctagacgggacaagaaccagggagaaaagaaggagcatcatcacgacggggatgaagacaaaagggcggccgggcggcggtagcggcggcaacaccaatgggagccacaggaggatcaccgccgccgccgccatcaacatcatcaggacgctcttgtccatcttggcctcccctgcagctgttgactggactgcctcctccggccggaggctcaccggttgctccactctccggtgttcatgtgtgttttgtgatgaggaagtgttgtatggatgtttccagtgagaagttaacacaggccaagctactatatatatggccagcagcctgtacactttgaatctagcggcaagagcgagatggtatgtttacctctgtgaaaaagtgtgaccgtctgttttgttgctacctgttaccggtatatactcgtattaaatatgatacttcttagtag

SEQ ID NO: 53302 - DNA, 1830 bp, Oryza sativa
  Clone ID: PAT_MRT4530_55516C.1
atgtcgcagcagcacggccgcggccacattgcccactgcctcggcggcgccctcgccggccgagacaccgtcgccgtctccggcaatcgccgcctgaccggcgctggcctcgccgacggggcgcgtaggctggccgccgccctctccaacctcggcgtccgccgtggtcacgtcgtcgccgtcgtcgccttcaacagcatcgagtacatcgagctgttcttagccgtcacttacatcggagggatcatcgctcctctcaactaccgctggagctttgaggaggcctcacaggcactggagcttgtgcagccaacagtgttcatcttcgatggcagctacagctcatgggcgcttcggctgaaggagagcaacagcttgacatcggttaatctttacctcttcctggggaatctctgcagcatcagccaagctgcaaactttgtatcagttgtatcagttgagcagatcaagaggagctcaggaggaactactagagcagtagagcctgtgtctgctccaaatgatgttgctctgatatgcttcacatctggcactacgggacgaccaaagggtgtagcgataagccatacatctttgatcattcaatcccttgcaaaaattgccattgttggctatggtgaggatgatatctacctgcatacagctcctttgtgccatattggagggatctcttcatgcttggcaatcctgatggctggaggctgtcatgtcctgatacctaaatttgacgtgaaatcggctttcgacgccatcctagaacacagagtgacttcgttcatcactgttcctgcaatcatggctgacctactatcctatgctcggaaacagaagatattgaaccacgggatgaccgtgacaaagattctcaatggcggtggcgggttgtcgagtgaattgataactggagcttctcacttatttcctaatgccactatcttctcagcttatgggatgactgaggcctgttcatctctgacattcatggttctcaccaggccaaaaattcaagaacctaaggaccagttaggcagctcttctgaaggtgtgtgtgttggcaaaccagcgcctcatattgagatacagatcaacagaaatggaagtaacagtagttcttcttcaccaattgggaatatcttgacaagaggcttacatacgatgtccggatactgggtgaacaacagcatagacacatcagattctgtcaggaatggatggctcgacaccggcgacattggatgggtggataaaactggtaatctgtggctcatggggcgacaaaagggaagaatcaaaactggaggtgaaaatgtgtacccagaggaggttcaagctgccctggctctgctcccagggctggctaaagccgtggtgattggcatgccggatagtcgtctcggggagaaaattgttgcctgtgttagcatcagggatggctggaactgggttgatgcaagagctgtgcacaagggggaaggcagagaagtctctgcacagatgcttcaagaccattgccgtacaaacaaattcgcgtgagtcaaggtgccaaggatatattatcagtggagtaaaccatttccagtgacaacaacagggaaaattagaagagaacagttaaaggctgagatattagcaagcatgaaactacacagcaatttatagtcttaggctattgttagtgaccatggcagcacaaaaaagcacattatgttcttcatcttcagctggtggtacatgcacatcacagcaatatcccaattttggtctctctttttcatttttacaggcagaatgctatcctacttgttattt

SEQ ID NO: 53303 - DNA, 276 bp, Oryza sativa
  Clone ID: PAT_MRT4530_55517C.1
aggtggtagaacacgcagtccggcgagcagtcggtggcgcaggacaaggggtcggggggcaccgtgccgtacggggcggccgtctggtcgcgctccggcgccgagcgcgtgttcggctccggctccggcttgggcggcttgggcttgggcttgggcggcttgggcttcggcagcggcttgtccttgtccggctccggcggcggcatggccggggcacgggaggggttcttggacgccggagaagaggaggagacggcgatggcgtgcgctgcttga

SEQ ID NO: 53304 - DNA, 347 bp, Oryza sativa
  unsure (1)..(347): unsure at all n locations
  Clone ID: PAT_MRT4530_55518C.1
tgtgctagtgcttgtcactgggggacacagcagttcaatggcggagacgggcccggcggccatcgtggctgcnctgacgcgcgccattgccgacgacggacgtggaggtggcgcgacgttgggcggcggtgcgccgtactgcccgcnccgtcgttggtcgtgccgccgcgtcatgccggaggaggagctggtcggggtcgtctccgcggcgggggtacctccgtttcctctcccgcgttgctcccggctagcgaacggatgctcacgtacgtacgtgggctagctgctgtntcgtctaccgatgttttacgtgtacagtgcgaagtagtcacggccggcgaaaaagc

SEQ ID NO: 53305 - DNA, 1363 bp, Oryza sativa
  Clone ID: PAT_MRT4530_55519C.1
ggcacgagcagggtgagggcgacgggggggaaggacaggcacagcaaggtgtacacggcgaagggaatccgcgaccgccgcgtccgcctctccgtcgccaccgccatccagttctacgacctccaggaccgcctcggcttcgaccagccgagcaaggccatcgagtggctcatcaacgccgcctcccccgccatcgacaccctcccgtccctcgaccccgccgccttcgccgccattccccacgccgccgccgacgccgcgcccacgcggcggcgttcgcagcagcagcagcagcagctcagcaacaagtccggatgcagtagcacgtcggagaccagcaaggggtcggacaaggaggtcaccgtggcgagcgccccggcgcaggccgcgtcgttcactgagctgctcattgctggggtggcggcgtcgtcggcggggggtggcgccattggcaacggcgccgactgcgtgggcatcgcgcaccccgggaaaggaggcgcggagggggcgtccacgtacggcttctccgccgcctcgagcttcggcgacgcgccaccgatcggcatggtgccggcgccgccgttcaacttctccgcccccggcgccgacatggcggcgcactactcgctcgcccaggaccagctggcggcgcctccgcctcctgccggaggcgactacaacctcaacttctccatgtcctcgggtttcttgggtgccaatagggggacccttcagtccaattcgccgtcgaacatgtccggccaccaccaccaccaccatcagcagcagctccagaggctggacggctccaccatttccttcctgcttggccacgccgccgcggcggcgcacccggcggcgtccgagggccagatcaccagcaccgccgcgttgcagctgtgggatggattccgccactccggcatgaaggagaagagcaagaactgatcgatcccagcaacgcatcctccaaaggaactgaagatatcatcatcagattaattgttgtcacctttccagcaagagctcaccgtggggagctgctacaagtttattgcgatgactgcccgtgttcttttagctgggtcatcgttctgctatgctgttttttggccatcatgaacaccctgccgctgctgctacctgccattgccatcactcagacaatcttgtgaatttccttctttttcctagatgaagctgctgtacaaatttttgtgggagacgtgagtttcgaacaagaataagcgtgtcccgtagccagcgttaaacctttcccttccagaaatatttttcgagtgaattgaaattcatatgtgcctctggttattggagtggcaaaaaaaaaaaaaaaaaaaaaaaa

SEQ ID NO: 53306 - DNA, 1409 bp, Oryza sativa
  Clone ID: PAT_MRT4530_5551C.1
cccacggaagatcgcgacgtccgagccgcccaagggttggaatcccaactatggcgtcgtcggcagcggcgaccggcgactggccttctcccgccagctctcctcctccatgcctcgcctcgcccgctccgactcttccatctccatgccccccccgtccctcgcccccaccggagccatcaccttccgctggctcgccacccgccccatgcgccgcctcgccctcctcatcgctctcaacgtcgcctactccgccaccgagctcgccatcggcctcctcactgcccgcgtaggcctagtctccgatgctttccatctcacctttggttgtggaatcctcactttctccttgtttgccatggctgcctccagaaccaaacctgatcacctctacacctacggctataaaagattggaggtccttgctgcctttacaaatgccctcttcctgctcttcctgtctttctccttggctgttgaagcactacatgcatttatgcaagatgagtctgagcataagcattatctcattgtttctgctgtcacaaaccttttggttaatttacttggtgtttggttctttcggagctatgctcgtgttaacatagtttacaggaaagcagaggatatgaattatcactctgtatgtttgcatgttcttgccgattcagtacggagtgcaggcttgatactagcttcctggtttctttcattgggggttgaaaatgcggaagtgttgtgcctgggaattgtttcagtggcagtgttcatgcttgttttgccactctttaaggctactggtaatatccttctgcaaattgcaccaggcaatgtgccaccttcagctcttaccaagtgcttcagacagataactgcgtgcgaggatgtttctgaagtatgtcaaggtcgattttgggagcttgtacctggtcacgctgttggatctctcgacatccgggtgaagaatggtggtgattgccagtccgtgctcgactatgtgcatggattatatcaagatttgggcatacaggacctgaccatccaaaccgatgaataaggcatcatctagtgtagaaaggagtcataggggaaaaaaggatagatcaaactctcgcagtgtattgcttgggcgtgcttatttgatagtacggtatatcgctttgtactcgactgctgcagtttgtactcagatttactcagtagctactacaatttgtactcacttaagctcgtttgctatggcatcatggttgaaattcgttgacgatcttctctccactcgtcttttaagatgctgagaattattgttattattgatattaataaataataatgagtgacctatgtgcatctcttctccatggtggccgagtgtcaccatgttaaaaaaaaaaaaaaaaaaaaaaaaa

SEQ ID NO: 53307 - DNA, 495 bp, Oryza sativa
  Clone ID: PAT_MRT4530_55520C.1
atggaggcaaagcaaagtgattggttaacaagcgagggagaccgtggcgcctccggcggcggggagcctccgaagacaaggaagaagcctagtcctgcccccgcagcccgcgaaccgctggagcggccgggagggggggtcggggccttgtggtgccacgtcatgcccctcgggcccttgcaccgcttcgccccgaggccctcgcccagccgccatttggcgggaggagcgagcgaggagggggcccaggctgagcttccattaatgcgcgcaacgccccaactgccccctgtcgtatttaatgcagtgaggcagacggctgtcccccgtgtcaggcgagggacggcgctggccccactcaagggcaagctatggcttagcttccgggcgaaggcacgggtcgagcccggactaccagagaggttccagaggggaaaaggagtagggcgtgaaggcagtgatggacttctgaaggtggccgcaatcatccattaa

SEQ ID NO: 53308 - DNA, 1034 bp, Oryza sativa
  Clone ID: PAT_MRT4530_55521C.1
caggccaataatctttgcatggatcgaaaagtcagaatttaactgttctttcaaaaaagatcagttcactgttgtatagtaaatccctactccgggtataattttatttcataactagcattgttgcaacttagtttatagaactaacagttgtagcttaatttattctaatctgatctcatgtctggcgatgtgttggtaattgattagtccttcttagggtctggaatgaaaatgctgatgtttctgttgttcaccttctgaaggggccttgcgttgttctcataaccgtcagccacggcttccctgagaagatcaagctgatactgtgccacagtctgggccaaaagaaaaaccctcttgaaaaccgtccagatcactccctccgtgcaaggcggtgtcgtgagggagcccatgtaacgatagtacacggcgtctgggctcttggctagctgtggatccaccacaccgatcggctctgacttatcttttgtatctgctatccttctaatgaatggctccagcatgagcaggaaggggtcggggttgccgatttggtagagattgccgatcaccgccgtgttgctgttgccgtcgtcgtgtacaaggtgcagctccatgtcatacctgcggccgttgacggtgtgctcggagggcgtgtgccagtgcagctgcttgagcttgtacgccttgccgttgatcaccactctcccggcgtttcccataaacttcacctcgatgtcatggccgcggttgaccatggaggcctcggctgggaggtaggagtagtcgaggtagccgaggttgcgcatcaggcgttcgtgggagaggtcgatgggcgactgcatgttgcccgtgttgcacttggcccatctcggatcgagcctactccagttccccggcccgttttccgtgccggggacgtaaccaaacttcctttcatcgtcggtttcctgagctctggccgccggagcagccgagagcaggagtacggcggcagcgaggaggaggcgagctcgagtactcgaatgcat

SEQ ID NO: 53309 - DNA, 1171 bp, Oryza sativa
  Clone ID: PAT_MRT4530_55522C.1
agcactcgaacagcacccctgaacccaaccttcttatggttatggggcaacgcgaccagcggcaatcaagcagtcagactggcggcggcgagcagtgacaagtagagaggcggtggtcttatcggccagacaacacctgtcagaccagcggcataggagcggtcagatcggtgcgcacatggtggtcagaccgcgttgcactgacttcatcaacaagggtaacttctatgtccgctaaaatttatgacctggccacatgttttttatggagtcaattttccttattggtgcgaaaagaaatcttatattatgtctgagagttatgatatttggcaaaaagttgcaaatccttataaaattcctgcttagattaatactgttgttcttaagactgattttaaaaacaattgcaaagctcgcaatattttgcttaatggaattccttgttcggattttgatcgtgtttctcatctgcaaaccgcgcatgagatttggaagccattatctgattttcaccaagggacttctaatatcaatgaagtgcgcaaagatctttttaaaaggattacgtaaaatttgagatgcaacctgaagagactttggatgattatcttgcacgctttaacaaagttttgagtaatcttagatctgttgattcctcttatgatacttattacacacaatctgagatttctcgacactttttgaatggtcttgatatgtcgatctgggagatgaaagtgacttcaatttaggaatctgttaacatgtccgctttgactttggattctctttacaccaagcttaaaactcatgaggtgaatattctttcccgcaagattgatccttaaattagtgccttgatctcttctgaggacttggtttaggttactaacaaactttctcagggttttgaaaaagtcaagaataggaagcgaggaggatctgttcaatgctttcagtgtggcaagttaaatcacatcaagttcaattgtcctaaccgtcaagaagacaagtcttggaggagaaagtgaacaagtatgacaagtagtaggtgtgcaagtagtttcgcaagcaaaggttaattcaagtattgatagaagcttttgatagtgtagtatcagtggttgtagttgtgtgtcatatagtaggtaaaacaggggttgtaaaa

SEQ ID NO: 53310 - DNA, 576 bp, Oryza sativa
  Clone ID: PAT_MRT4530_55523C.1
atggccgtcgtgctcctgctcaggctggtccagctcctgggctacctcggctacctcctcctccgcgccatcagagctgccgtcgagggggccgtggcagccgccttcgccgccgccggggacgccgtcgcggcggcggcggacgccgcggcggggtggagggatgccgcgtcgtcgaacagcaccgcggcggtggcattcgtgcaggccgccatggggaggcccgaggcgctgctcgccaagatgctcgccatcttcggcctcgtcgccttgcttcgtgcagaccatcatcccggcacttccttctttcggcggcggatggaggcaccggcgggtggcggctacctgcttggtggccaaccggcgaggtgctacggaggacactccaccggcagcaacggcgagggtttcggaggacacccggccacatcgccaccttcgtccagctgggtttctctccctcgtgagcacagggatcgctgcaaaggtatgacatattggattgatgaaaagtttgtgttcttgttggcatacaccatgaagtgtgcttcaagcgcggacgggcgtgagcattaa

SEQ ID NO: 53311 - DNA, 329 bp, Oryza sativa
  Clone ID: PAT_MRT4530_55524C.1
tagaggaagaaggagagaaacatctagagggaatgagaaagacggggttcagccgagccctgttcctgctggcgatggtgtgcgtggcggcacacgcgaaggactaccccaaggaggagggcgcgaaggcggaggggccggccgcatgcatgaatcctagcaggtacacatatagctgaagaatatggttctatatggaaagggatgggtgcgcacgtagactcgttttatcgaaaagagcttactctaagaggtttcgatgatgagacgaggacagttgctgcaagtaaccttgagggactaggccatttgctaacatgcaattacac

SEQ ID NO: 53312 - DNA, 490 bp, Oryza sativa
  Clone ID: PAT_MRT4530_55525C.1
ctgaaataactagaagatataaattattatgatatgtatccatcttaaagtaaaaggaaaatataagataatacaacatggctacatgggagcatgctcgacatagagactcctgatagtctcccgtagatctgagcataatgtatatacgtccttcctattatcgtagaagaacattaacgaaacaacagcaaggatcacaactcgttgtgctgctgggagagacttgtgtagttcgaagcgggcctgatttattgttctatattcatgttctatcaatgaagtgagcttcatgaaggctacgtcgcttatgaccttgtgctcattcatgtagcattccatggtgctagttacatcccctttgttctttccatgcttaaatgctgcaatgtcattcatgaaacgcattatttttccaacggctacaattgcggtactgctttcagcccactccaatgcttcctttgttactgcatcaccaaggccaaca

SEQ ID NO: 53313 - DNA, 130 bp, Oryza sativa
  Clone ID: PAT_MRT4530_55526C.1
ctaaactagttgatccccgtggctgcagtgaattctgtgcacgaggaaacaatcaatcaagagaactacatgaagtaaatgtgtctttcagtgtgagctagagtgaaagcatgtgcagagcttgagtgaa

SEQ ID NO: 53314 - DNA, 323 bp, Oryza sativa
  Clone ID: PAT_MRT4530_55527C.1
acaacttacggtcggcaggtttgttatgcactgaggtaatgccaatctcctttgcagtggtgtatccctgttgctgacgaccaacctgggcacgcccttcctcatgggaattctttccgggaagacctcgtcagggatgtctgcaagcataggcgatgtccaaaatctagggctgccctggtaaaccatgtttaggtcctagcttgctaagacatatccaatggatcaagatccttcactagtcagatccttccaagctcttgtccagtagatactttataagaactttttccgaaacttgagcagcctgctgcctgggtagg

SEQ ID NO: 53315 - DNA, 1878 bp, Oryza sativa
  Clone ID: PAT_MRT4530_55528C.1
atggatatggatgatatgctcggtggcctgcgtgttgccggagtgccgaccaagagcgcaatttacttatgggggtataaccacagtgggcagacggcacggaagggcaaggagtgccacttaaggatccccaaaagcctccctccaaagctattcaaatggcaggatggcaagaacctcaggtggattgatgttgcctgcggtcgcgggcacactgctgcggtcgcttctgatggatcgctctacacctggggggcgaatgattttggccagttgggagacgggacagaggagagtgcaaaggaaccccaaaaggtgaaggcactggagactgaatttgtgaaatcagtgtcctgtggagcacattgtacagctgctgttgctgaacctcgagaaaacaatggcactatatcaagaagtaggctctgggtctggggacaaaatcagggctcagattaccctcgcctattctggggagcttttgcaccaaatacggcatcgggtgcaacagagcagtcaaccatcacctgcgcttccagccagttcctcagccttcgctgcttgagccttgaggtgatccatcaggtttcctgtggagctgttcatgtcatggccctatctgaagatggcctgctgcaggcatggggctataatgagtatggtcagcttggcagaggttgtacttctgaagggctacagggagctcgtgtattaaatgcttatgcaaggttccttgacgaagcccctgagctagtgaagattgttagagtatcatgtggagagtaccatacagcagctatatcagaaaatggggaggtatatacttggggactgggaagcatgggacagcttgggcattgctctcttcagtctggagataaggagctgatcccaaggcgtgttgttgctcttgacagaacagtaatcagggatgtgtcttgtggtggggtccactcttgtgctgtaactgaagatggagccctttatgcttggggtggaggacatgtgggacaactgggcctaggacctcagagcggtttcttttcttgtgctcttaatggatctgatatgcttcttcgcaacattccagtcctggtcataccatcaggagttcagcttgttacttgtggtcattctcacacccttgtatctatgaaagacagccgcatatatggttggggctataatagttatggccaagccgctaatgaaaaatctacttatgcttggttcccctctccagttgattggtgtgttggagaggtaaggagacttgctgcaggtggtggccattcagctgttttaactgatgcatgttctctaaaagaactgtgtgagttcaagctagcagagacagttaacatgtccaatgctcttctaatagaagatgttgcatcgcggactggtggtgatgccttggcacgtctgtgtgagaaattgagggagcatttggttgagcaaggagagtgtgagctgttggaaaatcaaatgattgaagaggtggaggctaaagcctaaatactctagtgattcatcgctccttcgtaggcattgattgaagcattaatcgtcgtgttgcacttcatatgaagtgtgattgtagtgtctggactgaaggctctaattaattgtctattggactgtgaagtcccattggtgtctccaatgtgtatcaaagaaatggggactacatgtatgttgtatctatcatgagtgattgttgttgtagagaaccaaataacctttggcaacttgagagctgtgctttgtcactgaaactaacagtaagattgagagttgccaggtcatagtagtgtgattcatgagaaaaaaaataaaaaactcgagcatggttgaccctctctctccctcgtgccg

SEQ ID NO: 53316 - DNA, 3554 bp, Oryza sativa
  Clone ID: PAT_MRT4530_55529C.1
ttagtgtttttgaaaatttccgtatcgccgtatccgtatccccgtaccagtatcgcgtatccgtgcaatataggtgttcactagcctaaaaaaaaagaactttggttgtttagaagttcccccgaaatctgtttgcgaagccaccatgacttaacctcaacagacaactccagtgtttccatgaaaggagcaatcttcaggatataagcataatcaagggcatcagtctttctgatatttccatggccacagagagctaattccaacctcaaattccgaagataagtaaatttgaaaggcccttctggtacgatagttctctcacgttctccacaatgtaaggtcagagtctcgagccttggcaaagtactggggaatccagtaatgatataggaaagagcagattggtaattgatgaatacaatactaatatttgtcagcctggatgttgaagcaaatatcaaaggaaccatggtgccactgtacttgaagtgttgttggagttgaacatcttcatctgtaatgctcatatctactaaactaagaatcttgaggtccagaaatcctttgaaatcagcaggcagctgcagagacacggtcgtaagctcgagacaccgcaagtatgaaccataattgaggccaagaagctgtggaggcaaattatatggtggttctttgattatccgtatgcaattgctatgtgtcaaatctgtgaaaaatgagcccttatcctgacctgataaatcaacaaccaattcctttgtttttgatgcaattgcaaagttcacccatctatcaatatggtctgcgtgcttactatgcaaccgaaacttaatttccatacgttgaacccccattccactgtgctgacgcaggaccgcatcaacccttgtaataaattcgtagtccctgagccatcgccatcgatatggagtcaaggtcttgacataaggtttcctcattgtacctttattaagagtaagattggtgtggctgcaccaaaaatatttccattttcttgacaatacacttgtccttatagcgtcatttattggcaactgcgacaagatctttgctaaaatatctgcagcttcagggatttcagaaaagaaactgaacttgtaaacagtcagaattccgaaacccagcatgggtgctcttgccattgagctcgcagaagcctcacagattttccaagatccatcactctgtctcctcaatatgtactgaacttcatacatactgtaatagctaggcttcttgggctgggattcatcaacaagctcagccgcttcctcaagaacagcaccaatttctgcaacttcaccagtgccagactcatccaatagtatctccgctcgaacaacagagagatttaacaaaacaaatctccaatagcaggactgatcctttgctgacaatgccaactcttgccacttcgaaagcattgaaccgtcaagaatttcagggagcatatcaatttgataatcagggccaagagcttcagatttgatgtcttgccactgcttcacaagtgtttctgcttcttgaagagccatactttgcttgcatactgtagcagccactgcattagcaacagaagacaggtcgctttcttcgcttcttgaataaagcctattgtttaaccaaagcatcttgggcagtttttcaaaatgtttcctgacgctgctagtaataaaagaatcttccaacgtcgattcttcattcagggactgtgtggcagcagaacccctacttgcggaggcaggtttcatgtgaccaaactgaaatctgagcagttttaatgtaccaaatagggcaaacccaatgagtgcactatatgcaagtttccctacaatatcaccagtaagaccccacgattccaaggttcttgcaggatgcaatacaagattgcgcttcaggggaacagatgttgtggttgaaccatttgctggcctatccattgaagaatggacccccaggttgtttggcgcaagttgctttacagcttcccccaaatggctggtagaatttaatcttggcgtctgctcccctaaagctctgttgcatggtgacacactagaagatggctgagaactcaaacggaccattcttgtggctcctaatttctgcttggaagtgctaaggatgcgcttaggagccccaaagaagttggccaaagatggtgaacaatctcttgtatccgcaaaacgagaaagtgccacatccttcagccacaattccagagactgacagatagtaaccttgtcattgccgtctttctttttaggtaacccataatttcttgagttggaattcccattactttgaagctgctgaagcttttcaaaaacagtggtgccagattcctctccaaggagatacaaacaaaatgattcctcaaatttcaggtctgtgttttcagatgcaactaaacaatcgcaaatggttttggctttactgatcaggtcagcctgccgggttgaaaaccctaacgcaaagtgagcaagcatcgctacatggaaacaattgaagtcaactactgcccgctggctctgggattccaacgattttttgtttttacgagttgtagccaaagtatcccaagaaagtagatccacaatttcagtggctaacaacttattcattgcttggcccaagaaacaaggccaatcatgaactctacaagaggattcaacgtcaagaccctgtctaagcagttcacagagagctgcaatagcaccctgcctgcgttcagcgttttcaggtgtctgaggtaagcttagaagctccagagtgcaagcaggtgcaagctcttcaagtgattcttcaatctgttcaagaagggacaacttctccaaagacggttttctcctcaacaggtattgagcacgtgctagagcttcaaagccaagagacactttacttttctcaaagctagcttttgcaatagaacattcagctagtgccattgcaagaagcacatcatgaacatatggcctagaatctgggcgtcgtagagccgcatgaccaatttccaaaactagcttctcttctccaacctcctgcaagacacaaagtgcagcaggcaaccaactccaaggtatatgaagagaggatctgggtggaagcttttcttttatgcttcctgcgtactcctgttcaaagagaagtttgtctctcacatctaccagcagagcctctgccatgtacccgtcttcaatttctgcatttttcagctccattgctgctttgacaatctcatctttctcagccttctctgtaacaccaagaatctgatagcaagtgacggggatctccaccatcggcgcggcgggggcctcctgcctgctcccctccgcggccaccggcggcgcctccgccaccctcgcgcgcgcaacccacgcggccgcccctcgccgtccgccagccaggcatccacccccggcgtgtgcggacgcattgccatttcccaccccaacacgccgcgtcgaggacccacatgcgaccccggggacaaccgccgccgccgcggccaccgtcggcatcgccat

SEQ ID NO: 53317 - DNA, 607 bp, Oryza sativa
  Clone ID: PAT_MRT4530_5552C.1
ggggtacactaagctgggagaaggggggtgcccatacggttgcatcatcgtgtcgagtgttggtttagttttagatttaattttttgttttgagtcagatcacatcctcaaggtatcattatcaggcatcggttgtaccatccctacctttgctggtaagaacattgttagagcacggttatatcactcatcgacacgagataatgttggatgggagacaaaccacagttggtttatggttaacgatagagcatatcatgttacaatcgataatgataatggtaatgatagtgatgctacatttactcaaggtaacgacgaagaagagatgtgtgatgcttcacttatatccatgccacaactagtaaatgaacatgttaattctatgcttgaaccaccatatattgagtttaaacatgttattcacatttttagagagaatgaagagcttaaatcgttatcttcttcaaatacatggggctatattcaatttgaaaatctttgtcaattgaactgtttagagaagaatttagttgctagatctgaattgccacagccatctaatatgatttttaacgttattggaaattatgatagtaaaggataa

SEQ ID NO: 53318 - DNA, 491 bp, Oryza sativa
  Clone ID: PAT_MRT4530_55530C.1
cccacgcgtccgataaaaaggtgtatcatggtgacatggtacacaaaacagcaagatcattcctttttgaactatgtgctgcaaattattggaaacctcctgaattcaagttatgtaaagaggaagggccaagccaccttcggaagtaagttcatcttcttactgagagcacccgcaatagtaaattaaggtgctatctataaaacatgtacatctcagcaataggctagattaatagtaaaccacttcaatggtatgtctatatgggtatatataactctctaatccattgcattgtttttctctatagactatttctaggttagtagatagttttgctctctctcttcatttaatatcttccaagtaggaaaatatgctgacatggatgtcttgtagagagcctatagcaggtacaatagcaggctattagccagctgtaaacatatttgtagccagctacagcacggactctaagacgcaatgtgtat

SEQ ID NO: 53319 - DNA, 144 bp, Oryza sativa
  Clone ID: PAT_MRT4530_55531C.1
atgtctctgatctcgccggatgcggattcgaggaggaagtcaagagtgcgagggttgtgggcgatatatatggaggtgatcagcagggtcaccaaggtttacaaatcgaggaaagcggtgaaaagaaaaccgatcggcttttga

SEQ ID NO: 53320 - DNA, 1983 bp, Oryza sativa
  Clone ID: PAT_MRT4530_55532C.1
ggaagagtgtgactctgaatctctgtctctgaaactcagagagggagagagagagagagagagagagagagagagagagagagagagagagagaagatggcaggagggttcggcggcggcggcggcgaggcgatcgccgggagggcggagcagtacgaggggaagatcaccggatacttcatcctcgcctgcatcgtcggctccttcggcgggtcactcttcggctacgatcttggagtctccagtggtgtgacggccatggacgatttcttgatcaagttcttcccggaggtgtacgcgcggaagagcgcgcacctgcacgagacggactactgcaagtacgacaaccaggtgctgaccctcttcacctcctccctctacttcgccggcctcgtctccaccttcgccgcctcccacctcaccaggcgccgcggccgccgcgccaccatcatggtcggcgccgtcagcttcttcctcggcggcgccgtcaacgccgccgccgccaacgtcgccatgctcatcgccggccgcctcctcctcggcgtcggcatcggcttcggcaaccaggccgtccccctctacctctccgagatcgccccctacaacatccgcggcgccgtcaaccagctcttccagctcaccacctgcctcggcatcctcgtcgccgacgtcatcaactacttcaccgacaagatccacccgtgggggtggaggctgtcgctggggctcgccatgggccccgccaccgcgatcttcgtcggcgcgctgttcttgccggagacgcccaacagcctcgtcgagatggggcggctggaggaggcgaggcgggtgctggagaaggtgagggggacgaggaaggtggacgccgagttcgaggatttgagggaggcgagcgaggcggcgagggcggtgcgcggcacgttcaggagcctgctcgccgcgcgcaaccggccgcagctcatcattggggcgctcgggatcccggcgttccagcagctgtccgggatgaactccatactcttctactcgccggtcatcttccagagcctcggcttcggcaactccgccgcgctctactcctccatcatcacgggatccatgctcgtcgtcggcgcgctcgtctccatggtcgtcgtcgaccgcctcggccgcagattcctcttcatcgaggccggcatccagatgatctcctccatggtggtggtggcggtgatcctggcgctcaagttcgggcacggcgaggagctatcgaagggcgtgggcacggtgctggtggtggcgatctgcctgttcgtggtggcctacgggtggtcgtgggggccgctggggtggctggtgccgagcgagctgttcccgctggagatgaggtcggcggggcagagcgtggtggtgtgcgtcaacctgttctggacggcggcggtggcgcagtgcttcctcgccgccatgtgccacctccggtggggggtgttcatcctcttcgccgcgctcatcgtcgtcatgtccatcttcgtcatcctcctcctgccggagaccaagcaggtgcccatcgaggagatctggatgctcttcgacaagcactggtattggaagcgcatcgtcaggaaggaccccaagtatcagggccaccaccaccaccagatggccgccatgccaaccgccgccgccaagtccggctcgtcggaggtttagatgatgatgataatgaattgatgatggtttaataaggttttagtgggtggtgattaagacttgatcttgaattgttcatgtggcagtagcttttttgatcttcgattgatgcaaaagaagaggtcagagggttaatgcatgtgtgtgctcgtgtgtctatagttttagtttcatgttcttcagaattcgattcagtgtagtggtgggctgattaatggatcttgatgatgcacaaggaatgcagtgttctgaattcttgaaattattctcaatataacttgtagatttgtgtag

SEQ ID NO: 53321 - DNA, 407 bp, Oryza sativa
  Clone ID: PAT_MRT4530_55533C.1
gccaaaattaaatccaacacactggttgttttttaaaaaactatggtaactaccttttttacattatttacactctcttattttaacaacaacagaaacaaatctgatacataaagaaaacaagctctttatttatcatatttaatttcctaaagtaactagcacaactccccggccaaccctcatcgccggcgacgagctcgaacagcctctcctcattgcttcgggatggggtacggccactacacgtacccctcccactcggacttccaccggctgagcaatatctgcaactggcgctcgacctgtagctgacgggcagcacgtccttcatcgtcttcatcgccgtcaacgacctcttgaatatccccttctccgccgcctcggcgagcgcctggatccccccc

SEQ ID NO: 53322 - DNA, 798 bp, Oryza sativa
  unsure (1)..(798): unsure at all n locations
  Clone ID: PAT_MRT4530_55534C.1
ccacgcgtccgggcgaaatgccggcgccagcgccgccctcctctgcccgctccggcgctcgccgccgtgcgcgtcgctcgagagagctcgacaccctcgtgtcggcgccggagacggcgcccgcgcaggagtctgcggccgagttcaaggagagtagagatttctggccactcctcgacgaattccgtcaactggatggtcattactggccgtctccggccagcggcctcatctgagcgccgacttcgatgcctcgacgtcgtcggaggtggaagggggacgcccccagccacgcgacgcgacgggcccctgagcggctgcgctgggtccccgaagtcgccgcgcgcgtcgtcgccttcgtcaggttcaggcagtacacaatggaaagcaactgcggactcacaatgttcacatgtatcattcagagagaaatcgtcctatcaagatcccacatcaagtataatatatgtttcggactatggtttcatcagcacaggagcaaaccataacatctcctcagcatacattaaaccatcactggcacagcgcaattacaatgtccgattctttccagatggcacacggaactgctacaccctgaggtccttgcaggagggaaacaagtactttgttcgagctgtcttctactatgcaaattacgatagcctgaacaagcttcctgtctttgatctgtacctgngggcaaactactggcatgaggttaagtttagtaatgccgatgcagttaattggatggacatcatagttgtggctcctgctgattacctgccagtctgt

SEQ ID NO: 53323 - DNA, 294 bp, Oryza sativa
  Clone ID: PAT_MRT4530_55535C.1
atgaatagagttctacatgcaaacgacaaggactactcggattgaggagaggggacacggaacaatagatcaagacacaagatcaacatacaagccaacatacaccaaggcaagctgccagatatcgacatcagagataagcctaggaaaaccccatatggtacctacgggaaccaaagagaggaatctagcgctatctctgatctcgtcgggcacggattcgaggaggaagactaccctgttgtcgactacgtgatgatacttcagtccgctaagttgacaacagttagatag

SEQ ID NO: 53324 - DNA, 4595 bp, Oryza sativa
  Clone ID: PAT_MRT4530_55536C.1
cgatgtgctgtggttgggcggcggcgtaggatgagcgacgtctccggccgcttcgtggtggccgcggccgtggtcgccgtgtcgctggccatggcggcggcggcggcggcgcacgactacggcgaggcgctgtcgaagagcctgctctacttcgaggcgcagcggtcgggccgcctgccgtacaaccagcgcgtgcggtggcgcggccactccggcctcaccgacggcctcgagcaaggggtggacctggtgggcgggtactacgacgccggcgaccacgtcaagttcgggctgcccatggcgttcaccgtcacgatgctgtcgtggagcgtgctggagtacggcgaggagatcgccgccgccggcgagctcggccacgccctccacgccatcaaatggggcaccgattacttcatcaaggcgcacacccaccccaacgtcctctggactcaggtcggcgacggcgactcggaccactactgctggcagcggccggaggacatgacgacgtcgcggcacgcgtacaaggtggacgccgagaaccccgggtcggaggtcgccgcagagaccgccgccgccatggccgccgcatccatcgtcttccgccgcgccggcgacgcccactacgcccatctcctcctccaccacgctcagcagttgtttgagtttggggacaagtacagggggagatacgacgagagtgtggaggtggtaaagaactactacccatcatcaagtgggtacaaggatgagctgctgtgggcggcgctgtggctgcaccgtgccaccggccgccgcgaatacctcgactacgccgtcgacaacgccgacgacttcggcggcaccggctgggccgtctccgagttcagctgggacatcaagtacgccggactccaagtcctcgcttccaagctgctggtagaggagaagcatctgagctcgcagcagcgcgaggtgctggagaagtacaggtcaaaggcggagtactacgtgtgctcctgcatgggccgcaaccccggcggcgccgcccacaacgccggccgcactccggcgggcctcctcttcatccgcccgtggaacaacctccagtacgtctccaacgccgccttcctcctcaccgtctactccgacgtcctctcctacctctccctccccctcctctgcccggaccccgacgccgccgccgacgaggccgctcctgcggcggcggacgccggcgaggtgctggagttcgcgaggtcgcaggcggattacatactggggacgaacccgatggcgacgagctacctcgtcgggtacggcgaggcgtacccgcggcgggtgcaccaccgcgcggcgtcgagcgcgtcgtacgcgcgcgaccgcgacttcatcgggtgcctccaggggttcgactcgtggtacagcgcggcggcggagaacccgcacgacctcgtcggcgccgtcgtcggcgggcccaacggcaacgacgtgttcaccgaccaccgcggcgcgtacatgcagacggaggcctgcaccggcctcatctgagcgccgacttcgatgcctcgacgtcgtcggaggtggaagggggacgcccccagccacgcgacgcgacgggcccctgagcggctgcgctgggtccccgaagtcgccgcgcgcgtcgtcgccttcgtcaggttcagataacattgaatattatggggagaaaattaaagttatggagtgtcaagagctgagttggacttggaatggaattagtttttgctcaggttcaggcagtacacaatggaaagcaactgcggactcacaatgttcacatgtatcattcagaggtttcataagcatcgattgcggcattccagagaaatcgtcctatcaagatcccacatcaagtataatatatgtttcggactatggtttcatcagcacaggagcaaaccataacatctcctcagcatacattaaaccatcactggcacagcgcaattacaatgtccgattctttccagatggcacacggaactgctacaccctgaggtccttgcaggagggaaacaagtactttgttcgagctgtcttctactatgcaaattacgatagcctgaacaagcttcctgtctttgatctgtacctgggggcaaactactggcatgaggttaagtttagtaatgccgatgcagttaattggatggacatcatagttgtggctcctgctgattacctgcaagtctgtttggtgaacaaagggacgggaactccgtttatatctgggcttgatttgaggccactgaagagtactctttacccagaggcaaatacaactcaatctttggtgctgatcaattccaatcggttcaacatgggacccacagacaattcaataaccagatacccacttgatccccacgaccggctttggtcaacatatgatacgatcccagactggactgagatatctgcaacatcagtagttcagaattacctcactgatgtctatgatgtaccatcagctgtcatgcaaagtgcagcaacagttaatagctcgagaattaatttcacttgggatccatctgacccatcggtgaacatcagctccaaatacttctttgtgctctacttctccgagttacagtctgtaccgagcaatgggctgagacagtttgatattattgtcaataacaatacatggaacacacaaccttatactccaccattcctatttgccgattccttgtctggcaccgtacaggggctggcaagttatagtgtctcacttgttgctacgaaaaatgcaactcttccacctatcctcaatgccatggagatgtacttggtgaaaccgctaactgagtttgcaactgatcctagagacgctagagccatgatggaagtccaacaaaattatgatgtgaagaaaaactggatgggcgatccatgtgctccaaaagcttttgcatgggaaggattaaactgttcctatcctccagctgattcctctaaaataacatcactaaacttgtcttccagtgggttggctggatctattgctacttattttggagatctcaaatcactccagtacctggacctgtccagcaatgatctcagtggaccaattccttacaatcttcttcaaaaatcacaaaatggttctttgtcactaagggttggttataatgcaaaactatgtggcaacgatactgaatgcggatcaggtcaaaagaaaattaaagggtcacttctttctgcaataattattacaatagttgccactgttgcactaattgttgtcttatttcttcttctgcgccgaatgctcaaggcaaaagacaagagaagagctgctggtcctacatatgaatcagcattacttgagaacagagaattctcttacagagaactgaagcatattacgaataactttagccagcaggttggtaagggtgggtttggagctgtgttccttggttacttggaaaatggtaacccagttgctgtgaaagtgcgatccgagtcatcttcacaggggggtaaagagtttctagctgaggcccaacatttgacaaggattcatcacaagaatttggtttccttgattggttattgcaaggacaaaaatcatttggcccttgtgtatgagtacatgccggaagggaaccttcaggatcatctgagagctactactaataagccactcacttgggagcagcgtcttcacatcgcccttgatgctgcacaaggattggagtatctgcatgtcgcgtgtaagccagcactgattcacagggacgtgaagagtaggaacatcctcttgaccacaaatcttggagctaagatcgctgattttggactgaccaagttctaccaagtaactgaacttccatgtcatattctgcccatcttgttcaggtactaccgcaattatcatatcagcgagaagagcgacgtgtacagcttcggtgtcgtcctcctggagctgatcacaggccgccctcccgtcatccccatcgacgagagcgtgagcatccacattggtgagtttgtgcatcagagcctcgaccacggcagcatcgagagcattgtggatgcaaggatgggaggagggggaggctacgacatcaactcggtctggaaagtcgctgacttggcgctgcattgcaagcgagaggtctccagggagcggcctacgatgacagaggtggtggcacagcttaaggagagcttggagctcgagagccatggcgataggaagcacttggtgactggtgatgatgacgtgagcgtgagcaatcttggagaggagactgcacttgaggtagaagagcaatctggggagatatcaagagtttctcctgggcctgcagtaagatgacagcttccatcttacatgcgaaatggaggttcgatcttacatatataaattttctactgtttatcttcaaaaaaaacttaggtttgtgtcgatttcgtagttgtagttgtgaaacttgaaatgaaactttcatttgctccagttcattttctttttcttttctttgtttctactttctaagaccatccatttcgcttgatgtggtgatggtgtccggattttgaagtttttggtgtaagat

SEQ ID NO: 53325 - DNA, 234 bp, Oryza sativa
  Clone ID: PAT_MRT4530_55537C.1
actacaatagactactacgtacgcatgctgcactcggtcggcagctttcctcttcaacggccgcccccctttttttttttttttcctagaaattttacaacctttcatctaattggggggggatataaagggggatgtataatacacaatctaattactgtacaaaatttattaaacctttcattcacataacttctgtccatattacttcagtgtccgccttatttttttata

SEQ ID NO: 53326 - DNA, 362 bp, Oryza sativa
  unsure (1)..(362): unsure at all n locations
  Clone ID: PAT_MRT4530_55538C.1
gattggccgagctcgtgccgaattcggcacgagcacctgctctctgcaaacactgtgactttgggtgagtgagtgagtgagtgaagaagaagaanatggggaacgganggacccgaccnangcngcnggttgccgcngttggcngaccggngaagaggagnncncacggggtttcccccncccnccnatnccgatanccatccttccctnccncncccgnnactggggctccnnacntcccnggtcngnatnaaggccccnggccccttcngccncnntcttgggntnccnccttgggacattcctctcncctccttccncnttcncnganccaggggggnnggggccccactttctcnggt

SEQ ID NO: 53327 - DNA, 1671 bp, Oryza sativa
  unsure (1)..(1671): unsure at all n locations
  Clone ID: PAT_MRT4530_55539C.1
angtgnttagggttccggccgccgtagaagcaagggggagagggggaggggggtccctttntccccctccctgcaagaggcagctcggtgttgctgcgaatttaatctatttctttcccccttcctcaggatgaggttttgatgccctgattctccccttttctctgtctatttcagcacctcatcgatttttccttgctcttctgatgccctctgttgtatagctccccaatcactccattgtatccctaattccatgcttgttgctcactcctttttaacaaaataatgaccagctgttggcggctagccatggtttcggttaaaaaggctgtttttatttcctgtaatacttgctgcccccaaacacaaatctgtgatcgaagcacaagttcttgggagtacaacacggttaacaccacaagaaactccttgcagaacagtaaagatgcatgtgtcctactgtgaataaccaagtgtggcttctttatatgctggtggaatgcatacatctggctgtacgtgtagtcatgtagagcgcgcgttgctcagctgtcacttctgttgggcttgtctgacgccggatacatctgcaacgagctcgctcgggttggtttcctactgatgcacgacgcacagaatgcctctgcacaccgggactgatccgccgaagtgctcgcgatagcaacatctggaagtgttgatgtgtactccaccctgtaatttgctaatccaatttggtactttttttttgttgcttttatcattttcctcgccgatctgttttggttgcgggaaaagggtttggataagcagtgtatccaaaattagtgtggctaggcagtggctgcttaacaaaataatgaccagctactagaccataacataataatgctgtttttatttcctgtaatacttgctgcccccaaacacaaatctgtgatcgaagcacaagttcttgggagtacaacacggttaacaccacaagaaactccttgcagaacagtaaagatgcatgtgtcctatgtgaataaccaagtgtggcttctttatatgctggtggaatgcatacatctggctgtacgtgtagtcatgtagagcgcgcgttgctcagctgtcacttctgttgggcttgtctgacgccggatacaccgtgtcagctgatgggatccactcgtttgtagcaggatttcccttgcaggaggcatggcgctccgatgcatctgggtcatcagacagatgaaacgaggcgtccgccgagggcttgtccatcttgatgaaccctgttccagtcgtgtggtgctgcttgccgacgcagccgagatccttgtagtactccgtctccacgaactcatcccctgccttgccaccctcgcacaccaatttctcggtgtgggcttcgagctgctggaacctgtcgagctcggggtgggagtcgtcggggacgagcgcgtcggtgtagacggcggagggctcgctgcgggagggcttggagtggcgcttgggcgccgcctcgtcgtagtactcccgcacctcggcctccatcgccgcctccccctccggggacaggtgcgcgtcgctcctggccggcctcgacatttcttccgatctttcgcgcgaagcgcgctgtgccttcgttagctagcgctcgtgtaagcttcaagcatggga

SEQ ID NO: 53328 - DNA, 128 bp, Oryza sativa
  Clone ID: PAT_MRT4530_5553C.1
tcgttcctccctctcccacgatggcgtctcacatgttggatacccccgcatgccccaagaggagctcaagtttgcctggagtctttctggatgggagaagcagcgtgaggatttggagaaggttgcga

SEQ ID NO: 53329 - DNA, 541 bp, Oryza sativa
  Clone ID: PAT_MRT4530_55540C.1
aacataataatgctgtttttatttcctgtaatacttgctgcccccaaacacaaatctgtgatcgaagcacaagttcttgggagtacaacacggttaacaccacaagaaactccttgcagaacagtaaagatgcatgtgtcctatgtgaataaccaagtgtggcttctttatatgctggtggaatgcatacatctggctgtacgtgtagtcatgtagagcgcgcgttgctcagctgtcacttctgttgggcttgtctgacgccggatacacctgaaaccaacaactggttgcttgcttactgatgcttcttgaacagaatttcaaccaaactctgttgataattgctgaagaacaggcatgtatacagcattggacaacttacacaagtacagttaccgtgtcagctgatgggatccactcgtttgtagcaggatttcccttgcaggaggcatggcgctccgatgcatctgggtcatcagacagatgaaacgaggcgtccgccgagggcttgtccatcttgatgaaccctgttccagtctgc

SEQ ID NO: 53330 - DNA, 407 bp, Oryza sativa
  unsure (1)..(407): unsure at all n locations
  Clone ID: PAT_MRT4530_55541C.1
gggaatgcgattcacagaaaattaatatattaattgccggtacattatttaaaccatgtacaaatagaaccccaaagtaaaatatcctattctgaatggagaagttgatatatttttgggtttctcaaactattttcacatgaagttgtttgtgatgtggataatacataaaagaatgcagtcattagcagaactagtggtataccgctataaaggctagacctaaatatgaactgctgagtgccgaatggcatgtagcagtaattatacattggcatgtgctaaattacacatgtaatagtggagtacacggagcatgagggagccatggccccaacacccctaccaggcttttggtcactttccctccgcactggttgttactgtgctgntacactcactttata

SEQ ID NO: 53331 - DNA, 946 bp, Oryza sativa
  Clone ID: PAT_MRT4530_55542C.1
gcccccaccacagcaagcgcaacgggaaagaggcagacgcgcagctgaggaggagaagcgcacgcagccaccgcgagatctcctcacctccatctccatctccatctccatctccggcggcgagatccccaccgaatcggatcggatcggatcatgggggggaaggagctgagcgaggagcaggtggcgtcgatgcgggaggcgttctccctcttcgacaccgacggcgacggccggatcgcgccgtcggagctcggcgtcctgatgcgctccctcggcgggaaccccacccaggcgcagctccgcgacatcgccgcgcaggagaagctcaccgcgcccttcgacttcccgcgcttcctcgacctcatgcgcgcccacctccgccccgagcccttcgaccgcccgctccgcgacgccttccgcgtcctcgacaaggacgcctccggcaccgtctccgtcgccgatctccgccacgtcctcacctccatcggcgagaagctcgagccccacgagttcgacgagtggatccgcgaggtcgacgtcgcccccgacggcaccatccgctacgacgacttcatccgccgcatcgtcgccaaataatttgtcatttctggttttctcccctctctccctctctctccccctctcaggatccacagtttgacacataataactctctcttgcttgtcgtttccttacctatcatgtgatctctcctgatttgtgctttgcttgctctctattttgtgttttcattccggtgtgatttggacaacctagggtttggataatggtgtgattaatcgattgatggatggatctgattaatgatgctttgcgtttcgctctgttcaaaactgcaatgtaaattgtggatctatctatcattcaaaatatgtggatctggcttattatcggaaaagaaatgacgtgatttgtggcttc

SEQ ID NO: 53332 - DNA, 849 bp, Oryza sativa
  Clone ID: PAT_MRT4530_55543C.1
caatttttacagagcaaaaccagagaatagaaaccagctcgtctttccgccgcaccgggccaggtgtacccaaactaccgtagccaacgaagacgcaaccaccgccccaaagcctccaacccttcgagaatccatctctcgtcgcctcccctctcctctcctctcctctccgccgccgtcccgtttcctcctcccgcacagattccgcagtcgagtcgcactccatcttccccaactcgccttcccccgctctataaatccgtaaccaaaaaccccaccgtgcaagccaagtaccgagatccccaacccaacccaagccgcgatgatcctccgcatccgcagccgcgacggtacggaccgtatcaccgtgccggacccggccgccgccaccgtcggcgacctgcagcgtctcatcgcggcgcgcgtcaccgtccccgtcccgctccagcgcctctccctcgacccggcgctcctcctcccctcctccgcctccgccgccctgctcgccgacccggccgccccgctctcctccctccgcctctccaatggctccttcgtctacctctcctacccgcccgacgcccgctcctcccagccgcctccccccaaagccctctccgccgccggctccttcggcaagaagatgaccatggacgacctcatcgcgcgccagatccgcgtcacccgccaggaggccccgctctgcgccgccgcctccttcgaccgcgactccgccaacgccttccagctccacgtcgccgagtcgctcgccttcgctaccaagcgcgccggcttcctctacgggcgcgtcgacgccgacaccaaggagggcttcgtcgatttcatcta

SEQ ID NO: 53333 - DNA, 456 bp, Oryza sativa
  Clone ID: PAT_MRT4530_55544C.1
tgcttgccccagcaatcatgctatgctttccccaccctgtaagaatgcttaaaaattcagggcatagctcttccttcaaagacgatagagcgcacattcaggagccaggcatggaccattgcataagctgcaccacatgacataaggtgcaggtcccaagcaaaactcaccccatgtgttgtcccagacacgacgatttatcccttcaaacacaacttgctgagcttttcgcctctggccgaaatgccatagcacatcagtaagagcattgtaaaaggcagaggatgttggagagtccatgcgtcctaactgattaaataacgattgagcttgtgaccaaacttctcgagaaccgaccagaagaccataagcaacaccatagacaaagttatcaaataagcgaagttgttccagtaacagggctgcatcctcgaaactattacagcgactgacaaa

SEQ ID NO: 53334 - DNA, 921 bp, Oryza sativa
  Clone ID: PAT_MRT4530_55545C.1
atggctgacaatttttatcacaattttgtgaagattttgatgacaagattcagaggaatgatgggtcaaaccctgttccttggtctgcaggtccatgaaggcaatgcagagatgataagcacagtaaacaggatgtgccgtgttcctgttcaagagatccgggcatgttttgcgctagtggagtggatgatgattgtgatgcacaacatctttgactatgaattgcagatttgcaggttggtgatgcgtgatgagattaagatcctggccagcttcgtctccaagaattcgacgctctggttcaggatgtcggtggaattcctgacgaaagcgctcacggcgctgttcgggtatgctatgccggcgttggagtgcttcaaggcgatcgagcagcggcctggtcggacggaccatctccggatcatactagtaatcctcgtcatattcgatgatatcgctggtgtcctcacctccaagataccaatgtactctgaactcagactcgccttcctcgtctacctgtggtacccccagacaaggggaactgacatcgtgtacgacaccttcctgcggccgctggtgatgcagtaccagcccaacatcgaggagcggctgcgctacctgcgtgccaatgccggcgacattctcatcttctacctcaagaacttcaccgataggggctacgatctcttcctccgggggatggagtacatccggtcccagacgtcacgaggctcaagaacgagggattccggaaatgtaacagtgcagtcaaagaattcaggatatgtaacagtgcagcggtggttctcgttcggaggcgaccgggcagagaggtcgagctacgttgatgattatgtcgccggcggtggcgatcggaggagcacggcgaggcaccggcgaccccgcgacgattactaa

SEQ ID NO: 53335 - DNA, 591 bp, Oryza sativa
  Clone ID: PAT_MRT4530_55546C.1
ttttttttttttttttttttattactgtgagatagatcggccgtcgattggattctttatatattcgcttgaatgcagcaataataagtaaatagttataacattgaagatttgaagctgtcacataaacattatactacccgtgatgtcaaataaacattataatacccgtgatgtcaaaaatcaaaaagcattactttttcaagcaattaggatcctgaatttattgtgtacaccgagtttggattgggatcgaatggaactggaaggattcatctgcatttcaaatcaacctgcctgcatgtttgtactttgcactttagatatatgtgttggaagaaatgtttcggaaatgtgtatagaatatacaatgaaaatgtatggtagtgatatactggttacacgacagggatttgatgatacttgagatagtgatataccgattacactaaagggattttccataaaatcttgcttttgcactttacttgaattggcaacaggaaagatttgcgtaagaatatgtttacatggaatgtcttttgccaaggtttgcagaggcgatatgtcttttcacttctgtgggtaact

SEQ ID NO: 53336 - DNA, 2270 bp, Oryza sativa
  Clone ID: PAT_MRT4530_55547C.1
tttttttttttttttttttttttttttttttttttttttttttttttttttttttttttttttgtctttgagatgctgaataatgttattaagcaatgagatactgaatactgatacaatagagtagatagctagacaatattgaatacgcagtggctctgcgaggtgccccgcgtaagaatagctaaaattgaaaaattgagaggaaatcaaaccagaagacaatactgagtcagttgttttgattgtcctaggctcctggggtagatggatcaatctagccatctagtgacaccatcttcttcactcacagctgcgaggatttcaatatagacctccaatacaaccgaaggaattttgcggttgaccaacttgcaacaatccagtaaagacccctccagcgtccagctctcccaaacatcaaaagaatagctcgcaaatacaagctccatagtcttattaacctgcaataacttgccaccagcaacaaaagatcgcaagcccatagtatccttgtttctaaaagtaattagaaactgagcagcaggatccctctttgtagcttttgacacaacatcaagataccacccaactcctgcaactctttctcttgcaacatgaaaccctgaattatccctggtccttagggcaacaacgaagccatctttcaatctctcaagaggttttatactaagccctgcagtcagtttattttcagaaattatttccattggaaattcggcagaagatctcagcttggttttacaatcctcaggggaagcaaatcgtgaactggaacttaacacttgatccttgccactcgttacagtatcatcatccatacgtgaggagtaattacttccaccttctaaagttgacaacaattcgtcccttttctgttgtgatttgcggcgagcaggtctctttttccctttctttccagatcggctgcgccttccttctgatctgggcacaacattttctctgttttgagactgccctgaagcttggggctcctcagagtgggaaatggctcttctcttgtcacattctaaagttaactgactttcatctgtctgctgtccaccatcgcaaacctgttcttttgcctgttttgctagctgatcatcctcacatccagcttcagttatttcttcttcatcatcagaaagagcattgtttggaacaacaccatcatagaaaaaggattgcaatattgcgagtgccttttctctgatttcaatccacacttcttcactgtaatctgcacttcgaggaagaattaatacattcggcatctcacgcacctgtgagtgagcagtaaaagtataatcaatgacattgatcattctccatgcttccatccattgtggaccttcagcaccatccaatgcgcacccagctatagtgccatcaattaagagttgtttgagtgcacagtcatctatcagttgacagctaccggtattgactatgaaagctccaggttttatgtgctgcagacgctcggcattgagtatatgtgttgtatcatttgttaacgcacagtgaagtgaaacaagatcacttgctgtcaataaatcattgagagtatccattcttctggcagcagaaggaaataaaatagaaggccgctttgttttcccattagcctcatggagcggatcgaagtagagcacgctcatactgaacgcgaggctgcgggtggcgaggcatcgcgcggcggcgttgaccccgacgataccaagcactagcccacggcagcgccgcattccgcggcagagcggctggacggagccgagccacccggcgggcggcgcggagtaggaggaggcgtggcgggacagcaggtgggtgcggcggaggaggccgaggaagagcgccatgacggtgtcggctacctcctcggcgcggttggcgtcgacgtggaccaggcggagcccgagctccgcggccacggcggcgtccgcggcgcggtcgggggaaccgaggcagaggatcagctgccaggggcggagccgccgctgcgcggcgcgcgggaggaacgcgagcgaggtgaggagcacggcggcggcggcctcgacgcgcccggatgaaagcgcggagagcggggcgtgctccaccgccgccgcccccgcgagcacctcctgctccatcgacgggtcctccaggcagttgagcgtcaccaccagcggctccccgccgccgccgccggcgacggcgacggcggcggcggccggcggaggcgaatgggccgggccgtgcagcat

SEQ ID NO: 53337 - DNA, 641 bp, Oryza sativa
  unsure (1)..(641): unsure at all n locations
  Clone ID: PAT_MRT4530_55548C.1
naangnnnnnnnnnngaattgtaatacgactcactatagggcgaattgggtaccgggccccccctcgagtttttttttttttttttttaattaanacatctggggatggtcnntattgttnattantgctgcacncgaanagaacaantnnctgcaacgcaaagtactgctaanatatcnagcggatcgagtactcgctccnctactaataatnatcntcgcaaaanatcaatcatatcacaccaatntattcnttcgtcaacagtaaacgacacactatccanctaccgcgcgcgcggtggcntccgntcatcccatctgcngccngctgcaggatgccanatccgccngcgagccngcnggcctagacnancggcnggccactgttcttcaaggggacgatcccaaggtccagntncgcgctggcgtttgatccgtcncttcccatacaaactggctcttctcttgagcgcncaanttnngggcnaacntntaatgtcggtggaattcgaaggggttatcccggnanaaagttcacccgcggaagnngcntccccaantnnggnnccttaaganttcaagaagnacagggccttccccccgggatnaaccgtgntngtcccccggtgaangttngccct

SEQ ID NO: 53338 - DNA, 380 bp, Oryza sativa
  Clone ID: PAT_MRT4530_55549C.1
cccccccccttcccttttgtccttttacccccttttgttttaaccccacaccaacaaaaaagcacttcttttcataaaatcagtatttacctctaccatacaacctaactaccatgctacatttccttatgctacaaaaacctccaaaggagttcatattaacctttttccacacaaaacatacttcccttgaatgcacttaaagatctccataaaaagcttaacttataactgatctaatcaaaagcatcagctcactttgcatccttccttctaacatttccaaatcagaaacattggaatgatctccatcatgccaatccaacattacctttatcttctaaacatgctttgattactaaaattcaactaaactcctt

SEQ ID NO: 53339 - DNA, 318 bp, Oryza sativa
  Clone ID: PAT_MRT4530_5554C.1
atggcgcctgaagcgccagccaagaccgggctgggtttacacccgccgtcccgccacctgccgatcgaaagctgtgctccattgctacaaccaccatccatcctccgtcgcgcgtgggcaccgttgcaccgccggcccccgccggccaacctccatgcggcctcccactctttgcaccggacagttgtcaggccatcaccgtcgccgaccgccggcctttgccgctccgtcacccacgcctgccacaagccgtcggcctacgtcgcccgtgcccgtcgcaagccgctggcctctgtcgctgtctcctccggtctctag

SEQ ID NO: 53340 - DNA, 1023 bp, Oryza sativa
  Clone ID: PAT_MRT4530_55550C.1
atgcagcagcggcggggcggcggcggcgtgccgcggctggccatggcggtggcggtgctcgtgctcgccgcgtcgtcggcggggcgatgccgagcgcagctggcgagcggctactacgccggcaagtgcgtgaacggcggcggcggcaactcgagcgtggcggtggacgtggagagcatcatccacgacgccgtccaggcacgcctcgcctgggacaagcggatggtcgccggcctcctccacctcatcttccacgactgcttcgtcgccgggtgtgacgcgtcgatactgctggatgggccaaacacggagaagacggcgccgcagaacaacggcatcttcggctacgacctcatcgacgacatcaaggacacgctcgagaaggcctgccccggcgtcgtctcctgcgccgacatcatcgtcgccgcgaccagggacgccgtcggcatgtgtggagggcctcggtacgaggtgcagctggggaggctggacgggacggtgtcgcaggcgtggatggcggcggacctgccgggccccgacgtcgacatccccaccgccatcgacatgttcgccaagaagggcctcaacagcttcgacatggccatcctcatgggggctcacacggtgggggtgacacactgctcggtgataaaggaccggctgtacaacttcaacggcaccggcgaggcggacccgtcgatggacccgatatacgtgtggatcctgacgacgttcgcgtgcccaaagagccaggccttcgacaacatcgtctacctggacgacccctccagcatcctcaccgtcgacaagagctactactcccagatcctccaccgccgcggcgtcctcgccgtcgaccagaagctcggcgaccacgccgccaccgcctggatggtcaacttcctcggcaccaccgacttcttctcctccatgttcccctacgccctcaacaagctcgccgccgtcgacgtcaagaccggcgccgccggcgagatcagggctaactgccggaggaccaattaa

SEQ ID NO: 53341 - DNA, 381 bp, Oryza sativa
  Clone ID: PAT_MRT4530_55551C.1
cagtgacattctactggggacatgtgccaaacaaagaaccaataatccccttgtcagaagggagcagtaacagcagcagctactgcccactgtcgatcaaccccgacgagctcgacggcaatgccgggctgtgcggcggcgtgctcccgccgtgcttcgggttgtgctccatgctcccccgcacgcgcgccgtgatcgccgtgaagaagctatggcgaccagccgccgcccaagcccccactccggcggcggcggtggttgtggacaaggacaagccggtgttcagcacgacgccggactccgagtctccgactacgggatggcagaacaacgggcagcgccccctctataggggagaggatgaaacggcgtttcacctcg

SEQ ID NO: 53342 - DNA, 177 bp, Oryza sativa
  Clone ID: PAT_MRT4530_55552C.1
tactactctactggagtggatgacaacaaggacaagcaagcgagaacgatctactactctactggagtggatgacaagcaagtgagaacgatctactactctactggagtggatgaacaagcaaacgagcgaacaaccaaggaggagcatgactcgctcgtctcgtcgaggtattag

SEQ ID NO: 53343 - DNA, 317 bp, Oryza sativa
  Clone ID: PAT_MRT4530_55553C.1
aacaaaggttcccatattttggaccttaaaaaggcttttaaaaaaaattggccttgggggagttcccaaaaaccccgtttggataaaaaaacttcgttggggggggaacaatttcaaaagggaggggggaaaaaccccccccccgccaaaatttaaagaaaaaggttttgcttttaaacccccccttattaaggccgttcccaccttttgctgagggaaaggcctttttgcccccgttgccccggggggttccagcggggggcccctctgggccttgaaaccttaaattttttaacagggcccccgcctggcaaaag

SEQ ID NO: 53344 - DNA, 998 bp, Oryza sativa
  unsure (1)..(998): unsure at all n locations
  Clone ID: PAT_MRT4530_55554C.1
ccacgcgtccgggccgacgtgctcctcggctcggagcgccgcgtcctcatcagcgcctccgccctccctccgccggagaccctcctcggccgcctcgaccagctcgacctccggttgcggcagctggaggagcagcggcgggcgaatgccggcgacggcgacggcgggccggcggcgcaccaccagcacagcaagtcgctgccggcggcggcgctgcatcatgtgcaggcgaagggcagcctgatggaccgcctcaacctgctcgagtcacgcatcaggcagctcagctgcgagctggacgtcgcggcggcggccggcggctcgagcgtgccggcggtggcgcggccggccgaggaccgcgcgtggtcggagccgccgctgccggagccgtgcaaacaccagggcgccggtttgcncccncccccnccggngcggcggggagctggagcggcgcgcatttcctgtacaagggcgcgcggcagcttcatcgcaccaaaccgaacacatccacgatgaagaatctgaaggaagcgaaatgtgcgtgcgagaaggagaagaggaaggcggaggagcggtggaagccagcaaggaggaggtggttcaatgtcggatgctaataatcaaacaagatatcatgcgtggattaacttatctatccttattctctaagtgcttattactcctattaggagctagctactatataccgtacgtatacacagtactattatgtactctctccgtttcacaatgtaaatcattctaatattccccacattcatagtgatattaatgaatctagacatatatatttatctagattcattaatattaatatgaatatagaaaatgctagaatgacttatattgtgaaacggaggaagtaagcgtttttgttctatacgtattgttttaattcttctgttcgatgttagtgtctgttgtgttattggttgtaacgtgcaagacgtataaaatataaacgggaatttttagct

SEQ ID NO: 53345 - DNA, 403 bp, Oryza sativa
  unsure (1)..(403): unsure at all n locations
  Clone ID: PAT_MRT4530_55555C.1
gacctcccaanaaaaattccccccggtgggtccgggnagtccaaattncctcccccnaaacaagatgaccgccnaggaatccgctggccgtcgtcaacangaaaaagagctgtgcctgaagctgaacccngtgcccgccctccggcacctaacggcgggcatcaccaacgccatatcgttcaacgccagctcaagtgagtncgacgtcgacntctcnaccactgcangggcgacnaagccggcnaccanaaagctgttgttgtcgccnacccnaccgcnttcaacctcngngcggctttgctgaacgacaagttcctcatnccnggngtccatnaangnagaagccccgatgtcgantcttccncaanangaacgcntctngcccnggacccgaactnatctt

SEQ ID NO: 53346 - DNA, 359 bp, Oryza sativa
  Clone ID: PAT_MRT4530_55556C.1
aaaaaaacagggtgttttatccccccaaattaggaattgggtcccgaccagttgaaccaaaaaaaaaaccttaggggaattcccatcccaaatccataagtttttgggggcaccccttttatgaacacaaaccccccgaaaaagggggggcccagggttttttgaaggcccccccccgaaggacccccaattgaaccccacgcttccacagttcacccgaccccgcaaaacttaattaagagggggttcaaagaagggggcccccaaagaaaccacctcttggaaaaggggggggggggggggaaccggcccaaataaccttggggggggcccgggggcgggagaacatgagggggggg

SEQ ID NO: 53347 - DNA, 2701 bp, Oryza sativa
  Clone ID: PAT_MRT4530_55557C.1
tttgggttaagaaaaagatgaggcccttcatatattaatgaccgaaggagtaacctccttctttttttcatcaaaccacgtcgaaataacactcatcctttttcagaacaaaagagcagctattataaacatatatatttgactgatgttacatttggtagaaacaaccacggaacagaaacaactggaggaaaacagattttgctacaaggccgtcactctaattttgaatgcaatcacttcaattcagcaaaaatcgctgaaacaaatggagtcagggtggcgttgtgttgcacatcaactgacagatacctcatttttttttgttttttttttttttcttggttattatcctaatcaaaagcggcgcttggagctaaatagttactcgcatcgctgtgaagataatcatgtcttttaacattagaggaacattcattataaagataagtatctgatcaacccattgccaaatctaaataaccacatcagccactccactgaaagaaaccaaatgatgcgcaagggacgcgattatctttttctgttgaacatcttctccgaaatcctagacccgttttcaaacgaaagttgcagcgcggtttcatactcactttcttggagataactgctgtaccttatggtcggtaactctcgagcatacagtaggtgctgcttagtgtattgttaacactgaacatgaatcagttcgtacagttacagccttttaggtaggtgattcttcttcggttcgttgccaggaggggacgtcgttagcagctgttaggagatggtttctgcatatgccgagaaggagcccggaattcgccccaatccatggtacgcccagtgagcccacagatgagaaggccttgaagctagtatacattggccctaacgaaccatatgactgggcctagcactggctttcagaccattcaaggtctggtgcatgatggatggcagcaaacgtgaaataggtaccctgcccaacccagatgatcgatgcagaaaaacccagatacagggaggctggcaccattgtgtaccatgtcgggacgaggttagcgaggatgaagatgacgtagccgctggtgccgacgacgagcgcgcgcttggagccgagccacgtgaccacgggcgacgcggtcaccgcgaagagcgtgaaggaggtgtacaggatccccatggacaccgtgcccaggtcgccctcggtgttgaccgagctctggaggttctgcgcggcgcagtaggcggagaagatgaagaggaacgcggcggagaggacgtgcaggtcgcccgcgtggctccagcggtggcccgagtaacccaacggcgcgacgccggcgaggagcggcgccgtggcacccccgtcggcgccggcgccggccggccgcctcctcatcgccttcgtcgtcgcggtggtggcctcctcgcgcgtccatggcccgcggcggcggaggcggaaggatctgacggtcgatggcttctccacaacaagtgtaagtaacaagaatgcgccgaaagagatgatgagcgcagtggccatcaagataagcatggcttgtagcgtaatatttgggctcaggaagaagatgactgcgatggcacccgattgccaaaccttcaactgtgcaaaagctgcctccttgacatcctcgaacagcagcccaagtaatgcacttaactgtgtattcaagacaccatcaccaacaccccataaggcacctataaacagtggaactgctgcaccaagcagtccacccattggacagaacaggactacagcaacaacatcggctgcaccatatattgccatggctccgccaacgccagagatgccaagcacaggtgttacaatatttttcgtgaaaacagcccatacaaatgcctgttgtaatcctgaatatgcaataagagggatgataagaatcatccttcggtccttgagaggggcaacaatatacttcatcatagccacaaatgaggaatgtgttggagcattatttcctttctcgtcccttttggaaagtaaacacattaatataatgccgacaatcatgcagccaagaaacacaacaaacagcagacttttccccgtgacacttcctccatcctttccatctctcagtagtgcaagagagatcaaatttccaatgacctgtgtgctagcaaacattccccagaactctccattgaagttccccaaagtttggccttcaggcaaattattgtctcttgcatgactgagggcagcagacgtgagatatgtaccctgcccaacccagatgatcgatgcagtaaaacccagatacagggaggctggcaccattgtgtaccatgtcgggacgaggttggcgaggatgaagatgacgtagccgctggtgccgacgacgagcgcgcgcttggagccgagccacgtgaccacgggcgacgcggccaccgagaagagcgtgaaggaggtgtacagaatccccatggacaccgtgcccaggtcgccctcggtgttgaccgagctctcgaggttctgcgcggcgcagtaggcggagaagacgaagaggaacgcggcggagaggacgtgcaggtcgccggcgtggctacggcggtggcccgagtaacccaacggcgcggcgccggcgaggagcggcgccgcggccgcctcctcctcctcgtcgcggtggtggcctcctcgcgcgtccat

SEQ ID NO: 53348 - DNA, 631 bp, Oryza sativa
  Clone ID: PAT_MRT4530_55558C.1
catatattaatgaccgaaggagtaaccttcttctttttttcatcaaaccacgtcgaaataacactcatcctttttcagaacaaaagagcagctattataaacatatatatttgactgatgttacatttggtagaaacaaccacggaacagaaacaactggaggaaaacagattttgctacaaggccgtcactctaattttgaatgcaatcacttcaattcagcaaaaatcgctgaaacaaatggagtcagggtggtgttgtgttgcacatcaactgacagatacctcatttccttttggtttcgtatcgctcgtgcatacagtatgtgctgctttggttgttggtaacactgatcaagatatgtggtgaaattggccccactttggaattggtttctgttggacaaaaggatttcggatttctcacgatctgacggtcgatggcttctccacaacaagtgtaagtaacaagaatgcgccgaaagagatgatgagcgcaatggccatcaagataagcatggcttgtagcgtaatatttgggctcaggaagaagatgactgcgatggcccccgattgccaaaccttcaactgtgccaaagctggcttcttgacattcttgaacagcagcccaa

SEQ ID NO: 53349 - DNA, 540 bp, Oryza sativa
  Clone ID: PAT_MRT4530_55559C.1
atggccagatcctcgccgcacccgccgccgctgactacgaagaggaggaggcggccgggagtggccctgcgatgctggatccgcgccaccaccgtcgccgacgaggaggaggaggaggcaacctggagcggcaccgccctccccatgcgtggtggtggcggatctggtggtgggggatgtgggcggcggtggatccggcgactggagtggcctgacccggagatggtgacgacaaggacaatggaatatagcttcgacgagataaatttcattctccggataatggggttgtgtattctggtgagcgagaggcagtacgctgggaatgtccttcaggatgtgaccctcgaaagcaccgctcaacactaccacagcgtccaagaagtggaatgggatcctgtgacttcacgcagtgaagttagaggcgtacagttccgtgacttcggtgggccgcgaaggcggcgagctcccggcaacactgctgctgaatggactgcacgaacagcagaatggctgggcaccattcttgatctgttctaa

SEQ ID NO: 53350 - DNA, 2929 bp, Oryza sativa
  Clone ID: PAT_MRT4530_5555C.1
atggtggaggcgacgcggcagcggaggaagccgctggtgctggcctccacgcaggcgctgctcgactcgctgccgggggaccgccgcgggtcggcccttccgccgccgccgccgccggagccggtgcgcatcagggccggggtgctccgcttccccaactcctcctcctcctcgtcttccgcgggcggaggcgagttcggggaggccgcctccttcgtcgccctcccctcgtccgcgctccgccggctcgccgtcgtcaccggcacgccggtgcttgtgaagaatgctgacaataatgtcggaaggattgccaaagcagtagtacttgatcacccatgccttgatgattccctgacagaacatactgagcctgtggacgcagcctctcccttggataatgccatgggtatcttaccctgtcgctcttttccaacaaacggctttccgcccttggatgaagaggtcgcttatgttagcccacttctggcattcaatctgggagtccatgtctcttgtctcaagcttcttgttcaaaaaggagagaaacctttcaagttctgttctaaagttgaagatagtgatctggctgctggtgaagaaagtaatcctattcttcacttagagattcttccatcccctcaagtgccgaaacatgctttgcatttgcgggtttctgttgtgaggattcctgaatgtggtgtgtttgcttctctaaaggcaaattcagccattggaggaagtgactaccaagatatgattgatcaagctctgaatgagcactttaagtttgataggttcctagcgagaggggatgttttttgcataaggaacaattggaattgtggcgcaacctcctgccttgcatgcaacagggaggacaatagactccatcctcatgatatgatttacttcaaggtgactggcatggaaccatcagatgaaccagttcatcgcgtcaactgtaatcaaacagcccttgttcttgggggaggtgcttctgcttcaatacccccttacagtttgtttgcttctcctggtgcttcagttcctttgcacagtgaaatagtggagcatttagcatctatcattgcaccagcactatgtccttcaaacattttgccaaaagtcaagttttccactttcttatacgggccttcaggatgtgggaagcggacggtagtcaagcatgttgccaaccattttggtttgcatgtggttgagtgtagctgtcatgatctaatgacttcatcagatagcggggcaccagctgcacttgtggctgccttcaaagaagctcataagtattcaccatgtataatacttcttcgccactttgatgctattgggaatacatcctccaacgaagggacacaatctgcgcaatctggcactgcagcaaacattgaatccgtcatcaagcagtacattggacaacattgggttgctacggaatcgctcccagcaagagatataaatggaaatccataccttgtggaacctgaatgtgtaagcccacttcaagttatactagttgcaactgcagatcgtgctgaaggaatgccacaatcaattaggcgatgtttccgccatgagataaacatgaaaagtataaatgaagaacagaggaggaacttgatatctgaaacactccattgtgtttcaacgtcagctgatgagagtataaatgacaagttcgtaaaagatttagcagtacaaacgtctggtttcatgccaagggatatacttgcattggttgcagatgctggcatatcttttgcacataaagttgaaacggataaaaataatagcgaaggtgataagcttaaaggcatccttcctacaagctcttctagctctcaaaatgaagaaaaaactttttgcaaagaatatattttgtcttctctagaacgggccaagaaaaggaatcgtgctgcactgggtacacccaaagttcctaatgtcaaatgggaggacgttggtggtcttgaggaagtgaaaaaggttattctagatactattcagttacctctgttgtataagcaccttttttcttctaaattggggaagcggtcaggtgtcctgttgtatggacctcctggcacagggaagacattattggcaaaagctgtagcaacagagtgctctttaaactttcttagtgtaaaaggtccagaattgattaacatgtatgttggagaatcggagaagaatgtaagggacatttttgagaaggcaagatctgcacggccatgtgtaattttctttgatgagcttgattcccttgctcctgcacgaggatcctcctcagattccgcaggtgtgatggatagagtagtttcacagttgcttgtggagattgatgggttaagcgataacagtcaggatcttttcattattggagctacaaataggcctgaccttcttgattctgcacttctccggcctggccgctttgataagcttctctatgttggtgtaaattcagatgcatcatatagagaaaggatcctgaaagcacagacacgcaagtataagctccatgagaatgtttctctcttgtcaattgctcagcaatgtcctccaaactttaccggtgctgatatttatgcgttatgcgcagacgcatggtatcatgctgctaagaacttggccaaaacacttgaggctgatccttcaagaaccagtgaagccagtgctgatgacgtcattgttgagataaatgatttcatgacagtgttaggggatatcacaccatcgttgtctatagaagaattacaaaactatgaacagttgaggaagaagattgagggaccatctagatgacgtcagttaagccttcattctgtgctaccatagcaacctaagtttcagtgtatttgacacatggtggccatgacgaaagcattggctagtgatgaatgtggcacca

SEQ ID NO: 53351 - DNA, 333 bp, Oryza sativa
  Clone ID: PAT_MRT4530_55560C.1
atgactatgaattcatgttgcttgtttctaggacaagtccagattgaaggtatgatccttgtgctcgagctgtcgaaattgttcattgacggtagtagatgcggtcagcatggaggcaagatgaccaacatggagacgttatcgcccatccgaggtgacgaagatgtcggttgtggagacgaagttgcccatcagcagcgatggcgaactccaccaactatgcagaagaagaaaccaattggtgacggtagacgaccaatgataatgacgactggcggcagcagagatggtcggctgtgcagacgaagttgcccatcaacggcagtagagtag

SEQ ID NO: 53352 - DNA, 172 bp, Oryza sativa
  Clone ID: PAT_MRT4530_55561C.1
ggactcttggtcgttacgcatggacggacccttgttcggacacattgtgttctcccggaaaaagccgagaccggaaccggggggcgtaccaactgtgccgtatcgggagtcgcaccagaggttgaccaccgcaggcccaccgctgaaaaccgggccaaactgagaggggtgt

SEQ ID NO: 53353 - DNA, 680 bp, Oryza sativa
  Clone ID: PAT_MRT4530_55562C.1
aataataattttaaaaaattttgaataagacgagtggtcaaatgttacaagcaaaaactcaaaatcccttatattatgggacggagggagtaagtattagaatgcaaaaatcatgctgctcaagggtgcaccagctgcccagctggttttggaacataacaagcctacaataccttgacctcagttcaaatagattgtatgggcaaattccgcacaaactgatgatgacatccctacaattccttgatctttcgttaaacaagatctcaggggaaataccagccactctgtcaaatctaacgttcttaagttacttggacttgtcgtacaacaatcttacgggaggaattccatcgggaacacagcttaatagcttgtatgcagcaaatccatttatgtacattggcaacattggactttgtgggcatcctctccaaaacaattgctcgagggataatgcatcaaagcaaggtcgtcaccagggaggaacaaaagaaggtcatgggatagatttcttttatcttggacttgggtgtggcttcataactggtacctggatggcatttggtgttctgttgttcaagcgaagatggagaattgctttctttcaactaccagacaagctgtacgacaaagtatatgtccttgtcgctacatgggcaaggagaacacaaactgat

SEQ ID NO: 53354 - DNA, 273 bp, Oryza sativa
  Clone ID: PAT_MRT4530_55563C.1
atgattatcgcgggcggccccttatgtggtccacctgtgataaccgatcttcgtaggcggacggccaactcctccccggttctagttttcaccggcgaggtatttgctcaaaagcctccgacgacggtcaagcggatgcgtggcaaggtgcggcatcaaccggggccgcgcggggaagcaagcatgaatcatgatgcgggaggttgcacgggacgagaagggcggtcggcgagctgcgtcgcccaccgcgccttcctgcatgccccgacatga

SEQ ID NO: 53355 - DNA, 1869 bp, Oryza sativa
  Clone ID: PAT_MRT4530_55564C.1
atgccgccctctccgccgctccgccacctcctctccttccgccgccgccccctcgccccgcgcttcctcctcctcccccgccgcttctccgcctccgcatccgcctcggcgctgcaggccgccaccccgcccccctcatcctcctccgccgctcgcctcgccgccgccgtgcacggttccgccgcgtccggggacttcgcgcacgccatccgtttgacgaaacacctcgtccgtgcctcctcctccccaagccatcgccccggcgccgccggcgccgccgccgccgcggcgctcgcctccacctccgcgtcgccggcccccgcgctcggcgtgctcgtcatcgcgctctcccagatggcgctccccgacgaggcgctctccgtcttcggccgcctccgagagctgccggcattgccggcctgcaacgcgatcctcgacggcctcgtgaaggcgcacatgctcgcccgcgtatgggagctgttcgacgaaatgcttggtcgggggatggtgccgagtgtggtgacttacaacacgctcatcaacgcgtgtcggcatcagggcgatgtggcgaaggcttgggaggtctgggatcagatggtagctagacggattgatccaaatgtggtcacatatacgacaatgatatgtgcactctgtgaggaggactgcattggtgacgctgaggggcttttccttgagatgaaggaagcagggatgcggcctaatctatacacatacaatgcattgatgagcagccacttcaagagagacaacatcaagcatgcgcttgtgttttattacgacttgctgaagtgtggtcttgttccaaatgatgtgatctttaccactctaattgacggtctctgtcaggcgaacaggataaccgaagcaaagaatatatttctggacatgcccaggtatgaggttgctccaactgtgcctgtgtacaacagtttgatccacggagcttttaggtctggatacgcacaagaagcattagcatttttccaggagattattcgcaaagggttgcgcccggatgagttcacctgcagcatagttgtaagaggcctctgtgatggtgggcaaatgcaggttgccaccaggtttcttgaagtaatgcaacaatctggtattgcactgaatgcggctgcttacaatgtgctgattgatgagtactgcaagagtggaaatttggatgaagctctcgtgacatgcacaagaatgagcgaggttggagtagagcccaatgtggtgacatactcctccttgatagatgggcactcgaagaatggggaaatggaaatagcaatggctatatacacagagatggtagctaaaggggtcgaacctaatgtcgtgacatacactgctctgattcatggccatgccaagaatggtgacatggatgctgctttttggttacagaaggagatggaagagaaaggcatttattcaaacgcaataactgtgtcagttcttgtagatggtctgtgccgagaaaatagggtacaagatgcagtcagattcatcatggaatactcagggcagaagaaatctgagaaaaacccttcaattgcaaacagtgtgacatatatgaccttgatatatggtctctatatagatggtcaatacaacgaagcctgtcacttcttctcttgtatgagagattctggtatggtgcctgatagattcacttacacactcgtgattcgtggactgtgcatgcttggctatgtcttgaatgcgatgatgctctatgctgatatggttaagctagacatgcgttgtgtgagaagctgggagatgggaggagttgccgaacacgaacggttggtcggacaaacagtagattgtccctcctgctga

SEQ ID NO: 53356 - DNA, 1499 bp, Oryza sativa
  Clone ID: PAT_MRT4530_55565C.1
catgttcaggttcgtgtttcacctttggggaatttggagcagagacgatcagagttagtagcagttatgaacgatgaggcgcccgggcggaggaggcggaggcgctggtcgcggggaggagggcgacggaggggcgccatgaacatgacgaaacatttatggtctggagccgttgctgctatggtatctagaacagttgttgctcccctcgagaggctaaagttggagtacatagttcgtgctgagcagagaaatctatttgagcttatccatgccattgcaacaacacagggtttgaaaggcttttggaaaggaaacttcgtcaacattctccgtactgctccattcaaagccgtcaacttctatgcatatgacacttacagaaagcagttgctcaaatggtctggcaatgatgaaacaacaaactttgaaaggtttatcgctggtgctgctgctggtgttacagcaacgatattgtgtataccaatggatacgattaggacaaggatggtagctcctggtggtgaagccttaggaggagttattggtgttgcccgccacatgatccagactgaagggttcttctctctgtacaaaggattggtaccttcactcatcagcatggcaccctctggtgctgtattctatggagtatatgacatattgaagatgggctacctgcattcccccgaagggaagaggagggtatcaacgatgaaacaacaaggtcaagaggcaaatgcattagatcagcttgagttgggcacagttaggaccttactatatggtgctattgctggttgctgtgctgaagcagccacatacccatttgaagtagttaggagacagctacagatgcaagtcaaagcaacaaggatgaatgcttttgcaacatgccttaaaattgttgatcaaggtggagtaccagcactctatgctggcttgatccccagcttgctacaggttctgccatcagcgtctatcagttatttcgtatatgagttaatgaagatagtcctgaaagtggaatgaatgcaaattaattcttgagcatgcacatcaagttcaagaagcccagctcacattaccttgacaaaattcaagtaaacagcgcatttagatctgtttttgtagcatttcttcacggaagcttcaaaggccgtgggagtaactttatcttggccaaagcctgaagcattgttcgctcgaagcttttcaccacaagattaccttatacacgatgaggtcttgttcgacatctgattcgatcaccgatctgttgcagattgatctgtcatagcaaaaacatatgggcttcttgcccttcagatttcaattaacaaattttcaacttttcatttttgatgtattgatgcatcgactggaaaggaaagtgggtttgctacttgctacaacctacaaagtggcatgttgattcccttttgcaagcatggcatcggttggtttgaaaaagacgaccgggaagaaagaattgcatc

SEQ ID NO: 53357 - DNA, 565 bp, Oryza sativa
  Clone ID: PAT_MRT4530_55566C.1
atatatatatctatatatatatatatatatatatatatatatatatatatatatatatatatatatatatataratatatatatatatacatacatatatatatatatacatacatatatatatatatacatacatatatatatatatacatacatacatatatatatatatatatacatacatatatatatatatatatatatatatatatatatatatatatatatatatatatatatatatatatatatatatatatatatatatggtgagtttatttgcaatcacagaggtgccaaattggtctctatcataattgatctattatttactttaaaaaatatctatgatcagttatactatggagtatatttacatcatagtattatagaggtaccaaatttggcacatgaggttttaccaccttcgaaattcggtgaaaatgaaaacccaccaccagatcatatccacggtgtgtcggttatggtaacaaaagccatactttacctaatagataacatatactatttgagctatctatcaatcgttgctactggtgttcgg

SEQ ID NO: 53358 - DNA, 1470 bp, Oryza sativa
  Clone ID: PAT_MRT4530_55567C.1
atggctgtttctttaaaatcaagtggcagtttttgtagcacaccgcctcagtggctgcattcaacaagggatcgaattttatacggttattctcattcaaatgccaaagagtgcacttgcaagaaaacaaaaaggcctgctccactgtgtgttaaagctacttccacgaaagtggaattagatttcaatgatccatcttggaagcagaagtttcaggaagactgggataaacgttttaatttgccacgtattacagacatatatgatttgaaaccaaggccaaccacattctcactcaagaaaaacagaagtcctgcaggtgatgaaaatggtacacctatggataaatggaatggttatgtgaacagcgatgatcgagcacttttgaaggtgataaagtattcctcgcctaactctgctggagcagagtgcattgatcctgactgtagctgggtggaacaatgggtacatcgtgcaggccctcgtaaggagatatactatgaaccagaggaagtaaaagctgccatagttacttgtggagggctctgccctggtttgaacgatgtcatcagacagatagtattcactctagagacctatggggttaagaatattgttgggattccatttggttatcgtggattttttgaaaagggcctaaaagaaatgccactttcacgtcatctggtggagaacataaatcttgctggtggaagttttctaggagtctctcgtggaggagctaaaactagtgagattgtagatagtatacaggccagaagaattgatatgcttttcgtgcttggaggaaatggtacccatgcaggagcaaatgctatccatgaagagtgccggaagagaaagctaaaagtttcagttgtagcagttccaaagaccatcgacaatgatatacttttgatggacaaaacatttggtttcgatacggctgttgaagaagctcagcgggccattaattctgcatatatagaggttcctttcacgcttgatggagaatatggtgttctacgacaccttgagcatttgttaaagaccaaaggattctgtgttgtttgtgttgctgaagctgcaggacaaatacagctggaagcacgtgcaacagatgcatctggaaatgtgatacttagtgacatcggtgttcatatgcaacagaagattaagatgcatttcaaggacattggtgttcctgctgatgtaaaatacattgatccgacatatatggttcgggcatgtcgtgccaatgcatctgatgcaattttgtgcactgtacttggacaaaatgctgtccatggagcatttgctgggttcagtggcatcacttcttgcatctgcaacacgcactacgtctacctccccatcacagaagtcataacagtaccgaagcgcgtgaaccctaatagcaggatgtggcaccgttgcctaacgtccactggccagcctgatttccattga

SEQ ID NO: 53359 - DNA, 423 bp, Oryza sativa
  Clone ID: PAT_MRT4530_55568C.1
cccacgcgtccgcccacgcgtccgcccacgcgtccgatatggtgttctacgacaccttgagcatttgttaaagaccaaaggattctgtgttgtttgtgttgctgaagctgcaggacaagtaagctaaacttcagagtgatttcttcatgactttttggctacttttgttccagatacagctggaagcacgtgagtcgagagcctatgatttagttattctacgttcattacaggagtttacaaaaatcaggtgcaacagatgcatctggaaatgtgatacttagtgacatcggtgttcatatgcaacagaagattaagatgcatttcaaggacattggtgttcctgctgatgtaaaatacattgatccgacatatatggttcgggcatgtcgtgccaatgcatctgatgcaattttgtgcact

SEQ ID NO: 53360 - DNA, 624 bp, Oryza sativa
  Clone ID: PAT_MRT4530_55569C.1
atgaaggtgaaggtgaaggagaggctgacgagggaagaggtggagcggctgctgtcgttcgtgccgaggccgtttcctcctcgcgacagaccacggtgcgacgatcccgacgtcaacgagatggaggatctcctcgcccacaccgtgctgctcctcaactccaacaaccaagtcatcctccgggcgcaggccagggcccgcgaggagctccggaccaagggctacgtcgagcgctggaccagcatcgctagctcagctcgtgtccaccaattcacaaaatcgattccaatacccaacaaggcgacgccgtcggaggaggaggaattaaagggaagagaagaagatcgatgtgtggcgatgacaaatgagctgaagaggtgctccaaggaggcgacgccatcggaggagaaggccgccaagaagatgaagaaggaggaggctgtgaagaagaagaggatgccgatggaacgggtgcaccacctgctgtcgatggtgccgagggcgccggttcctcttccggtgatccgcgatgattccccggagctgaaggagatcgaccaacgtcgtgcaggctctcaacaccagctctcaactcatccgccggatgcaggccaacgcccgtga

SEQ ID NO: 53361 - DNA, 3078 bp, Oryza sativa
  Clone ID: PAT_MRT4530_5556C.1
tgcaaatcacatcgtgacaaagcaatcatcatctcttgacaaagcaaccttgtcttaaaagttgcagttgatttaacatgcctgcagccgcgttagagggggcgatccttctcctcattgccatcctttgcaagatggcacaatcgtctcggtcatccatctacctccattgttgcaagaataattagccacaataagttaccttgtcattccgagtctagaaatgagtcggtttgtgatgcttgacaaaaagctaaaagtcatcaattaccctattcaaggtcatctagtgtgtctagtcatcctttggaactagtcttttctgatgtttggggtcctgcccctgattttgttggtaataagaagtattacgttagctttattgatgactacagcaaatttacttcggtttattttcttaagcacaagtcagaagtatttcagaagtttcatgaatatcaagctcttgttgaacgactcactggtcaaaaaatcattgctatgcaaaccaactggggtggagaatatgaaaaactccatccattatttgaaaaaattggcatatcttatcatgtgtcttgtccccatacacatcaacaaaatggatcaacagagcgtaagcatcaccatgtaatagaagttgggcttgcactcctagccaatgcttatatgcctcttaagttttgggataaggcattcctcactgccgcttatctcataaataggacacctagcaaggtgatcaaccttgaaatgccactagagctcctatttcaccaaacacccaattatcaattccttcgaatttttggatgtgcatgttggcccaatctttgtccttataataatcacaaacttcagtttcgatccaagcaatgtgtcttcctcgggtatagcaacttgcacaaagggttcaaatgtcttgatattcctacaggccgtgtttatatatctcgtgatgtcatctttgatgaaaatgtgtttcctttttcatctctccactccaacgccggcgctcgccttcgcactgagatatcccttttgccaccttccttgctccctaccagtactgatcacaggggttaacaaaggagtgattatgtgtttaatgtgccagctaacagtatttctgcagaagaaaataatgcacagggtacacaagctgggggagacgtagcagctgacaggggcggaaagtgatgcaaaatcagcagaagtcatgtcgccggccacgtcgccggtctccacttgtcccacgcattcctctcagcagaagcagtctccggcagcctctgatcagcaacagcagcagcagtcatcgcaggagtcatcacaacagcaacaatctccagcaccatcaactgctgacattgaccaactgacacaaggtgaggaaaccgaggtagaagcgactgaacctctacactatcaggtaaatacaggtgcagatgttcaacaaggacgacccaagactcagagcgaaatatgcaaggagaaagtatagactgatggcaaaatcaaatgggggttgcttcactgcctcaggtgagccacaaaatttacatgaagcttttactaataaaaattggaaagatgctatggatgcagagtatgatgcactcatgaaaaatgagacatggcacttggtaccactagaaaagggaagaagcgtgatcgactgcaagtgggtatacaagataaagaggaaagcagatgggagcctagatagatacaaggccagacttgtagctaaaggtttcaagcaaaggtatggcatagactacgaggacacctttagtcctattgttaaagctgctactattagaacaattttgtctattgctgtatctagaggatggagtcttcgatagctagatgtacagaatgccctcttgcatggagttcttgaagaggaggtttatatgagacaaccacctgggtacgaaagtgaaaaggtaccaaattatgtgtgcaaacttgataaagcattatatggtctgaaacaggcaccaagggcttggtattcaaggttgagtacaaaatttcatgagctaggttttaaatcatccaaggcagatacttcactgtttctctataataagggaaatgtcaccatgtttgtgctaatctatgttgatgatataattgttgctagttctatggctagtgcaacttctgcttttctgcaggatcttaccaaagctttttctttaaaggacttgggtgatttacattactttcttggaatagaagtgagcaaaagtgaacagtggaataattttaactcaggaaaagtatgccaatgacattctgcgccgagttggatgcaagattgtaaacctgtaagcactcctttgctaacctcaaaaaaattatcagctcatgaaggaacaccacttggtcaaaatgatgcaactcaatacagaagtatagtaggagctttgcaatacttgacattaactagaccagatatagcttatcctgtcaataaggtatgtcagtatttacatactcctactgtgactcactagactttggttaaaagaattttaaggtatattaagcatactgttaattatggattgaggattagtaaatctccatccttgttttttagtggattcactgatgcagattgggcaggctgtatagatgacagaagatcaacgggaggttttgctatatttttaggctgtaatctcgtgtcatggagttcaagaaagcaagcaactgtgtcacggtctagtacagaagcagaatacaaggcgttagcaaatgtgacagctgaaatcatgtggatatagactctactacaagaattaggtgttaatgcacctaaagctgcaaaggtttggtgtgataatattggagcccaatatatgtctgctaaccctggggttcatgcctggtattaaacatattgaagttgattatcattttttgagagaaagagtagctaggaagctactggaaatagagtatgtctcttctaaagatcaagttgcagatggatttactaagcctttggctgttcggcaatttgaagagttcaagcacaatctcaacatccgaagttta

SEQ ID NO: 53362 - DNA, 159 bp, Oryza sativa
  Clone ID: PAT_MRT4530_55570C.1
atggaggggatggccgaaggtgggcggtctaggctatgcgtgcatcgcgtgatggagtctagggtgccgacaatgggaccaatggggacagttgtcacgatggaggttgaagagaatggtggtgtgcacatgctactgactcgacgcaaagacgaatag

SEQ ID NO: 53363 - DNA, 501 bp, Oryza sativa
  Clone ID: PAT_MRT4530_55571C.1
atgtcctcggtaaagcgcatccactgttgcagcgtgaaggaaactattgagaggtacaagaaagccaacagtgacacctccaacgccagtacagttgcagagatcaatgcccagcactaccagcaggaagctgctaagctgaagcaacagatcaccaacctgcagaactccaacaggaccctagtaggtgataatatcaccaccatgaaccacagagaacttaagcagctggaaggcagactggacaaaggcctaggaaagattagagcacggaaggaaacggagctgcagaatgacaacatgtacttaaagagcaaagttgctgagagtgaaagaggactgcaaacagtgaacatgatgggttcagcatctacgagcgagtacgtgcaaaatatgatccattatgatccaagaaacttcctgcaattcaacatcatgcatcagcctcagtattatcctgaacaggaggaccgaaaggcctttatgtcagatgaaagataa

SEQ ID NO: 53364 - DNA, 298 bp, Oryza sativa
  Clone ID: PAT_MRT4530_55572C.1
acgtccactcgttctatagcgcacgcccttttttttatgctgacgccttgctgccttgaaagcggacagatgactgtttgggtatgcatcccaccttaagtttgacatgtccacatacgcatgcataccgtgagcgttatattatcacttacgcactacaatattgtaaaaattgactacaatacaccgccaagggtggtaatgttaccgggggcactatagaacctagggtatataccatatgtacatggggaagttaaaagccaacagtgcttgatcttgagccacattccggtca

SEQ ID NO: 53365 - DNA, 1577 bp, Oryza sativa
  unsure (1)..(1577): unsure at all n locations
  Clone ID: PAT_MRT4530_55573C.1
cacaagcttttgtgaaaacttgccccaaattacaagctaatggtgcaatgccatgaggtaggccagccaagaggggaaaggaggaaagttcaggaggaagaaaaacaccaggggcaatatatagatggactctctccacaccggccgggactccatctcatctcatccttccccaaccattctcttctccttgaacacacccctctcttcctcattataatctcttctttgattagagaggaattagcaaacatgcacatatacaaagagcaggaggctgaaccatccactggcctgatgatgccagagccagcacctgttgcttcccccggctccggtggctcaggtggctcaggctcggtgggagctgagaagattgggagcaggggaaagattgagatcaagcgcatcgagaacacgacgaaccgtcaagtgaccttctgcaagcgccgcagcgggctactcaagaaggcgtatgagctctccgtgctctgcgatgccgaggtcgccctcgtcgtcttctccagccgtggccgcctctacgagtactccaacaacagcgtgaaggaaactattgagaggtacaagaaagccaacagtgacacctccaacgccagtacagttgcagagatcaatgcccagcactaccagcaggaagctgctaagctgaagcaacagatcaccaacctgcagaactccaacaggaccctagtaggtgataatatcaccaccatgaaccacagagaacttaagcagctggaaggcagactggacaaaggcctaggaaagattagagcacggaagaacgaattgctgtgtgctgaaattgagtatatgcagagaagggaaacggagctgcagaatgacaacatgtacttaaagagcaaagttgctgagagtgaaagaggactgcaaacagtgaacatgatgggttcagcatctacgagcgagtacgtgcaaaatatgatccattatgatccaagaaacttcctgcaattcaacatcatgcagcagctagctagcctcagtattatcctgaacaggaggaccgaaaggcctttatgtcagatgaaagataaatatggatccgtatcatgcaactatctcaatcatgcatgtgccttcttcaaggagactgatcagttagatattacactgtgtcagtagaacttttatgtgtgaactcttgtatgcatgaataattaactttatcccataattcaggcttggcactatcaaggtgatgtacctaagtattggttcaacctgtgaaattaaaatacttcatacccttcctatgtttataanaaaaaaaaaaaaaaaaaaaaaaaaaaaaaaaaaaaacaagaacaacaaaaacaaaaaaaaaaaaaaaaaaaaaaaaaaaaattttggggccccccaggccccattttttgtccctttaaggggggtaaattgggcccttgggaaaattctgggaataagctgttcccgggggaaaatggttaccccccaacattccaccaaaaaatccaacccgaaaaaaaaaggggtaaacccgggggcccctagggaagggccaaccccccttaatt

SEQ ID NO: 53366 - DNA, 1884 bp, Oryza sativa
  Clone ID: PAT_MRT4530_55574C.1
ctcactctcgcgctcgctcctccaccgccaggtcgagctcaaacgagagagatcttttccgaatccgaggaggagaagccacagaaacgatgacctcgctgtcgtcctccgccgccgcggcgcgcgccaccttcgtcatgccgtcgtcggttcgtgggggcatgagccgcggcaggaggatggcgaggctggtgacgcgcgcggcggcgtcgagcccgaagctcccgagcgggcggcggctgcgggtggcggtggtcggaggcggacccgcgggcggcgcggcggcggaggcgctggccaagggcggcgtggagacggtgctcatcgaacggaagctggacaactgcaagccctgcggcggggccatcccgctgtgcatggtgtcggagttcgacctgccgctggacctcgtcgacaggaaggtgaggaagatgaagatgatttcgccgtccaacgtcgccgtcgacatcggcggcacgctcgcgccgcacgagtacatcggcatggtccgccgcgaggtgctcgacgcctacctccgctcccgcgccgagggggccggcgccgaggtcgtcaatggtctcttcctgaggtatgaggcgcccaaggaacccaacgggtcgtacgtggtgcactacaaccactacgacagctccaacggcaaggccggcggcgagaagcggacgttcgaggtggacgcgatcgtgggcgcggacggcgccaactcccgcgtcgccaaggacatgggcgccggcgactacgagtacgccatcgcgttccaggagcgcgtcaagatccccgacgacaagatgaagtactacgaggagcgcgccgagatgtacgtcggcgacgacgtctcgccggacttctacggctgggtgttccccaagtgcgaccacgtcgccgtcggcaccggcaccgtcacccacaagcccgacatcaagaagttccaggccgccacccgccttcgcgccaaggaccggatcgagggcggcaagatcatccgcgtcgaggctcaccccatccccgagcacccgaggcctaagagggtggcggggagggtgacgctggtgggggacgcggcggggtacgtgacaaagtgctccggcgaggggatctacttcgcggcgaagagcgggcggatgtgcgcggaggcgatcgtggccgggtcggcgaacgggacgcggatggtggaggagagcgacctgcgcaggtacctggccgagttcgaccgcctctactggccgacgtacaaggtgctcgacgtgctccagaaggtgttctaccgctccaacgccgcccgcgaggcgttcgtcgagatgtgcgccgacgactacgtccagaggatgaccttcgacagctacctctacaagcgcgtcgtgccgggcaacccgctcgacgacatcaagctcgccgtcaacaccatcggcagcctcgtccgcgccaccgccctccgccgcgagatggagaaggtcaccttgtgagcctgagctgccatgaccacgaccgcgatcgaacactttgcttcattttcttgaggcattagaaactgcaatttgcggtggatcagtgtgcatgtatagtacagattcgcggctgatcaaacagatttgaacaagcgtaagtagagatggataagagagagaggctgtgtaccgatcgaccctgtccgattttcttgtacaacacaaggtgatgttcagacttgggggcagtttggttggattactgaagcacaccaatcttcggtgtgaactcaatgtactactatataagctccatgtttctgcatggttcatgtttcctgacgaatggtgaatgacatgaaatggtttactttaaaaaaaaaaaaaaaaaaaagaaaaaaaaaaagggggggcctcgtgc

SEQ ID NO: 53367 - DNA, 300 bp, Oryza sativa
  Clone ID: PAT_MRT4530_55575C.1
atggttgcaattgatgatgaatttggtagcttcgtggtcaccgtcgtgtcgtcgtcggccagtgtctgtggtcgtcccgggcgtttggttttctcatggcagccgttgcgttgccacttctactcccatgatgaagatgttgagcacctcttcctacgctgccccaagccggtgacggtgaagttaggcaccggtgatgaggagcgtagaaatgtccatggcctcgtcgccacgaacggcatggcaccgagcgttttcgtcgccgccgtttttgggatctcggtcgtcggtgcggcctga

SEQ ID NO: 53368 - DNA, 2172 bp, Oryza sativa
  unsure (1)..(2172): unsure at all n locations
  Clone ID: PAT_MRT4530_55576C.1
atgaagaagcagggaggaggaggaggagtagcggcggcggcggtggcggcggcggggatggtgaaggcggagctggaggacgtggggatcaaggcggcgggaggggcggtggcggcgctgagcccgctgagcgagacgctgtggcgggagaaggcggcggcggagttcctcggcgacgtgtcggcgcgcctggcgtggcgcgacctcaccgtcaccgtcgtgctcggcggcggcggcggcggcggcggaggagggacnacgcaggacgtgctccaggggctcacggggcacgccgagccgggcaccatcacggcgctcatgggcccctccggctccggcaagtccaccctgctcgacgccctcgccggccgcctcgccgccaacgccttcctcgacggcaccgtcctcctcaacggccgcaaggccaacctctccttcggcgccgcggcctatgtgacccaagatgacaacttgatcggcacattgacggtgagggagaccatctcatactcggcgcggcttcgccttcccgacaagatgcccatggaagagaagcgcgcccttgtcgagggcacaatcgtcgagatggggctgcaggactgcgccgacacggtggtcggcaattggcacctgaggggaatcagtggtggtgagaagaggagggtcagcattgcccttgagatactgatgaggcccaggctgctcttcctggatgaaccaaccagtggccttgacagtgcttcagcgttcttcgtgacacagacactgcgtgggctagcgagggatggcaggacagtgatagcatcgatccatcagccgagcagcgaggttttcgagcttttcgaccgcttgtatctcctttcaggaggcaaaactgtttactttgggctggcctctgaagcttgtcagttctttgcccaagccggcttcccttgcccaccgctgcgcaatccatcggatcatttcctcagatgcataaacgcagacttcgacaaggtgaaggccactctgaaaggatcaatgaagagaagatttgaaagatccgatgacccacttgatcggattatgacttcggaggccatcagaaggctgatcacctactacaagaactcacagtactactttgctgcgcagcagaaagtcaatgagatggcacgggttaaagggacagtgctggatgcaggagggagccaggctagcttttggatgcaggctttcacactcacgaagcgatcgttcatcaacatgtcgcgggacttcgggtactactggctgaggcttatcatctacattgttgtgacagtctgcatcgggacaatctacctcaatgttggcaccagatacagctcaattctggcaagaggtgcatgtgcttctttcgtcttcggctttgtcacgttcatgtcgattggaggattcccgtcttttgtggaagacatgaaggtgtttcagagagagaggctcaatgggcactatggcgtgctggcattcgtgataagcaacacgatctcggcaatgccattcttgatcttgatcaccttcatctccgggacaatgtgctacttcatggtgcgcctccacccgggcttcacgcactacctcttcttcgtcctctgcctctacgcaagcgtcaccgtcgtcgagagcttgatgatggccattgccagtgtcatccccaacttcctcatgggcatcatcatcggtgcaggaattcaggggatattcatgctggtttcaggatacttcaggcttccccatgacatcccaaagccattctggaggtatcccatgtcatacatcagcttccactactgggcattgcagggtcagtaccagaacgacctgaagggcctggtgttcgacaaccaggacgacgagctccccaagatccccggcgagtacatcctggagaacgtgttccagatcgacgtgagccgatccaagtggctggacctcgccgtgctcttcagcatgatcttcatctaccgcctcctcttcttcgccatgatcaaggtcagcgaggacgtcaccccgtgggtgcgcggctacgtcgcgcggcgccgggtgcagggcaagggcgcccgcggccgccgggcggacctctccgccgcgcgctcgccgtcgctccgcgcctacgtcgtcgacgccgccgacgacctgccgccggcctga

SEQ ID NO: 53369 - DNA, 1802 bp, Oryza sativa
  Clone ID: PAT_MRT4530_55577C.1
atggggggcgagccgcgcgcgcgcgcggaggcggcctgggcggctgcgttgcctgccgcgttggttgcgctggtgcgcgacacggctacatacacacgaatgatgcaccgtctccgaatggaaacgccacggggccccacctgccagcttgacccctgctgctgctgctgcactgcacatgttattccccctccgcctccggtgtcacgcacgcacgcgacgcgacgcgatgccgaggcgtccgtaccaccaccgccagcatcagcggccgtcagctcgagatcggacggcacgggacagatggcagcaggcgtcacgctggcgtgtgccgcccccccgccgctaagggccccacgtgccagcgatggaggcaggcgccgtggggtggtcaaagggggcgcggggacggacacgtgtcggtcgccgcaacgtctgaatgttcgaccgcgcgagagagagagggtgcgtgcgtgcgtgcgtgctagagccaagaaccacgagcacggccagcgtcggcgagaggcggcggtggatccggctatgtcgggcgagtaccagttccaggacgagctggcgccgctgttcgcgcggccggggggcggcgcgggggagatgcagatgctgccgtcgtcgtggttcgccgactacctgcaggcggggacgccgatgcagatggactacgacctgatgtgccgcgcgctggagctgccggtcggggaggacgtcaagagggaggtcggggtggtggacgtcgtcgcggccggcggcggcggggcgccgccgctgacgccgaacacgacgtcgtcgatgtcgacgtcgtcgagcgagggggttggtggaggaggtggaggcggcgccggcgccggcgccggggaggaggagtcgccggcaaggtgcaagaaggaggaggatgagaacaaagaggaaggcaagggagaagaagatgaaggacacaagaacaagaaagggtcggcggcgaagggagggaaggcggggaagggggagaagcgggcgaggcagccgcggttcgcgttcatgaccaagagcgaggtcgaccacctcgaggacggctaccggtggcgcaagtacggccagaaggccgtcaagaacagcccataccccaggagctactacaggtgcacgacgcagaagtgcccggtgaagaagcgggtggagcggtcgtaccaggacccggcggtggtgatcaccacgtacgagggcaagcacacgcaccccatcccggccacgctccgcggcagcacgcacctgctcgccgcgcacgcgcaggcggccgcggcggcggcggccgcgcaccagctgcaccaccaccacggccaccacggacaccacggcatggcgccgccgttgccgctgggctccggcgccgccgcgcagttcggccggtcgtccggcatcgacgtgctgagcagcttcctgccgcgcgccgccgccgcccaccacggcatgactacgatgggcggcgccgcggcgacgacgacgacgagccatggccttaacagtgcaatcagcggcggaggcggcgtctcgagcgagacgacgagcgcggtcaccgtcgccgcctcggctcagccgtcgtcaccggcggcgctccagatgcagcacttcatggcgcaagacttgggcctcctgcaggacatgctgctgccgtccttcatccacggcaccaaccagccttgacgcgacgaccaccatcaatctgaagctgaattaatcatcagactagctagacaagaggtcatttggctctcgatcgatcatgctgtttaattaattaacatctc

SEQ ID NO: 53370 - DNA, 501 bp, Oryza sativa
  Clone ID: PAT_MRT4530_55578C.1
cccacgcgtccgaacaatttcagatattcagattatcagtttcttgtgtttttttactcaatttctttactgctgttttttgttcttcacgaagtgcactcacatgactcaatttcttgttgagttaacacatgactgttcttaattgagaagtgtactcaaatattgcctattttgcttatagcagtcactctgcgatatggcccacatgtacctactttagcaactacctgatgttgcaccattgctcatgtaaagtccctttctgcagtaagctgacaaagacaacataatgttcatttcagccatatgcataaagattggactaattgttgccaacaatgtttgcaaaaaaaaattggggataattctatggcttactttcgactactttttatgaaacataacatgtttgccagcggtatactaaagttttggcagccccactgaacccaagaaacaaaaaggatagacaaatgggtactttctttctcatatgct

SEQ ID NO: 53371 - DNA, 414 bp, Oryza sativa
  Clone ID: PAT_MRT4530_55579C.1
gacgttccaaaagactagcaggacacgggaccaaagcaacgagataggttcgatcaaatcgcccccagcctaaaacaagcttgagcttctcaagctagagcgggggaggaaaatcacactcatgttcaagagagcagaacagctattaactcaattacgggggctgcatgcaactatgctgcttagcgacgaatctgagtctgtctaggggacctccacgcctcaggatctgaagatctcggcagtgagctccctgctgacggagccgacgtatcggtccacaatgttcgcactccctgatgaacaggaaggtggacacctccaccacgtccatgtttcggaggaactacatgcaactgacgatctggtctgcgtgcatgcctgcgacgacggtggtatccgccatggagcgcg

SEQ ID NO: 53372 - DNA, 324 bp, Oryza sativa
  Clone ID: PAT_MRT4530_5557C.1
tcaatcacacacattcaagaatccttgggatgaagacaccatattttatttgggaagaatgaatttatcattctaccaaaagtgtttagtcgtactttttttgttagagataataaatcctgtgttggaaaactagatcctcgaactgtaaagtgcacttacaggcaattcatctggccatttgttcagaatgatgaacatttgtcagtatggatgttgcttttagggaatccgtcccatttcatgtagagatgacaaaattgagttgtttatttattaatcttaatgaatcaactagtgatgatcatgatcaccaacatgtgt

SEQ ID NO: 53373 - DNA, 309 bp, Oryza sativa
  Clone ID: PAT_MRT4530_55580C.1
atggcgagatgcaaatcctcctgcgacaacagatcacacagcagaatagaccgctggtgtccggtggatttgcagaatactgaagcagaaagctgccctcagatgaagtacaagggatcatcaacgtggcagtggcaatgcctgttatctggccacctcgcctttgtcgccgccgtctaccataagaggatcgtcgtcaccttcccttctccaataccgtccgtcgaccgccttttcttctccggtgccggtggtttcgcggctgacccacttacagccctagccctcctagctccggtgaggtggtag

SEQ ID NO: 53374 - DNA, 1020 bp, Oryza sativa
  Clone ID: PAT_MRT4530_55581C.1
atggaggagatagagtgcgccaccggctcggattcaccgaagggagaccggcgacgacgaattgcggcggcgctcgccggcggcgagaaaaggggcaaacggcggaggggcgacgaggattcaattcgaggcggtggaagcatctccggggttcaaggagtccgtttccggcgtcggatggggcggaagagcaccgaggagggccggcgacgagcagcggcctccaagagcgggcggcaacggcggcgaggccataccgggcggcggcgggcggagaagaggcggtttgggagggggaaccgacatagggcggtcaaggcggcaactggctctggtgctagggcgcggctggtggccacgggcggcagaaggagacagcggcagaggccgggaaaaggaaaaaagggtgaggaaaaggggactctgctccttgcccaaaactggatgagggacaaagggagagagagtgggggcaaggagggagaggagctctgcctccattgtttggaaggacgcggcttggagcagcggacagggggtgacgccggtggtgaccacggaggtctctgcctcccggttttggatgctagcggcgtgcagcggcagagcggcagcgtgcgatgcagctggagccagggcagtcggccaccgcgcaggagcgcgcgcgcggagcgcgggcgcgggttcaaattgcggcagcgggagttttggcgccgagcggagcgttacaggccgcaagctcaccgccacctagcttctatctccgatccgtgctgtaaacttgccaccgagcttcacacgtcaccaaggaaaggggtagcaggtctggcgagctcgatggggcagtgggtgatatatggagatggcaacggtggttgtgaatcgagcgaaggagggagcgataacaacgatggattggctaggagtggtagactagttgtcagcagcgccgattccatggggaagaagagaggaggatgtggaatagaaagcgaagaaatgatgggtggatccacgtag

SEQ ID NO: 53375 - DNA, 486 bp, Oryza sativa
  Clone ID: PAT_MRT4530_55582C.1
atggcatgggattacttggcatcagagccatacgacttcaggaccatccaagcaaaactgagccctgttcaaaattttgtcctcagagaaggaggcggcggcctagggactcgaggaacactaagtactactggcgatggagatcttgatggtcttcgtgatattggaacaactattggccgcagcattgcatatggcaatactgagggagaggatctggagattcattttgggaacatactgaagtggaaggtggtgaagacacactatttgcattatatgtacaaggaatcccaacaggaggccaatcaaaacttaagggcactgaaagagaggatagcacttgattgcatccagcttcaactggcggatttctcatctgatggttgggtggaaggaaaggctgttcaaattgagctggccatcttcaacaacgagctgactctgggagaatgcaagtcacccaacccaacagtttgctcctaa

SEQ ID NO: 53376 - DNA, 441 bp, Oryza sativa
  Clone ID: PAT_MRT4530_55583C.1
atggcgctccggaacctcctaaacttagaaaaaccactgccgccaagcctccccaccgccggatccggcactgtcaagactccccaccaccggatccaccaccgccaaggctccctaccgctggatccgccgccgccaagcctccccaccgtcgccgccgcaattcccgcccaccatcgccagatccgcctcccctaccaccgccgctgccgaatctgcccctctcgaggccagtctgctgcggatctgcgagggaggcgtagaggcccctccaccgtcgccatggttgacctcatccgtcgccaccatcgcaccactagccaccaccgccgccaagagagagaggagaggagtgggagatcgaaggagatgagtagggcagagaagtggaggagaggagaggagcggggctgtgggggacccgacaggtattttttttaa

SEQ ID NO: 53377 - DNA, 456 bp, Oryza sativa
  Clone ID: PAT_MRT4530_55584C.1
aaaaaaagcccccgaacttccagttaattaaataattacgcattggccccagctgctatccatcgggaaccggacaatctcgctttagtatcatccatagcaaaacaagggggcggaggaagaaagggacaatcacctttcagtcgggccggccattctattacaggcgatctactacccagcaaagcaaccctacccatatgcatcacaggtgaccagatcctcaaatcactcctccctacccaaacccaggcatacccagctcaccaaattaaaaatcataatccgctttttccaacctccacagggggttcttgcgtcagtcttaatacaggagaactctacatcggtatgcttcatctctcggtttccggcttctcaaaaatggtccgatggggctcactcattggagcaccagcaccatcactcccttttgatatagcaccgtcattactt

SEQ ID NO: 53378 - DNA, 183 bp, Oryza sativa
  Clone ID: PAT_MRT4530_55585C.1
atggatgtacggaagatctatgcaagagaacggagcttcgagaggggtggaatgaaagttgctcttgtcgatggtatttctgggattagtgtactcgccgatggtgtcaggttgaaggttgtgaaggtgtctgcagtgtcactgctcgcactcttcaaggagaagaagaagcagaggtcttag

SEQ ID NO: 53379 - DNA, 411 bp, Oryza sativa
  Clone ID: PAT_MRT4530_55586C.1
atgaatgtcttgtctcaacgtacttaaatgttagcacatatccaattgtgggtgtgaaccaaccaataaaaggctactaacagaggatcgctcactactgcgaagaacacaagaaaactgcagtttctccgaccatattctccctacagcattggtgggcagacattcaaagggacacttcaaggttctgtggattctttgcccaagttgaaaggcgcacacacagtggtgtgaacgaatctgacaaggttggtttatggcttggttactctatacaactggcagtgcattcaatttcatgcattgctggttgatgcttaaggacgaaatgaagtggacaactcaattggtcgggcgtcagctttttgtgagtcccacaaggcaacaagtgaggaagccctgcactgagaa

SEQ ID NO: 53380 - DNA, 3219 bp, Oryza sativa
  Clone ID: PAT_MRT4530_55587C.1
cccaagcgtcggccgggagcgagctgggcgtcagcgccgtcgttcgtccctgctgcttccgccgtcgcatgcccacctcatgctcccgcagccccgcctccgcggatccccatccatccctccccccagggaccgaccgcccgagcaggggccccgtcgttcgtccgcctggttcctcccggcatccatcggtccatccctcccacgcgtctcccggtcggcgccggcgactattctgcggccgttgttagtgagcgctgtgattgaacgcctccgcccatttttgggggatcatgagtggtgcacccaagaggtcgcatgaggagggtagtcactccacaccggcaaaacggccgttggatgacagcagcttgtactcaagcccttctgggaaaattattcaaccaggcagcagtgatttccatggttcgtttgaacatgatgggagatttgccaaagttcaacgtattgagccccgggatgataagaggccctctctggcacataggatgcctattggcccctccaactttgtggaccactcaatctcatctgatggcagattagaatcaaagcaaaataaagatccatgggacactaaggtagatgttcgggaggcaaaggctgacactcgagatgtctacagtgatcccagggttgaatttccgagcaataaagttgagactgatgtaaagacggacaatagagcagatgacaatgacataagagccgacagacggatacatgctgactacaaaggtgatgccaaactggacaaagatggtcatcctacagcaatttcaaacatagcctggaaagataacaaagaacataggggtaaaaggaatattgagcagccatctgataatgcagattggcgttttccccgccctggtttgcaaggaacagatgaatcttccaaaggtccagttcctgcagatgagcggtccaaggatgctcatgaatctactggtgagaataaaactgaacctaaaactgaagataagtttagagataaggacaggaaaaagaaggatgaaaagcatagggacttcggcacaagagacaatgatagaaatgatcgccgaattggtattcagcttggaggcaatagtgttgaacgaagagagaatcagagggaagatagggatgctgaaaagtgggatagggaaagaaaagattcccagaaggacaaggaaggcaatgatagagagaaggattctgcaaaggagtcatcagtagcaactgaaaaggagaatgcaatactggaaaaaactgcatctgatggagctgttaaaagtgccgagcatgagaataaaacagtagagcagaagacacttaaagatgatgcatggaaatcacatgatagggatcccaaggacaagaaaagagagaaggatatggatgcaggagaaaggcacgaccaaaggagtaaatataatgacaaggaatcagatgatacttgccctgaaggagatatagagaaggataaggaagcccttggaagtgtccaacgcaagagaatggcgcgatcaaggggtggtagtcaagcatcccaacgagaacctcgatttaggtctaggatgcgtgatggtgaaggatctcaaggtaaatctgaggcatcagccattgtctataaagctggtgagtgcatgcaagagcttctgaaatcatggaaagagtttgaagcaaccccagaagctaaaagtgctgaaagtgtgcaaaatggccccactcttgagatccgcatacccgcagagtttgttacgtccactaaccgtcaagtaaaaggtgctcaactttggggaacggatatttatacaaatgattcagatcttgtcgctgtgcttatgcatactggttactgctcccctacatcatcacctccaccatctgcaatccaagagctacgagcaactgttcgagttctaccgccacaagacagctatacttcaactttaaggaacaatgtccgctcacgtgcttggggtgctggtattggttgtagctttcgcatagaacgctgctgcattgttaagaaaggtggtggtactattgatcttgagcctcgcctaagccatacatcagctgtggagcctacacttgctccgaatgcgttacgtcaacaaagatttgttcgggaagtcacaatacagtacaatctctgcaacgagccatggttgaaatacagcataagcattgtggcagacaagggattgaaaaagtcattatatacttctgcgaggctgaaaaaaggcgaagtcatatacttggaaacacattataataggtatgagctgttaccgttaactatttggccatcacctgaagttatatttttgacttctgtggagcacagttccttcatttccccccctcctgttactgcaagttttcacaggtatgagctgtgcttcagtggagaaaaggctcgtcttgttggatcaagctccaatgcggcagacgcagaaactgagaaacaccagaatagtagccaccatcactcgcaaaatggggacagggcctcttcagaacatgaactgcgggatttgttccgatggtcccgctgtaagaaggcgatgcctgagagctctatgcgctccatcggtatcccgctgccagctgatcaacttgaggtgctgcaggataatttggaatgggaggatgtgcagtggtcgcagactggtgtttgggttgctggaaaggaatatcctctcgcccgagtgcatttcctatcatcaaactagcccctgcaagtccttcaagttgtcgtagcagccggttcatgaactaatttctcgcaacaatttaaggcaggagcttctctttggtccatgtcgcggttttattgtacaatgtacaatgcatccatgccatgtctgtgtataaatcaagaatgctcagctgctgtaggctgtgttgtgtgtagtattttttcccccttttttcataaactatttgagttctagttgggctgcttctgccccatgtcactgagatgtagctgttgcttcacaatttagctaacctgatgattattgttgaatggttgatgtgctgtaacttaattcagtgctgtgttcatctggggtgtttcctgaccgggcaggttcagacgtaggctatttgactcaccttctgggaattacatgtgatcagcccccaccaatttagccgaaaaaaaaaaaaaaaaaaagggggggagcctcagcccggggg

SEQ ID NO: 53381 - DNA, 338 bp, Oryza sativa
  unsure (1)..(338): unsure at all n locations
  Clone ID: PAT_MRT4530_55588C.1
ctccacattcaggcgagtcttcagtgacaacctcaaaaataagaaaaaaaatcattggtgaaaatcagtacgtttgtcaattgcagttgcattttcatgtggaacattatctaaaattagattgtctggtctggtcaatttcattgtgctgtattgttgttctttagagattcctaagttttcaataccttgacctttatctgcatatttttattagtacaaacatgctgctctcctgtgctttctttaaaagaatagagactcctaaattnttcacctctacttttgcttggatattatctaaagaatgctgntgtatatgtttggataatcggatc

SEQ ID NO: 53382 - DNA, 1562 bp, Oryza sativa
  Clone ID: PAT_MRT4530_55589C.1
tgttctagttctaccaatcccgtagcggaaaatgagttgcttacgagtgagttttcagaagaagaggtgaaaaatgctatatttcaaatggaacataataaagctccagggcctgatggttttccggcggagttttatcaaatgttctgggaggtaattaaggatgacctaatggcagtctttagagactttcataggggcaatctttctctcaataatttgaattttggtattattactcttctacccaagaataaggaggcaaggcagattcaacaatatagaccgatatgcttacttaatgtaagtttcaaggtctttactaagattatgacaaataggattgctctagtagcacaaaaagtcataagaccttcacagactgcctttctaaaaggaagaaatatcatggaaggggccattatccttcatgaaacgttacatgagatgcataggaagaagttagatggggtcattctcaagctagatttcgaaaaaacatatgataaggtagactggaaatttcttcagcagaccatgaggatgaaaggcttttcggaacgttggtgcaaatggatagagcagatagtgacaggaggaagtgtagctgtaaaagtcaacgatgaaatcgggaatttttttcaaacaaaaaaagggttgcgacaaggggatcccttatcaccaattttatttaatttggtggcggatatgttggcaattctaatcaataggtcgactgaaagaggaatgacacgaggtgtaataccgaatttggtagataacgggctgtcaattttgcaatatgcagatgataccattatctttatggaaaatgatgtagaagaagccaaaaatcttaaaatggtactaagtgcctatgagaagctttcaggcttaaaaatcaattttcataagagtgagatgttctgttacggaaaagctaaggaagtagaaaatgcattttcttttctatttggctgcaagatagagtgtggaggtttagggattcagaacttagagattcaaaataagtgcatgcttagtaaatggatctttaagttaatcaatgaagagggaatttggcaaaatttgcttagaaaaaaatatttggcaaaaaaaaccattctacaggttcaaaagcaacaaggagattctaatttctgggctagtctcatgacggcaaaagaatcattccaattacttggacactttaaggtgagaaatgggaaacaagttagattttgggaggattgttggatgggaaacaaatctcttgagaaagaatttcctaatttgtacaacctggttcagaataagaatacagtagttgctaaggttttggaaacgatactgttgaatatgtcctttagaagagcgatagttgggaaaaacttggaagattggtatgtcattgtctcgaaagtggctaatgttaacctgacaagtcatcttgaccaattcatatggaaaactaataaacaagggttgtttaccgtaaactctatgtataagttacttatgtttgatggagtaatacctaggaaccgacgcgggttgcgggc

SEQ ID NO: 53383 - DNA, 540 bp, Oryza sativa
  Clone ID: PAT_MRT4530_5558C.1
gcacgaggcaccgaaggattcaagagaacaaaagaaggtactgaaagactcgaagatactgaaaagcgcaagaaagactcagaagagcagggttactaaaggattcagatgaacttaaacaaaagagcaacaagagtgtggcatttgagccggagaaggaattgaagtgtgactgccatccaacctctgcttatcagagcacatatccgaaacacaactcatggggcctctttgctgcctcatgatctttgaggatgaatagttactgcagctagaggtctctagacatcacggtgtagagagcctctttgattaggtagcagtctcgaggagccatttcatcaagaaagcaaggaaaatggaactcgcctccttgtcctaagtttatcctatgtcaattgttctgacatgtcatcatgtaacatatttctgcaatatacaccagtagatgagtaatgtagaaatctgccatgtttagttggtgatgaaatgatgatgcttttttccccctgaagctgtaaaccttgtctagttggtaga

SEQ ID NO: 53384 - DNA, 2616 bp, Oryza sativa
  Clone ID: PAT_MRT4530_55590C.1
atgggctctcttttgggggcaacgcagctagttgatacgaaaaccactaggaaaaatgagtttgggaggttttttgtagcggttctcaatccaaagttgatcccaaaaatgattgacgtggtgattggtgaccattattttgaattgaagtttgaggtggaaaagaaaggggttgatgagaatggggaggaggtggagtttaatttggaagattgggatggagatgaggaggatggtaattcagagggagaggaatacaaagaaaataatgaagggaaggagagggagtctaaaagaacaaagaatgatgatatggctattgatgacaataaagaaaactcggaaaggaaggaaaatgaggtgcaggaaggtggggatcaagggagagaagatgttattttggagatggctgaaaatgtgttggatgtggctgttgagagagtgctaggggaggagtatgagagggtggagagggaagaagagaagatagatggagcagtcatgcagcaggaaaaggttgaacaactagctaacatagaagaggtgttggtgacaccgaaaagagcgagtgagaggttgatgggcagcagcgggaggcactcacttgaaaaggagaaatcaaggaaggtttggatgaatctcgatcttctttcaggagattctagcaacttagtttcagattcagttttaattttaaaagagacggaatttcttagatcggaagaattaggtgacaaagtttctccttctattgaaaaactaaatgattcttgtaatgatgaggaggaggaatatgtagacagtgatctgcttaaccatttatgtggtgatacaatggatgaggtgatggatgatgaggattttcacctaagttgtgaaattgatgatatcctaatcaaatcatacccaaagaaaagcaggaaaggtgagcaaaagctagactttattgccctattagaaacgagtaaaaataagtatactgactcgtggcttaaaagtatttatggaggaagagagtttctctggcattggacgagacctaaggggagaagtgagggaattttacttggtgttaacctagaatacttcaaagtgtcaagcatagacgaaggagatttttatgttaaatttcatgtacgaaataaggaggatgctttccaatggatattggtagcagtttatggggcaacacaggaggagtacaaagaggcctttctcactgaactagttaattcatgtagaaaggaggcattacctatggtaattggtggagactttaatattataaggaaaccacaggagaaaaacaatgcaaatttcaatgttaagtggtccttcttatttaatgctgtcataaatagtttaaatttgagagagatcatactctctgggcgcaaatttacctgggcaaatgccatgccaaacccaacatatgaaaaattagatcgagttttgtttcttagaggatgggcgaagaatacaagtggggcttataagaaagagaaagtgaaattaatggcaaaggcagatgagctagacaaactagctgaaactagacttttgactagtcaagagctcgagttaaaaaattcagtaaaacatgccttggctaagatgttgagagaagaagagatcaaatggtatcaaagagcaaaaacaaggcaaattgtaggagatagaaatactaaatattaccaaatgattgcaaatggaaagcataggaaaactaagattttccagctagaccaagaagagggaataattaaaggtaatgagcaactcaagaagtacatctctaactattataagaatctttttggagctcctgaaaagaataatttctctatgtgtgagaaccaaaaagatgatatacctcaaatatccgtagcggaaaatgagttgcttacgagtgagttttcagaagaagaggtgaaaaatgctatctttcaaatggagcataataaagccccagggcctgatggttttccggcggagttttatcaagtgttctgggaggtaattaaggatgacctaatggcagtctttagagactttcataggggcaatctttctctcaataatttgaattttggtattattactcttctacccaagaataaggaggcaaggcagattcaacaatacagaccgatatgcttacttaatgtaagtttcaaggtctttactaaggttatgacaaataggattgctctagtagcacaaaaagtcataagaccttcacagactgcctttctaaaaggaagaaatatcatggaaggggccattatcctttatgaaacgttacatgagatgcataggaagaagttagatggggtcattctcaagctagatttcgaaaaagcatatgataaggttcaaatgcagcaaggagattctcatttctgggctagtctcatgacagcaaaagaatcattccaattacttggacactttaaggtaatattcaaggcaactcattgggcaaggctttggtctttgcttcttaaaaaagttgaaggagaaaaagctcaagtcaagtgcagaattttggagaagcgagttatggagttcttctctacctttggatggaattttcgaagaagaattgaagtttag

SEQ ID NO: 53385 - DNA, 305 bp, Oryza sativa
  Clone ID: PAT_MRT4530_55591C.1
gataaaccagagggtgtgattgagaagattgtccccaacaagcgccaatgtgttactgtggtgaagggtctggaattaattggtgtccagctgagtgatgcttcaaagaagctggggaaaaagtttggtccaggagcatctgttgttaagggccccactgagaaggagcaaattgatgtgcaaggggatatatcgtctaaagttgagtcccaaggcccaagggcaaggaggaagtcttatggaccaccagagcttgatatacttttctataacacaaatttggaaaattgtgacctggaagtgtg

SEQ ID NO: 53386 - DNA, 1200 bp, Oryza sativa
  Clone ID: PAT_MRT4530_55592C.1
tggaaaatggtactaagtgcctatgagaagctttcaggcttaaaaatcaattttcataagagtgagatgttctgttacggaaaagctaaggaagtagaaaatgcattttcttttctatttggctgcaagatagggtcctaccctttcagatatctaggccttccaatgcattataaaaggctggcaaacaaagactggaaggagttagaggatagattcgaaaaaaagcttagtagctggaaaggaaagtttctgtcaacacgagggaggttactccttatcaattcagtgctaagcagtctagcaatgtatatgctttcattctttgagatacctaaaggtatcttaaaaaaactggactattatagatccagatttttttggcaatgtgatgaacataaaaagaagtataggctggccaaatggagtgtactttgcaaacccaaggagtgtggaggtttagggattcaggacttagagattcaaaataagtgcatgcttagtaaatggatctttaagttaatcaatgaagaggaaatttggcaaaattttcttagaaaaaaatatttggcaaaaaaaaaaccattctacaggttcaaaagcaataaggagattctcatttctgggctagtctcatgacggcaaaagaatcattccaattacttggacactttaaggtgagaaatgggaaacaagttagattttgggaggattgttggatgggaaacaaatctcttgagaaagaatttcctaatttgtacaacctggttcaaaataagaatacagtagttgctaaggttttggaaacgataccgttgaatgtgtcctttagaagagcgatagttgggaaaaacttgaaagattggtatgtcattgtctcgaaagtggctaatgttaacctgacaagtcatcttgaccaattcatatggaaaactaataaacaagggttgtttaccgtaaactctatgtacaagttacttatgtttgatgatgtaatacctaggaaatctttaatttggaagctaagaattccattaaagattaagattttcctatagtatttgaataaaggggtgattctaacaaaggataatctagctaagagaagatggaagggcagcttattgtgtagcttttgtaactctaaagagtcgatacaacaccttttctttgattgtataatggctagatacatatgga

SEQ ID NO: 53387 - DNA, 619 bp, Oryza sativa
  unsure (1)..(619): unsure at all n locations
  Clone ID: PAT_MRT4530_55593C.1
ataataataataataataataataataataataataataataataataataatagatagatagatagatagatagatagatagatagatagatagatagatagatagattatnagatganggtccaacgtttaaacaaataaacttattttgtgggtttcggtgtttctccntcnacagggnggnagaacgtngcaaccatctcctccancgccttccacnannanccgccctcngngancgcttctcgcgccttggaanccagcgcgggngaaattcctnnggcttcctcngccggccggccgncgncntttcccctccccgggcnntcattnanttaggtcncccccccnngcngcgngnattaaccttncctncccaaaaanccctgtnccccccccgtttncnatttccntttgggggcngggacccttnaacccnaaaaccnctntntttcaaaaaaaaaaaatccttttttaanggggnnctcngggccccntnggcccccccccnctgggnncccncgggggggaaaccccccnccccnaaattcccccncttgggttnannaaaccccccccccccccntttggngnnttcccttggnncccccccccccn

SEQ ID NO: 53388 - DNA, 942 bp, Oryza sativa
  unsure (1)..(942): unsure at all n locations
  Clone ID: PAT_MRT4530_55594C.1
cggacgtgtcagnnacgcgtggtgccaccgctcgcgggaattgtcaagctagctagccttctcatcagcctggctctcagtctcaaagaaagcacaaaggtagctagcttagcatcgattgaagctgaccagagagatagttaagaatttgccatagcttagtgtttggtgcatacacacaactgctctcgttgtttttgctcttttgggttcgctcggaagatgagccgtgaggaggatgagaagctgctgttcccttcgttcgccttcccggcggagtgcttcccggaagccgccacctccggtggcgagcagaagaaggctcggcagcggcggaggaggaaggtgaagccggaagcggcggcagcgttggctggagagagcggaggggatgagcaggcgaagaagcggcggctgagcgacgagcaggcgcggtttctggagatgagcttcaagaaggagcggaagctggagacgccgcgcaaggtgcagctcgccgcggagctgggcctcgacgccaagcaggtcgccgtctggttccagaaccgccgcgcccgccacaagagcaagctcatggaggaggagttcgccaagctccgctccgcccacgacgccgtcgtcctccagaactgccacctcgagaccgagttgctgaagctgaaggagaggctggcggatgtagaggaggagaaggcgaagctagcagctgtcgccgcggcgacgaccggcggcggtggtggcggcggcggcggcagcagcagcccgacctcgtcgtcgttctccacggtgacgtaccacccggcgctggcggggcagttcggcgtggaggcggcggccgaggaggccgacctcacctacatgagtgagtacgcgtacaacagctacatgctggagttggcggcggccggctactgcggcggggtctacgaccaattcagctga

SEQ ID NO: 53389 - DNA, 387 bp, Oryza sativa
  Clone ID: PAT_MRT4530_55595C.1
gtcatctagcccaccaccttgtggagctagctggaagacccggggcgtttctctataacagggaacatgcagtggagcaagtattggcagataccctatttcttggttctcagaaaaggtcgtttttctccctgggagaaggtgccttggtgaaattgggcacagaggtggtggaggcagcatcagttttgacatattctgagcacagcatgaagcaaatcgagagtgaatttacgatcatgagagcatttatcagtcaggttagtgcagagaaagttggtgacaaaacgtttgatgcctggttggatcaggttagagatgttgcccatgatgtcgaagacatcgtcgatgagtatgcttacctcgctgcacaggccattgatacag

SEQ ID NO: 53390 - DNA, 391 bp, Oryza sativa
  Clone ID: PAT_MRT4530_55596C.1
attggggtgttgttaagaaggaaattggaaaattttgtaaagcttattctcgagatagaagcacctgaagtagtggatactatgatgatatgatcatggaaaaggctcatattatttttaagtcggaaaataatgaaaaaaacctttcacattggtgtatatgtggagagaactgaaagatcaaccaaaatggcgaaggttcttagaagaagataaaaagaataagagtactaagatatctaaatcaggtgcatacacatcataatccaatcaagcatacatatcatcatccaatcaagacacagaggaggagaccatccgcaaagagaagcgccatgagggatagaaaaatggcaaagccaagctaaaagggagaggtaaaaatgtcgca

SEQ ID NO: 53391 - DNA, 666 bp, Oryza sativa
  Clone ID: PAT_MRT4530_55597C.1
gcacgaggcatcaatggaggagccaccgtttcggctggttgggcggccacccaacctcgccggcgacgaacagtggatcacagtagcagaagctgcttacttcgaccatcatatggatctaccagaggcttcggtacgaggagaattgcagttcgttctgcctcccagaagaactcgtctcctccattgatgaccactgagcaagaagccgaagacgaggtggtgctagagtcgccggcgcacttccgcatctacaagagcggcaagatcgaccgcctcaaccggccacccgtcctgcccgctggtctcgacgaggccaccggcgtcacctccaaggacgtcgtcctcgacgccgacaccggcgtctccgtccgcctcttcctccccaagcttcaggagccctccaagaagctccccgtcgtcgtcttcttccacggcggcgcgttcttcatcgagtcggccggctccgagacgtaccacaactacgtcaactccctcgccgcggcggccggtgtcctcgtcgtgtccgtcgactaccggctcgccccggagcacccgctccccgcgggctacgacgactcgtgggcggcgctccagtgggcggcctcggcgcaagacggatggatcgccgagcacggcgacacggctcgcctcttcgtcgccggc

SEQ ID NO: 53392 - DNA, 350 bp, Oryza sativa
  Clone ID: PAT_MRT4530_55598C.1
aacggatcgagccaaccttgcagccagatgaaactagacagagaggagggccagcattctcattgtcgaaacgtacatgaagcgcaccggcacgtggcggtatcttggacactctcgtcccttcaaagcccaccatcttgacaggcacgcctgcagcaccgctcgaattagagcagacctgagctgtgtagcgggccggataggagggacatcctgcctccattctcgatgcataccctcgtcctacttgagggcgcggctcccgaccactactggtggtacacggactggctctgcgaggacccagtggcactcgcgtgggacagggcgctggaggtgatccacgggcg

SEQ ID NO: 53393 - DNA, 1475 bp, Oryza sativa
  Clone ID: PAT_MRT4530_55599C.1
atgccagatgaactcccgattcctggaccaatgccatcaaaattgctgaatacaggaacatacggtacgttcgcattcttgggtgatacttctgccccatcatcatcatcatcaaatcctgctgagtccacagatccctccgatggcctgggaagaaatcaattagaagttgatgaaggaacaaatgaagcttctcatacaacaaaatatatggaagacttggtgccaaagattggcatgaaatttagctctgaacaagaagcttatgacttctacaatgcttatgctcttaagaaaggtttcagcattagaagaagcagctatcattacatgggaaatactaaaattataaaaaaacaagacattttgttgttcttgtcaaggaagtagaggtattgacaaaagagcagaagcttcaggctatggtgatagttttagttggccagaaactcgatgcaagtgtcaagcatgtatgaagataagtatcatagatggattatattctatctatcactttgtgcctgaacataaccataatcttgccactagaagtcaggctcatcagttaagatcacaaaggaagataaatgaagctcaaattgcaagcgttgaagtcgcaaaatccgtagggatttctactaaagcagctattgatttgatggcaaaacaagcttgtggatttgagaatctcgggtttactcgtgttgacatgaagaataaattatactccaagaggtcactacaaaccaaacaaggtgatactggaggagtgttagaatatatggagaagaaagcatcagaagatgtcaagtttttttattctattcaagttgatgaggatgtcttaattacaaacattttctgggctgactctaaaatggttgcggactatgaagattttggtgatgttgtatgctttgacacaacatatagaaagttggatgacggacacccttttggtttgcttgtaggagtgaataatcataagaagactactgtttttggtgctgctcttctatatgatgagaccgctaatagttttgtttggttatttaatacttttctaaatgttatatcaggaaagaagccaaaaacaattttgccaaatgaagatgcagctatggctaaagcaattaaaatagttcttccagaaactcatcatcggatatgtgtatggcacatgaatcagaatgcctgcaagcaccttactgggtgtgttaaggactataagaaatttaatgctgactttcagaactgcatatatgatcaggaagaagaagaagaatttttacgtgcatggggccaattgcttgaaaaatatgagctccagcagaatacatggttgcaacggatttttaagaaaagggagcaatgggcactacactttgacagattggtgggagataaaagatatgaagaggtaaagtgtgacttcagagcaacacaaagtactttaaaatttaaaataaattttg

SEQ ID NO: 53394 - DNA, 560 bp, Oryza sativa
  Clone ID: PAT_MRT4530_5559C.1
atggcgatacacacggaccccggcgtctggggcccgaacgcggagcggttcttgcccgagcgccaccgcgcccacgacgccgacggcgagcagcagcacgagcacgacgggttcgcgctggtgccgttcgggatcgggcggaggagctgccccggcgtgcacttcgcggcggcggcggcggagctgctgctggccaacctcctcttctgcttcgactggcgcgcgctgccggggcgcgaggtggacgtggaggaggagaacgggctggcggattgggtaaagacagtacaggaagcggcggcgagcgtcgtgcgcacgggtcgccttcaaggtacagataaacggatggtcgtcccggtcgccgatcgccattggttttcccgtcgcgccgtatctggatggcttggggcagcgctggtgttggaccgccagaggccaacatcaacgtgcagaatacggccggagtttgtggaggatgcatgcgagacgcgtgtgcacgcacgatcgacgcgcgggttcggcaaagcggtggcagcgtgtggaactagttcactttaagt

SEQ ID NO: 53395 - DNA, 482 bp, Oryza sativa
  Clone ID: PAT_MRT4530_555C.1
atggcgacggcatcctccacgccggcgccgtacgtcgtcgaggactgcggccctaacctccagctcttgagcgacggcacggtggtccgcttcgaggactagaacaccctccctccggtaccggagttgcgccacccccgctgtccgccgtccagtggaaggacgtcgtctacgacgccggccgcggcctcaagcttcgggcgtacaagccacaggccgccgtcgctggggagaagcagaatctcccggtgctcgtctacttccacggcagtgggtacatacgagcttcccgccgtcgtcctctccgccgatataccgcctccccgctgcccacggcgacgcggcgaccgtcatgtccttggtgcgtgaccaggtcgtggcgaccggcgacccctggctgtcggagtcgtcggcggatttcggccgggtgttcatctccggcgaccaggcatggcctaacatttttcaccatgttacatcaa

SEQ ID NO: 53396 - DNA, 240 bp, Oryza sativa
  Clone ID: PAT_MRT4530_55600C.1
atggcgccttcccccgaccgctacacgcctacaccttcccggctcccgctggcgctcaaggccgcggctcaggccgagacgccaacctttgccgacaactacacgccgccgccgtcaagggtggatgaggcacatgctttgatggagcaaagaatgctaatggaggcaaatgtggtgatatggggaacattgcttggtgcatgtgaaagacatgagaatgttagagttgggcataactag

SEQ ID NO: 53397 - DNA, 157 bp, Oryza sativa
  unsure (1)..(157): unsure at all n locations
  Clone ID: PAT_MRT4530_55601C.1
agagcagaagagcaanacatcgagaaggaaatgcagaacgagagagtcagtatngagagacaganggcagtagtcgaggagatgacaccgagangagagagcagaaacagacaatgcganacaacgacnagacagagacacagacacacacgaacag

SEQ ID NO: 53398 - DNA, 163 bp, Oryza sativa
  Clone ID: PAT_MRT4530_55602C.1
gcacaaatcagattcttccaggagtcaaaggctctctctcaaagctttggctttcggttcacatggtgacatggttcagattcctcgtgtgagccagggaggagtcgacacggcggctgagagcactgagcagaatcgcaactcgctctgccggagattccaa

SEQ ID NO: 53399 - DNA, 189 bp, Oryza sativa
  Clone ID: PAT_MRT4530_55603C.1
atggccaaacaaacgaacaaacaagggttcgcgaagtccccaaatcggggagctcaccagcagcagcggacgggagtctcctcggatccaacagtggcagctcaacatactggatccaacagtggtggatccaggaatgaaaaattgggggtggggggggggctcaacatactgggaacaccggcataa

SEQ ID NO: 53400 - DNA, 475 bp, Oryza sativa
  Clone ID: PAT_MRT4530_55604C.1
aacgaagggcactaaatgcatccttatgtagtttgagatagtgaaagttttgtttccctagaaggactagtatctccctatgggtataaatatatacacccggggtcattgtaaaatatctcaacaatcaatacaactactctcgacgcatcgccaccctctttaccgaggtttttacttatcatccggcggaacttggcacctgacgcggggccacatcggttcagttcgatctccggtgaaggggtaagtcctacgttccgccggccctggcaattgtattggcttcatcggcgtcgttcaaggctgcatcagtacattcaaactcttggattgctctggttcggttgatatatttgcctacctatcatatgcctctgttaatttaatcttagcatatcgatttagctctatcggctgcttctcgctttagggtttctgtcagtatcggctaaatcgtgttgctatattagat

SEQ ID NO: 53401 - DNA, 162 bp, Oryza sativa
  Clone ID: PAT_MRT4530_55605C.1
cgccagcgcccttgatggatgaccccaatgtgctgtgtgtgcgcaactttatggagactgtgcaaacgcacaatatggacaaacagattaaagatgggatgatgggcccggctgtcaatagcttgagttcaatattagaatgatgcaccccatgtgttatgc

SEQ ID NO: 53402 - DNA, 900 bp, Oryza sativa
  Clone ID: PAT_MRT4530_55606C.1
atgccgccggccgccacctcgccagcaccaccggcgtccctcaccacgctcgccgtcattgccgcatggagagggcgtcgcccaggtgcgccgcacctaccttcgttaggcagctgccggacgtggaagcccgccgcctcccctcccgctggatctggcggatgggagggtgcggccacctccgccaccgccgtctctccaggcaaccgccggtcatgggaacacgctgcctacgactgctcgccgcctccgccaggcagctgcgaccacgggagcccgtcggccgctgcctacgagtgcagccaccgcgagagagagaggagggaggcggagggcggaggggagcccgtcgccgcctacgagttctcgcccccgccgccggctgcagagcccaccgcctcgcctcccgccggatctagcggaggggagggcacagctgcctccaccaccgccgcctctccaggcagccgccggtcgtgggagcccgcctcctacgaggtgtggatctggaagggagggaggggagcgtcgccagctctcctcccactcgccacgtgcctccgcgctgccggtggcctctgccaccgccttcctagcatcctgatctgcgagggagggaggggaggggagagccagtggctagttgcacgctcaccgtcggccgtggccaccgccctccgcgccgctggcggaggatctaaaggttccatctcagacagatatcttaagaggtccgcattaaaaaataaaggtatttttgcagaaccagactcgccaccactcttgcgccgctccttcctcgccttgttccccgtggctccggccttccacgaggtcacctgcgcctacaacgtcgccgtcgcgtccacctgtcacttcgaccgcgccgggagcagatga

SEQ ID NO: 53403 - DNA, 1122 bp, Oryza sativa
  Clone ID: PAT_MRT4530_55607C.1
atgccgccgggcgccacctcgccagcaccaccggcgtccctcaccacgctcgccgtcattgccgcatggagagggcgtcgcccaggtgcgccgcacctaccttcgttaggcagctgccggacgtggaagcccgccgcctcccctcccgctggatctggcggatgggagggtgcggccacctccgccaccgccgtctctccaggcaaccgccggtcatgggaacacgctgcctacgactgctcgccgcctccgccaggcagctgcgaccacgggagcccgtcggccgctgcctacgagtgcagccaccgcgagagagagaggagggaggcggagggcggaggggagcccgtcgccgcctacgagttctcgcccccgccgccggctgcagagcccaccgcctcgcctcccgccggatctagcggaggggagggcacagctgcctccaccaccgccgcctctccaggcagccgccggtcgtgggagcccgcctcctacgaggtgtggatctggaagggagggaggggagcgtcgccagctctcctcccactcgccacgtgcctccgcgctgccggtggcctctgccaccgccttcctagcatcctgatctgcgagggagggaggggaggggagagccagtggctagttgcacgctcaccgtcggccgtggccaccgccctccgcgccgctggcggaggatctaaaggttccatctcagacagatatcttaagaggtccgcattaaaaaataaaggtatttttgcagaaccagactcgccaccactcttgcgccgctccttcctcgccttgttccccgtggctccggccttccacgagcccatggccggcacggcccggcatgaagtgccgatcgggccgtgccggcccgatggctgcacgcgcacctcctgcacctttgagttcctccaaaagactgagtcgacacattttgagattgccgatgtcaccacaggcgtctcgctgtcgattgctggtcactgtccaaggagatccgggaccgggtgtcctaggagagcacgcttgacaccaacgaggcaggtcacctgcgcctacaacgtcgccgtcgcgtccacctgtcacttcgaccgcgccgggagcagatga

SEQ ID NO: 53404 - DNA, 141 bp, Oryza sativa
  Clone ID: PAT_MRT4530_55608C.1
atgacagggctgtcccccgtgtcaggcgagggacggcactgggccccactcgaggacaagctgtggcttagcttccaggcgaaggcacgggtcgagttctggaggaccttgctcaccgagaagaaggaaaacgctgagtag

SEQ ID NO: 53405 - DNA, 372 bp, Oryza sativa
  Clone ID: PAT_MRT4530_55609C.1
ggacgaaggagctcgctcgccgttgccctgtgctcccgcccatcgcccaccccgctggtggcttgctctggccttctccttgcaaggaaaagagaggatagagagaagcagagagtagcgaggatgacatgaaaggaaggagggtatgcctttagagaatctggcctgtccgagagagacggaatagcccatctgacatctttgccaaaccctaaccgcctctggctcggcggcggcggcggcggctcgtccccgaagagcagccggagttggagaggatcggtgttcccgctacggtatcggcggcaaagatcgatggtggacacggatgagcggtggcgcgcttcggtgattggcggtggtggagatgct

SEQ ID NO: 53406 - DNA, 761 bp, Oryza sativa
  Clone ID: PAT_MRT4530_5560C.1
gtagaccatctccgccgtttgcctcaacatcgagaggctgtagcagacgcccacccccgggaggccctcacgaccgcccgcatcgattctggaggacgctgccattggcggcttccaatttgggaggccgaagctctagaaaattttggtttctatcaaatttcaaagatgaagaccattaaaattgacaaatatttaatatcagcattggtcgaacgttggcggcctgagacaaatagctttcacctaccgataggggagatgacaattactctgcaaaatattagttgcctatggggtttgtcgattcagggaaaaccaattgtgggccagtctgatggaaattggggtgatatgattgagaggtatcttgggattccaccagaacatcaagaaatgaagaactccataaatctgagtaaattgcgtgatcactttcatgtcatgcccaataacccaacacaacgggagattgattggcatagtcgagcaattatcttagaaattcttggctccattatttttactgacgcatctggagatagtgttccggctatgtacctccaatttatggataatttagcagtgcaaactgaatacaattggggagcagctgcacttgctatgttgtataggcaattgagcattggtgctgagaaagcaagatctgaaatttttggtcctctagtactattacagttgtggtcatggtcacgcttgctattaggtcggccaaaacagaccatatgaaccttcccagc

SEQ ID NO: 53407 - DNA, 1152 bp, Oryza sativa
  Clone ID: PAT_MRT4530_55610C.1
atgtcatcctctctctttcttcttcctctcttatctctttctttctctttctgttctctctcctacggccggccgcggggagcacgggctggagctaacaaactgcgcgtcggagctaagaaccgattcgatcgtcggattccgccggatctaacgaactgcacgtcgctgcagttcttggacatgagcaccaacacgttaggcggcaacatgcaggagattcttggcaagttcgtggcgttgaaatacctcgtgttgcatcacaacgactacaccggcagcatcgtctcctccaacgtgctccggctgccgctgctcgcaaggctcgacctcagcttcaaccagttctccggcgagctccctctcgaggtggtcaacatgaagagcctcaagtatgtgatgctcctggcgaataacttctccggtgggattccggcgacctacccgccgttcaactttgtgtacacggtgatgatgcgggagaattgccgcagcatatgggttcgccttctcaagggctacggaatcatcccgatttgcaccaactcctcgtcgccggtgaggtccaacacgatctccggctacgtgcagctctccggcaacaagctttccggtgagataccttctcagatcggcgcaatgcggaacctcagcttgctccacctcgacaacaaccagctcacgggtcacttgccgccggagatcagccagttgccgctcgtcgtgctaaacgtctcgagcaacatcatctccggcaggatcatcacgggcatggtcatgttcatcatggccaacctgcgggtgaggtttccggtggaccaggacccgaaccccgagtcgctctcctgcgagaaccccaagtgcggcggcggcggcggcaagtgcggcgcgttccatatgtcggctacgtcgtcaccgccgtccggatgctcgtcatcgtgcgtgaccgggtgctcgcgcctcctcccgcctcggacacgctactccgccgccgcagggggcagcatccacgccggccgcacactccagcgcctgcacgccagccctcccgccccgccgcggccgctgctcgggctctcgtcgctgcccctgcccgttgattgctccacgagagagaaggtgaagagaagagggggagagaaagagaggtaa

SEQ ID NO: 53408 - DNA, 1570 bp, Oryza sativa
  Clone ID: PAT_MRT4530_55611C.1
ctatatgtactgattcatcctgagaaagtcataaagcccatgactgaaagcacccgctcttgcatcatacacatcctgtttttgaacgattcggcgtaaacccgtggtcgcaccaccaagtgccaagtcggcgaccagctcgtccaccaacgcgtccatcacgagcccgtccacctccgcgccgacgtcccgctcctcctcggcgacgcacatccacctccggctccgctccatgtccgccaccgccgcccacccggagaacaccacgtccccgacgccccaccgctgccccgcgccgcgcgcccaatcccccgcggcgcgcagcagcgccgcctcctcgcaatcgttgagagggcagctggacgccgacgaccggagccggtccactccctcggcaaagaagtcgagcaggagccactcggagacctcgtccgtgacaacaaccgactcgagcagccgcgcgagcaggctgtgctcctcctcctcctcctcgccgtgattaacgacatcttggtcgtccgtgcattgccgtggcgtcgtgggcgccgtcgtcgcggtgtcatcagaagagctagtcgagttggcgttgagatgcgtgcgctcggaggaatcagactcggtgaattgcgcctcgagatccacggggacgaccacctgcgtcaggccctccagccgtcggatcttgtgcagcagctccgccttcgatctctggagctcggcgaggcactgttggaaggacggcgagcacatgccggcatcgcttccttcctcgccgtcgtcgtcatcgaaggggaaatccagaacggacacggggctcagctgttgcttgtcctccatctccaacttgcgccccacgggctcgtcacccacatcctccttatgcccgtctcctccggcgtcggcagcgccatggaaggcgacgctccccgtgctcgactgcgacgtcttttcgtactccgacgccgacgacgccgacgcgcacttctcctcctccgtcgtagccagctcagcctctgactcggccatgtactcacactccgacgaggagcagctgctgaccaccggcgacggcagcccgagcgagtccctctcgtcgacggcaatgtcgtcgtcttcctcgccgtcatcctcgccgcggcgcctccagaggccgtccctgaaccgccgcgagaggctcctggagaggcgcgagatcttggcgagcgtgccggggctcttgtggaagaagttgtagaaggagggcaaccgcgacgggctccggcgtagcccggcctcgatgaggaggcgcaccggcggcgcgaggtctcctccggccactccctcgtcggcaacggggaaacgcgggtaggcgcggaagccttcgctgctggactgctccaggaagtcccgcagcgtcaacggcgtcaacctcctcgccggcgccgccaccgccatcgtcgtctccgcagcaagtggcgaagtactacgctgttgccatgtacgcgcgcgcgcgagagatgcactcgggggttgcgttgctggcagcgtggcagcgtggggtgttgagctgagacggatcggtggatgcgcg

SEQ ID NO: 53409 - DNA, 3330 bp, Oryza sativa
  Clone ID: PAT_MRT4530_55612C.1
atgtctcccctgcttcttggattcctctgcttactcctcttcgcaggtcaggtggcggtggtagccagcgacgacgacagggaggtgctcgtcgagctgaagaggtttcttcaggcgaacaacaggttcaaccggggggagtatgaccggtggccggagtccgacgcgtcgccgtgccggtgggccggcgtgacctgcgacgggcgcggccgcgtcacggcgctcgacctctccggctcggccatcagcggcgccgcgttcggcaacttctcccggctcacggcgctcacgtggctcgacctctccgacaacggcatcggcggcgagctccccgccggcgacctcgcccaatgccgcggcctcgtgcacctcaacctgtcgcacaacctcatcgccggggggctcgacgtctccggcctgaccaagctgcgcacgctcgacgtgtccgggaaccggttcgtgggcggcgccgcggcgagcttcgtcccggcggcgtgcggcgacctcgccgtgctcaacgtctccggcaacggcttcaccggcgacatcaccggcctcttcgacggctgccccaagctcgagtacatcgacctcagcaccaacaacttcactggcgagctatggccgggcatcgcgaggttcacgcagttcaacgtcgccgagaacaacctcaccggcggcgtcccggcagccacgttccccggcggctgcaagctcaggtctctagacctctccgcgaaccacttcgccggagaattcccggactccatcgcaagctgctcgaacctgacgtacctgtcgctgtgggggaacggtttcgccggcaagatatccgccgggatcggggagctcgccggactcgagacgctgatccttggtaagaaccgattcgatcgccggattccgccggagctgacgaactgcacgtcgctgcagttcttggacatgagcaccaacgcgttcggcggcgacatgcaggggatcctcggcgagttcgtgacgttgaagtacctcgtgttgcaccacaacaactacaccggcggcatcgtctcctccggcgtgctccggctgccgctgctcgcaaggctcgacctcagcttcaaccagttctccggcgagctccccctcgaggtggccgacatgaagagcctcaagtacctgatgctcccggcgaatagcttctccggtgggatcccgccggagtacggccgcctcgccgagctccaggcgctggacttgtcgtacaacggcctcaccggcaggataccggcgagcatcgggaacctcacgtcgctgctctggctgatgctcgccgggaaccagctctccggcgagataccgccggagatcggcaactgcagcagcttgctctggctgaacctggccgacaaccggttgaccggcaggatcccgccggagatggcagagatagggaggaaccccgcgccgacgttcgagaagaaccggaaggatgtcagcgtgctcgccggctccggcgagtgccaggccatgaggcggtggattccggcgacctacccgccgttcaacttcgtgtacacggtgatgacgcgggagaattgccgcagcatatgggatcgcctcctcaagggctacgggatcatcccgatctgcaccaactcgtcgtcgccggtgaggtcgaacacgatctccggctacgtgcagctctccggcaacaagctctccggcgagataccatcccagatcggcgcaatgcggaacctcagcctgctccacctcgacaacaaccagctcacgggccggctgccgccggcgatcagccacctgccgctcgtcgtgctgaacgtctcgaacaacagcatctccggcgggatcccgccggagatcggccacatcctgtgcctcgagatactcgacctggcgtacaacaacttctccggcgagctcccggcgagcctcggcaacctgaccggcctgaacaagttcaacgtgtcgtacaacccgctcctctccggcgacgtcccgaccaccggccagctcgggaccttcgacgagctctccttcctcggcgaccccctcatcacgttgcaggatcgaggccctcgccggcagagagcgccacaggccgccattagagggcgcgggatgtctccgagaaccatcgcgctgtggttcgtcttctccctcatcatcgccttcatcgccggcacggtggtgttcatcatggccaacctgcgggcgaggtttccggtggaccaggacccggaccccgagtcgctctcctgcgagaaccccaagtgcggcggcggcggcggcggcggaggcaagtgcggcgcgttccatatgtcggccacgtcgtcgccgccgtccgggtgctcgtcgtcgtgcgtgacgggttgctcgtcgtcgtcggagggggtgaaggtgttcaggctcgacaagacggcgttcacgtaccgcgacatcgtggcggcgaccagcggcttctccgacgaccgcgtggtcgggcgtggcggctacggcgtggtgtaccgcggcgtgctccccgacggccgcgacgtggcggtcaagaagctcgcgaggctccgcgactgcggcggcggcggcggcggcgaggacagcggcgagcgcgagttccgcgccgagatggaggtgctcgccgaccggatggggttcacgtggccgcacccgaacctggtcacgctctacggctggtgcctcgccggctcggccaagatcctggtctacgagtacctcgacggcggcaacctggagtccctcatcggcgaccacgccgcgttcgggcggcggcggcggctggacgcggccatcggcgtggcgcgcgcgctggtgttcctgcaccacgagtgccgccccgccgtggtgcaccgcgacgtgaaggccagcaacgtgctcctcggccgcgacggcggcgtcaaggtgacggacttcgggctggccagggtggtccgccccggcgacacccacgtcagcacgatggtggccggcacggtggggtacgtggcgccggagtacgggcagacgtggcgcgccacgaccaagggcgacgtgtacagctacggcgtgctgctcatggagctcgccacggggcggcgcgccgtcgacggcggcgaggaggagtgcctggtcgagtggagccggaggatggcccaggaggggtggccggcgagggaggcggcggcgtcgagcggcgcggtgctctgggacatgctcatgctcggcatgcggtgcaccgccgactcgccgcaggagcggccggacatgccggacgtgctcgccgccttactcgacatcgccgggtccggcggcggcggcgaccccaattcttga

SEQ ID NO: 53410 - DNA, 320 bp, Oryza sativa
  Clone ID: PAT_MRT4530_55613C.1
tcggttttccacgcggtgatcgtgcatgccaccacgcgtctggtggacacgcggtccaccggccggcatctgctggggcgggggatgatcacggagcgctcggggagcgttggcactagcggcctgtagccactcaagtggagggcgcggccggcgatgcaacatccggagtacccggacgcggaggttctagagggctcgaagtgcgagctgtcatcattaccgtcgatggtgttcgccagcgtggcgctgtagctggcagagcgtgtcgtggacaccgccatggggcgtgccttactactgccaggctgcgactgcgc

SEQ ID NO: 53411 - DNA, 488 bp, Oryza sativa
  Clone ID: PAT_MRT4530_55614C.1
agaacagaaaatactactactccattaactgggggtgataacctcatcatttttatagctggagaactggacaaagattatctgatccccatagcaacatgccactctacaggcatctctaccctttacatgattaaagtgcagaaatgaaaaagagagaagcacatttgcttctctttaggagggggagagtgaggccccaaaaatgtccatgggaggacttttatcattttctacctctctttctctgaggcttgttgaagaagagaagcctggctaacatacttccccttgacccgaggccgacattcagcattcaccttccgcgattgataccgggtcttattggagaggaggggagtgcactgcttctgcttgtgccgcaatttcagcatgcttccttcccggataacaccgcttgtattattatctaaaaatagatcaatgtctgcaagtttagcatgcaaatcagaggaggatcttggtga

SEQ ID NO: 53412 - DNA, 159 bp, Oryza sativa
  Clone ID: PAT_MRT4530_55615C.1
attgcaacaacaccaggttcggcttcaccttctgagtactcacaccaccaactcaattatcatcttttacaactaaacctacctttctcaacccaaacacatcgaactcgtgtgccacaaatccatccaaccacaattaaccactcctaacctacggtc

SEQ ID NO: 53413 - DNA, 367 bp, Oryza sativa
  unsure (1)..(367): unsure at all n locations
  Clone ID: PAT_MRT4530_55616C.1
cagtttctcacgcacacctgacggcgcctgagtcccgacggccaccatatcctcgtacgtcctcctcgagagatatatagcagcgatcgatcgatcttctcttctcgtcttgatcatcaagtagagtgcatggatcgtcggcggcgggggcagccggagcgcaaggcggcggcggcgacgacgaagaagcgcgggagggacgaggaggtggcggcggcggcgccgccgcgtcgttgggcgcggtggatttcccgttcgaggagggggacgaggaggcggcggcggatgacgtctgaagggatcaggcaccggaagtgctccggttcccgtggcagancttgccgcgcgggctcggggtggtcgccgg

SEQ ID NO: 53414 - DNA, 216 bp, Oryza sativa
  Clone ID: PAT_MRT4530_55617C.1
atgccgctgcccgagttgacaaggccatttgcctatataactcagattgcatccgcactcgagaacacacgctgtcatcagccacagacgccaaaatacagccatagggcacaaagaaaatccccggacccggatctgaccccggatcttgagccagcggcggcgcttctcagtcccacccacgtcgccgccggagtcctcgccggtcgccgctag

SEQ ID NO: 53415 - DNA, 2409 bp, Oryza sativa
  Clone ID: PAT_MRT4530_55618C.1
atggacgccgacttccggttcgacccggacggctccgacgacgacggggcggcggcctcggcggccgcggggcggaggaagccggcgcagtcgccgtgggagttctcgtcctacgcggagtccgtggcggcggagcacgcgcgccgccgcaccacctccatcgacgagaagatctcccaggccctgagcggtagccgccgcggcgggaagccttctatccccgacggtgactccgagggcgacgaggatgattcggaggtggaggatgatagtgaggaggacgacaaggaggtggtggaaggggagatcgacgacgaggaggacgaggttgaggagagcgaggatgatgacgagggggtagaggtgagcgatgaggaggtggaggagttggaggagggcaaaggggaggagaagagtgacgaagtggaagagggcgaggaagggcaagatggggaagaggaggagaaagaggaaggagatgaggaagctgcagaagaggaagaagaaacggacaagaagagtggtgtagtggacccttctaaattttttgcatcttccgaaggagcgtcgttccatgcaaattcatttcttgagctgaacttgtcaaggccacttcttcgagcctgtgaagcactcggctaccaaaaaccaacgccaatccaggctgcatgcataccattagcattaactggacgggatatatgtggcagtgctataacaggatctgggaagacagctgctttctcattacctgtgctggaacgtctacttttccggcccaaacgtgtacctgcaattagggtgcttatccttactccaacaagagagttggctgctcaggtccatagtatgatcgagaaattagctcaatttactgatatcagatgttgtctgattgttggtggactttcaactaaggtacaagaggtagctttaaggtcaatgcctgacattgttgtagctactcctgggcgtataatagatcatctacgcaattcactttccgttgggcttgaagatcttgcaattttgatccttgatgaggctgatcgtttgctagaactcggtttcagtgctgaaattcaggaactgattcgcatgtgtcctagaagaagacagacaatgctattttctgctacgatgacagaagaaattaatgagcttgtgacactttcactgaacaaaccagtccgtcttgaagctgatccttctctgaaacggcctgcaacattgacagaagaggtggttagaatacgaagagcacgcgaagcaaatcaagaagctgttctgcttgctctctgtttgaagactttcaaggataaagtaatcattttcagtggcacaaagcattctgctcacagattgaaaataatatttggtctctccgggatgaaagctgctgaacttcatggcaaccttacgcaggcccagcggcttgaggctttagagcttttcaaaaagcaagaagtggacttcctgattgcaactgatgttgcagctcgtgggattgacatcgttggtgttcgaactgtaataaatttttcctgcccgcgtgatgccagaacttatctacatcgtgttggacgcactgctcgtgcaggcagagaaggatatgctgtgacatttgttactgacgatgataggtccctcttgaaagctattgcaaagaaagctggttcacagctgaaaagtcgcattgttgcagagaagcctgtggctgagtgtgcaaaattgattgaggaacttgaagatcaaatttctaccataattcaagaagaaagggaggaaagaatattaagaaaagctgaaatggaagctacaaaggcagaaaatatgatagctcataaggatgagatatactcaagaccaaagagaacctggtttgctactgagaaggaaaagaaacttttggcaaaggctgctaaagaatccacgagtcaaggtaagagtaattctggagttattagcgctcagcaagctgaagatcttcgtctgaaggagaaaaagagaagggagcgtgagaaaaatctacctaggaagaaacggagacggttagaggcagaacgggagatgttagaagatgagagcgaagatgaggaagaagctaaggaaagcaaaggtgggaaaaaagaaaagaaaggtcaatcgctagtcgatgtggcttatcgtagagcaaaatcaatgaaggccagcggtaaaaggggtgctggcactggcaaaggaaagaatgataaaaaggcaaaacaacattctggaaagggcccaactaggcaagaggagatgcaagagttgttccagaatgatatgagtgaatggaagcagggccgctccttaaagaaaaataatgttatgcgaaagaaatcgaaaaattcttttaagagcaaatccaggtacaaccgccgaaagtag

SEQ ID NO: 53416 - DNA, 108 bp, Oryza sativa
  Clone ID: PAT_MRT4530_55619C.1
atggctatggccacgtctgacatcagagtccagtgtataattgcctttgagagagcagattctgctggcggcaatagaaccagccagaatattgagtcattgaataat

SEQ ID NO: 53417 - DNA, 1822 bp, Oryza sativa
  Clone ID: PAT_MRT4530_5561C.1
atgggcgagggccggagtggcgtcgggcaagcagagacatcggcgagcagtggagacacgagcatggcgcaggggcccgttgagcggcagagacgcttgagtatggtcacttcttcagttcttcctaaggtggttgatgatgccggcgagggcgaggccaaccctcgccgggcgaaatggtggtacgcgacgttccacagcgtcaccgccatggtcggcgccggcgtgctcagcttgccgtacgccatggctcacctaggatgggggccggggacggcggcgctggtggtgtcgtgggggatgacgctgtacacgctgcggctgctgatcgagctgcacgagtgcgtgcccggggtgcggttcgaccggtaccgcgacctcggcgcgcacgcgctgggcccgcgcctggggccctggctcgtcgtgccgcagcagctcatcgtgcagctcggctgcgacgtggtgtacatggtcatcggcgggaaatgcctcatgaagttcgccgagtcggtgtcgtcgtggtcgcgcgcgccgcagctgcaccaccagtcctactggatctgcatcttcggcgcctcccagttcctcctctcccagctccccagcctcgactccatcaccgccgtctccctcgccgccgccgccatgtccgtcggctactcgacgatatcatgggcggcgtgcttggcgaggggtactcccgcggcggcggagggcggcggtgggggggtgagctacgcgtacaaggacgggacggcggcggactcggtgttccgggtgtgcagcgcgctggggcaggtggcattcgcgtacgccgggcacggggtggtgctggagatccaggcgacgatcccgtccacgccgacgaagccgtcgaggggggccatgtggaagggcgccgtggcggcgtacctggtcaccgcgctctgctacttccccgtcgcgatcgcgggctactgggcgttcggccgcgacgtctccgacaacgtgctcgtcgcgctgcgccggccgccgtggctcgtcgccgccgccaacatgatggtcgtcgtccacgtcctcggcagctaccaggtgtacgccatgcccatcttcgagaccctcgagacgattctgatcaccaggatcaggctccctcccggggcgctcctccgcctcgtcgcccgatcagcctacgtcgcgttcacgctgttcgtcgcggtgacgttcccgttcttcggcgacctgctcggcttcttcggcggcttcgggttcacgccgacgtcctacttcctcccctgtattctgtggctgaagatcaagaagcctccgaggttcagcgcgtcgtggtttgccaactggggttgcatcgtcgttggagtgctgttgatgatcgcttccaccatcggcgggctacgaagcatcatccaggatgcctcgacgttccagttctactcgtgatgggtgatgatgcatacgtactgacttagtacatacagaacgtcaggatcaactgtaaccaggccaagaaattagaggtatcaagagtagttgcaaacgatggccatattattctgtgactttcattgatcgttggcctcgcttgcagcgtgccggccagcggtccttgcgaaatgtgtaactgaagacgaattacagtagtgattcagtgatgcgcatcgaccctgtctgtgcaccagatgtaatagaccttgctgacacacggtttcgcaatcctcatgctgaataacatcgatggcgattgcagggagaaaaatatatataaacatctagtaatacaagtttactatcgcagtgattgcgaatcttctattcttcccaaaaa

SEQ ID NO: 53418 - DNA, 467 bp, Oryza sativa
  Clone ID: PAT_MRT4530_55620C.1
ttaaaaactacgagcacgagtggtgagcacaagagcaactactgagagcggcgaggagacagggcggggacaaattcagtaggaacaaccgcaacccaaccgtgcaccatctaggatgtctaggacgacaaggccgtcttttgctcggatgtgaacgacgacctggaccaggacctcgcgaaactatagcccaagctggccgatcaggacgttctaaacagccgacgcgcaagacagaaccacgccacggacgacgacgacgcgagatcgctcatggacgtggccccctgatcaggagccgctgtaaaccactggctccggctgcgaggcgatgtgcccacgccgaagccggataggcgcgacgctcgcaggcagttgaagtaggcgctcatgcacaacaccgccagggcgtcgtccaccgcgacgacaacatcgacctatcttcctcgacgatgacgaccacagca

SEQ ID NO: 53419 - DNA, 333 bp, Oryza sativa
  Clone ID: PAT_MRT4530_55621C.1
atggcgatgctcaccgccgtggtcgccgcctcgacctcactcctccatgccgctgatggtggtcaccatctcgtgaccgctcttgcaaacaaaccgaggaacacgaactcaaagtcagctgcaaagtgggaggtgaggagaagggaacggacgaaggagcggtgggttggcggcgaagtcctaggtgtacttggagtcctagtaggtggaggtgtcaacgttgtaggaagacttgctgctaccacacgaggcggcggaggcagcggcgccggacatggactcctaggagaggctcatccattggtcgcagatacaccgcgttgccagggctga

SEQ ID NO: 53420 - DNA, 558 bp, Oryza sativa
  Clone ID: PAT_MRT4530_55622C.1
atggagagagaggattctgacaacaaacgtgtagaggaagatgattcgtcaggtgatgaggagaacgatattaatccagcggaatgggctactgaggatttttctggtctggtcgtctctgaagaggatagtgtgagatgggagtacaatgaggttattcaagaagcgatttatgctaatggagaatatatgaaggaggcggcaaagtattttgcagtgtcacttcatagagagttttggttgccaagctcaactggttacaatatgaagttagagacattcaagtatactattagctatgccaaggcgtggagggccaaacagaaaaaaataatagagatgagatttggaacttacgaagcctcgcatgacaatttgccttgtcttcttggcacgtcgagtcagggtccaccaaccatgaaccatgccaggacatcgtcggagtacgggtggggttccgctttgcacttcgacattagcgactttgacttccagcactcgatagaggacgtcatcggtccctcattgctgggaggcgcaccgccggtgcagacgtag

SEQ ID NO: 53421 - DNA, 243 bp, Oryza sativa
  Clone ID: PAT_MRT4530_55623C.1
atgaggtaccaaaaatttaatgtaaattttagtacctcatggtacctcacagtacctaggtctttagttggacagcccaggggccagggcattagaatctatgatagctcatgcaattttgagcagatatatgtttatgataaaggagttgataggatcctctgttactaccagtctctagcagatctatcaatgtgaggaaacggaagcatagaagtaattatctgaagagtcatcactcca

SEQ ID NO: 53422 - DNA, 340 bp, Oryza sativa
  Clone ID: PAT_MRT4530_55624C.1
aatataaacaagtgttcacatatatgttgacagtttaaaaaaaaaaagggggaaaaaaaaaatttgtgcttaaaagctgtccctttttacaaaaggagggggattttaacacctaaagaaaaaattggccggggagggtgacttcacaaagaaaaccacccctaaggctaccgggtaaaaaaaaaaacgtgggggtttccaaaaaacgcaagaaaaaacccgtgtccgcacccgcgacaaaaaggggaaaaaacaaaattggggaaaccaacccccccaagggtgcccttgggaattcgcgggagccccgggggggggggacttacccggcaaggggggg

SEQ ID NO: 53423 - DNA, 329 bp, Oryza sativa
  Clone ID: PAT_MRT4530_55625C.1
gcgtccgctcggtgtctgcctcccccccccccccccccccccaccagtaatggcccgctgcccccaccggcctccctcccaaccacgagtgctggtgctgctgctcctcctcctcttggtattaccgggtccccctcctccgcggcgcggtagaagtagaagcgggggctgtcaatatgggaggggagtagggggcggcggtgggggtgcgagaacgctggcgactgggcgctcacccgcctaaagccaatccacccaccttacctgttggggggtcccggggaggggcctggtgtcgtcgaagaagtgggaggctcctagctaccccc

SEQ ID NO: 53424 - DNA, 538 bp, Oryza sativa
  Clone ID: PAT_MRT4530_55626C.1
agtagaatcttaggagagatgtgacacagtgtcagtttccttgcaatgtgggaaactcagagaagtctatgagataaaatgtgctacctatcagtacaggctgtggaggtgactaagcccacaaagactgactaaaccaggcaaacaaaacaagtagtcctgtcctccagaccaaatgagaggcaaagtgtggcgggttttttgcagctcctgttgtgactcatcaggttaaggacctgactagtatatgtgagaatgggggcttgatccaccattggtgcaattatttggctgctcccatggcaggtggaagttccctgatcagggatcaaacctgcaccacagcagtaaccagagccacagcagtgacagcactggatccttaatccactggagcaacagggaactctaacaatgtgtggtttttgtttattcatccacataatttctcaaggctctgaaagcttgtttcaacacaaactaagtaggaagctttccagccaggcactaattccgggacgatctctctatatagagg

SEQ ID NO: 53425 - DNA, 232 bp, Oryza sativa
  Clone ID: PAT_MRT4530_55627C.1
ggtgttttaaactgaaagggagtgtgttttagaataatcatagaggggtaacatggtgtccaaaccatacacgcgaatagtaatcacacacgtacgacgattgggacgcacacaaacaaagtttatgttggtaggcgatacctcacagctaaaatatggggagacctttttttttcactttaacaatcgcaatccctgttgtacataccactaggtggactccattttgaaa

SEQ ID NO: 53426 - DNA, 403 bp, Oryza sativa
  Clone ID: PAT_MRT4530_55628C.1
agaaaaaaattctaaattcttttacaaatttgggggtttcattaaaaagggagagggtcactttatacaacagagtcacaaaaaataaaaagacactacaatattgtcagtacaagacaacgtacagacagccaaacataacacagaacctatagtataactgaacagcccaccaacaatgaatgggcaaattcaggtacatgatacaaagttatatacctactgaaacttgaacgcatatttaaacagacaacataacttttcgatcatataaatacaggtcggcaaaagtcagcatttctatcaaaatatacagttacacactagcacgttatatcttggatctgcattactggattgacagagcagggtaacgaagggcaagaatcgaaaagtgcatact

SEQ ID NO: 53427 - DNA, 4459 bp, Oryza sativa
  Clone ID: PAT_MRT4530_55629C.1
atgagcagcctggtggagcggctgcgggtgcggtcggagaagcggccgctgtacacgctcgatgagtccgacgatgacctcccgccgcgcggcgggggcgggaaggggagggatcggcacagcgacggccccaccgagcggatcgagcgggaggacgcggttagccctcttacggaaatggaaaagatattagactgtgaagaaacaaaacctgatgcttctgaagagactagttcttctgagtccggatcaaagaagaaacctgtcaaacgatatcttataaaatggaaaggaatatcacaccttcactgcacttgggtttcagaaagtgaatatttggaaactgccaagatatacccccggctgaaaactagactcaataacttccataagcaaatggattcaacggataagtctgatgatgactattctgcaattagacctgagtggactactgttgacaggatccttgctaccagaaaaagctctactggtgaaagggagtactatgtgaaatggaaggaactaacatacgacgaatgtacttgggaaaatgactccgacattgcagtctttcagcctcagattgaacgcttcaatgagattcagtccaggaggaagaagtctactgacaagtgcaagagtgtcactcgtgagatacgtcaatataaggagagcccgaagtttctctctggtgggacactacatccctaccagcttgaagggttaaacttcttacgctattcttggtaccataataaacgtgtaatacttggggacgagatgggtcttggtaaaacgatacagagtattgcctttttgggctctctatttgtggacaagcttggtcctcatctggtcgttgcacccctttcaaccttgcgaaattgggagcgtgaatttgcaacttgggcacctcaaatgaatgttgtaatgtattttggatctgcagcttctcgtgaaattattaggaagtatgaattttactaccccaaagagaaacctaagaagcttaagaaaaagaaatcatctccatctaatgaagacaagaaacaatcaagaataaaatttgatgtccttttgacatcttatgagatgatcaatatggattctactgttctaaaaaccatagaatgggaatgcatgattgtggatgaggggcatcgtttgaagaacaaagattccaagttgttcggtcaacttaaagagtatcatactaagcatcgtgttctcttaacgggaaccccagttcagaacaacctggatgaacttttcatgcttatgcacttccttgagggtgacagttttggtagtatagctgatctccaagaggaattcaaggacataaaccaggacaaacaagttgagaagctccatggaatgctgaagccgcatcttcttcggcgattcaagaaagatgttatgaaagaacttcctccgaaaaaggagctgattttacgtgttgagcttacaagcaaacaaaaagagtactataaagcaattctcaccaagaattatgaagtgttaactcgtcgtagtggtggacatgtttcacttattaatgttgtaatggaactacgcaaactttgttgccatgcattcatgacagatgaacccgaagagcctgccaattcagaagaagctttaagattttctgatgtcattaacattttaattccactaccagctttttattactttcaaacacatattgatgcagaggtactggagttctctgatatctcttgctgttatcttttcatttcacgtcttaacaaacacaatgccatatttgaagttgttgacatctggaggcttttagaatcttctggaaaaatggagctgcttgacaagatgatggtgaaactgaaagagcagggtcacagggttcttatttattcacagttccagcacatgttggacttacttgaggattatttaagctaccggaaatggagttatgagcgtattgatggaaaaataggtggtgctgagaggcagatacgaattgatcgcttcaatgctaaaaattctactaggttttgctttcttctttcaaccagagctggtggtcttggtataaatctggcaactgccgatactgtaattatttatgacagtgattggaatcctcatgctgatttacaagctatggcgagagcccatcgcttagggcagacaagcaaggttatgatatataggcttgttagtcgtggtacaattgaggagcggatgatgcaacttacaaagaaaaaaatggtattggagcacttagttgttgggcgtctcacgaaaggcactaatattgtccaggaggagttggatgatattattcggcatggctcaaaggaactttttgacgatgaaaatgatgaagccggaaaatcttgccaaatccattatgatgatgctgcgattgatagattattggaccgtgaccaagctgacggggaagagcctgtggaagatgaagaagaagacgaatttctaaaaggattcaaggttgctaactttgagtacatagatgaagctaaggctttagctgcaaaagaggaggaggcacgcaaaaaggccgaagctgaagctgcaaactctgacagagcaaatttttgggataaattattgaaggacagatacgatgtacaaaaagttgaagagcatactactatgggaaaaggaaaaaggagccgcaaacagatggctgctgctgatgaggacgacattaccggcctgcatgacatgagttctgaagatgatgattactcttatgatgatgatgtgtcagataacgacacaagtttacaatcaggccttgctgggaggaggggcccatattccaagaaaaaacaacgtagtaatgttgattcacttccattcatggagggcgaaggacgggctttgagagtttatgggttcaaccaaattcagcgaacacaattccttcaaacgcttatgagatatggttttcagaactacgattggaaggaatttactcctcgattgaaggggaaaagtgttgaggaaatccagagatatgctgaacttgtcatgatccatcttcttgaggacatcaatgactcaggatattatgcagatggcgtgccaaaggaaatgcgcacagatgagacattggtcaggctagccaacatatcacttgtggaagagaaggtggctgccatggaacaaggaaaaataacaaaactctttcccagctatttgttatatgaatttcctagcttagttggtggaagagtatggaaagcggaacaggatctactgttgctgaaagcattaataaagcatgggtatgcaaggtggcaatatatatcagatgacagagataatgggatttttgaggctgcacgacaagagctgaggcttcctactgctaatgaactgattagttctcactcaaacaatgagacaaacggaaatctggaaagcacacaagaaggccagtcgaacccaacgagcatgatccattacagggatacacagagaaagatagttgagtttattagaaagagataccatcttttggagagatgtttgaatcttgaatacgctgtgattaaaacaaaaacccctgttcctgatgatctcgctgaacaagattttcctggtggtcatagaccggccgttccagactacagtgaaatgctgagagaattgcctgtccttgaacctatttccaaagaagtggcgcctgaaggcacaactgatcagtcacaagtttcccatctttacaacaagatgtgctttgtccttgaagacagtgctgttcctgcactcaactcgcatttcggtgacaaggcagcttcctccggtttagccaatagcctccataagtttgaagctgtatgcgaagacgttagtcgcatcttgagatcccatgaaaatggtaccactcccaaagaggaagttatgctagatgcaagctccaaagagaccacgtctccaaaagatccagcaaccgaggtgccttcgtcagcttccaaagaagctacgcctccagtacaagatccagtcatagaggcagtgaaggaggagccacccactgttaaggcggaggacaaaatggaaatcgatagttaatttgtaggaatcataacgataatatcgaacctttttcgtctaatctaatcgctaaactggctgtagcttttaccatattacaagttgtaaactaaaaaatcactctaagctagtctcatcctgtagaggcctggacatctccaggcctgagatgaacgattaccatcaaatctgtcgtactaaaggttaccaggttttgctagctcctgccccgctgcatctgttaaatgtttaactcttcactgtcgaataggtcacttgactggtttgccatcaggatgattaggcccattgtaatgaccctactgctaaagctgtgttgctaattgtggcattgtgatgtgaaaaaaaaaaaaaaaaaaaa

SEQ ID NO: 53428 - DNA, 394 bp, Oryza sativa
  unsure (1)..(394): unsure at all n locations
  Clone ID: PAT_MRT4530_5562C.1
caagaggggcggacgcngggcacgacaggaaccagcgagcgaggcacaacggcaacccccaggaaaggcacacgcaagngcgagggccccaggaagaacgggcaacggccgaggaagagaccaccaagccggaaaaaaaagcgagggaacaggaacccaccacagcccaggagagagaccagaacacagacgcggaaagacaccacacgagacagacgaaacgacacaaacaagccccaggaacaccgacgccacgggcaaagaccacagagcagaaggcaagcncacgccacgacgaagaacacaagaaaggaagaaagacaagccacagaagggccgccccagaggccgcaccggacggccaaagcccagggaacacaccaaaaagggcccc

SEQ ID NO: 53429 - DNA, 327 bp, Oryza sativa
  Clone ID: PAT_MRT4530_55630C.1
atggccttcggcggcgcggcagttgctgccacattgggttcacatggccgtggccaccgcttgcgtacgttccctcaacctcggcgcgggcacgacggcgggggagaagacgagtcggcgcagcaccttgagggaagacacgagcgggtggttcatcacggcgtcattggccgcgacgcgcagggaacgcaggggagggcaaggtggccgggcggcgttgaagaagacgagcctagcgtcttgaaggaggacacgagcgggtggtctactgcggcgctggccgcggcgcgcagggcgccacgtggcccaatctctagccagggttag

SEQ ID NO: 53430 - DNA, 696 bp, Oryza sativa
  Clone ID: PAT_MRT4530_55631C.1
gcacgaggcccggacgcacgcaccgccgtccccccgccgcccaccggattctccaccacctgcgcgccgcggccagcgccgcagtagaccacccgctcgtgtcctccttcaagacgctaggctcgtcttcttcaacgccgcccggccaccttgccctcccctgcgttccctgccgcaatgccgctgcctttcctcgaagccggggccgccgtcaattcgccggcaggagtcaccctctaacaggcggtggccatcgccgatacaaacttcggctagatccggtgagcccacgagagaaagaagggagggggcgctagctagcagaggaggagaggaggcggcgtgcgctggtgagaggtggcatcgcatcagatccttcgccacctgcgcgtcgcggccgatgacgccgcgatgaaccacccgctcgtgtcttccctcaaggtgctgcgccgactcgtcttctcccccgccgtcgtgcccgcgccgaggttgagggaacgtacgcaagcggcggcagcgatgtcggcgatggtcgtgcgggcctaatgtggtggcagggcagggcggacgaggaccgacgatctgggatcaacacggcggcagcgctggccggggcgctcggcgcccgccgtgcccgggtcaacccaatgtggcagcagctgccgcgccgccgaaggccatgtaaatttgtgctcc

SEQ ID NO: 53431 - DNA, 878 bp, Oryza sativa
  Clone ID: PAT_MRT4530_55632C.1
attgaaaaaggtttttaaaagtctcttttggctttgggccgaaagtcggcccaaaacctctctctctctcccccggcccagccggcccagtccgcagccgcgcgcgcgccctcgccgtcgctgacaggtgggtcccaccgatcctttccttctccggccgaatgatagaggggaaatgatcctcgggatctcctctaccttttctcttttggaatcatcgtctatctcgctttggaagttcgtggattcgagatcgaatcggattcctctctctctcccgaacccgaagtttccttctcgtcgccggtcgccgtgggccttcgccgccgcctccttgcacccgccgccaccctcgcctttgctcgctgtcgtctgtagcgccctagcctcgtgcagcctagcgtcgccgtcgtcgccgccgcttcagccgtgcgccgccgtcgtttcggtcgtcgtcatcactcgggaaggccaccgtcgggatcgccaagtcgtcgccgtcctcgtccgccccttcgccgtcgttgaagaccgtcggagcaccgtcgtcaccgtcgacccgaagaccgccgccgcttcttctttggtcaccggtgagttcgccgcgtcgccctctacccgttggtgccttccgttcgcgtcgtcgagccgtcgttcgccggtgagcttgcgttgccgagccgccgccagtgctgacgtcatcgctgacgtctcgttgccgttccccgtgagccggtcgtggaccgtttgatctcggctgtccgttttggataggatcgatctcggccgtccattcccgtgaaccgctgccgtgcacccggtccaccgcaaaccctagtcgctgacgcaataatcctccttttccttttcaaaaataa

SEQ ID NO: 53432 - DNA, 771 bp, Oryza sativa
  Clone ID: PAT_MRT4530_55633C.1
atgccattccctctctcctctcagctctctctcctcttctccatcgtcgccacaacgcgcgccaataagaggacgcccctagcgccgccgctgccgccgaggggagccagcacgcgtcggcctaggagggaggcgccgccgccgctcccgcggcatcagccgccaaggccgcgagggagagggatggaggcggcagaggcggcggcggggagctcccatgcacatcgtgagcacatcggtgacggcgcgcgaagccggcggagagggaggcggaagcggagacgacgtcacacgaaggaggagtcggcggcgcagatcgatgcggcggcgcagcaggaggagtcggcggcggtgggtccgaggtcgtgcagctccggccgctactccctcctctcctgtctcccgtcggccgccacgtgccgctcctctgccatcgaccgccgcgaggggaagaagagagagagccgagaggtggccggcgggagcgccgtcccagcggagagggaggtcgatagcagcgccgagagggagggggtgagctcgtcaggccggccaacgggtaggaggaagaagagtggcggcgcgcgtcgcgccggcgagagggcggccgacgggagcgccgcgagggatgaggcgagctcgtcggggcggccggcgggagaggagcggcggctcgcgggggccggctggagaggaggccgcgtgcgccggccgactggaggtaggcagcgggcggcaacctcacgcgccaccgccgcactccacctttga

SEQ ID NO: 53433 - DNA, 381 bp, Oryza sativa
  Clone ID: PAT_MRT4530_55634C.1
ccttctcgtagtttcagtccccatgtatctcatcgggcagcttttttaggccacagcggagtcaaacacggcattccttaagggcgagatcaatacctccatgaggatcgggaggctcatggccagggtggacctccagagcgacctccataagcatcgcggccatctcgaccccttcatcaccaccttcttcacgacatacattgtcacttatgacactgtgcacctccactgggaggatcatgaggtgcatgtgactgactccaagacggttcccattggtatgcaggatgataccgagttgggctgcgagtaccgttacgagatcccgagggggagactggcgctgtgactgatgctgagcacactggcgtcttcact

SEQ ID NO: 53434 - DNA, 1395 bp, Oryza sativa
  Clone ID: PAT_MRT4530_55635C.1
ctattgcacatgactgtaggagttgggagttaaggggtattctcagtgcatataaatattactagtgcagttgactgaagaatcaccaaataactcacatgaaaactttattgtctgccggattcaacattaactgcctgtactgtataaaatacaagttaatctatatgtattctcatcaatattttaaaaacctcctattgtacctgcaacccaatgaacgtcatacacattacacggtccagacggtccaaaacgttcgtttggagagtcttcttgtatgctattaattattcacagggatatgccgagaaggtgccaaatggcatctgatataggctgcaggtatagggttttgagttgtaaggagacgaaaaacttaaggttgtctttgtcgtatagacaagtgtaggaaattgtccacgtgtaagatgagactaggcaagaagagcagcactgactagtgtgcagcctgggctaccacccctgctagtaatgcagactattcaacagagttaacggaatttctacttcttatgtgcaagaggaactccctgaagcaaattgcgagcttgttgttgcagttgattgaggaccccaggggtgagataacgctctttgtgccatagagttaggctttttaaatatcttacaaatagcccagatatctttggctggttttttatctattggtattttagaaagtgaaggctccgtgagtgaaggaagtctgaactcatgcatcatccaatcagtcttgaacccttttgctgctctccctttgtaaaagacaagagacttcttcaggcttatgcatttggttccctcggaagagtagatgggcctctgaagaaaggttaacagtaatattactcccgagttccaaaatgcatgtattgtgataggagttagaagattatgggtttgagcatatgaaaaacccaacgcaacaccaagtataaacaactgtgggaattgtccaggtgtcagatgagcaaaggcaaatagagcagcactgacaagtatgcaaactggagtaggaaaccacttagtcaaggacaccattaaaaatcctcgaaacacagtctcctccagaattggtgctagaactccagtaatgcccaccagaaaagcagtgctggcacttgatgagccgattaatggcaataaaagaactaacgagtcagtctctctttctggaggttcaccattcagataagtcatagcaaccccaactaaagcaatagaaattatagcgccaaagagaccaactccagcccacagaagccagccattttgaagcttgaatggttctttaatattccacagcccaccatggtgagcaccaccgtctgccactcccacggcacatcccatcggcgaaggattggccat

SEQ ID NO: 53435 - DNA, 423 bp, Oryza sativa
  unsure (1)..(423): unsure at all n locations
  Clone ID: PAT_MRT4530_55636C.1
aaaagggaaacggtacatttctatagattttccctgtacagaacaaaatgggtgaaaattgaaatcatgtttcataagcactggagaaagcccaaagaaaaacaatcagcatttctcaggagtctgaataatgacagcaggaaataaatggaagaaaaaaaagtagtgtattttgtcttctctctgcatgcttctatattattagctgtgaagcttatagtacctccatgactgttccctacagatacctccttgcgagagccctgaccttggtatcaaaatgagaagatgtgatgccgagatccaagcagatagaggggattgagggaatatcttgatataaaagctcatggacctcttgaaaaaagcttttaattccatcctcactacgngaatcatgaagcaacatgaatctagcatgac

SEQ ID NO: 53436 - DNA, 640 bp, Oryza sativa
  Clone ID: PAT_MRT4530_55637C.1
tttcattttctgtagtgatgaacaggcagacaagcaaacaatgaaacaaaatcaagatgggtacattcatatttattgtgtttttgctaactattctttcttcttatctgtaaccatatatgggtctagcatgttcaatgcaaaatcaagttatgattggacgtggataaactgttgttatatgctaactattcttttaattattctactttgttaggtggtttaaaatatacatcaagtatattgttatacagctaaaagtgtcaacatgcactacttgttacaggctccaattcttctaggactcttggaaaaaatgaagacaaacaaccagcatttctaccctcaggttgctttgtcgttgcaatatacccttctgtaaataggtttactgtggctttatgctttgtagcattccatgttgtcatatgttgtttccattttgactgtgaaaacagtgtgaattgtctgcgctgatgtataatcatttgtcatcataaatatcatttattctagaattttgatctggaatgcttaatggcataagcattggcattaaattttagatatgttagcgtcttctagttttacatttaacactagttatgccagtgccttctctatggtttaacttgatgaa

SEQ ID NO: 53437 - DNA, 291 bp, Oryza sativa
  Clone ID: PAT_MRT4530_55638C.1
atggcgaagggtgtgcccgcggtttgggagggggagggggtcaattctggcactggcagggcgtacggcgacggggatggtgctggagctgattgtggcaacgctgttgctgatgctcttaaactccgtgctagtgtttgttgtcgttgcagcgtcgctgctggcagccagaacattaccccgtttcccgatctaaaatttgaactcagaaccaggcaagaagccaagaacactctgaacacctgcacaccactccaagaatccgagcccaaaaccacgggcgagaaatga

SEQ ID NO: 53438 - DNA, 710 bp, Oryza sativa
  Clone ID: PAT_MRT4530_55639C.1
ggtgtcaggtgcaatgtgcaacgcccctgcgcaatgacaaggagctgaccaaggacgtgtgtgatgaatgtggcgggaatgcctgcttgaagttggcaatggcagatgaaagaatgaactgaaataaatgaatatgaaatgaaatgtggcaaagcaaatgtggcagtgtggctggctgatggtgactggtgaaaagtgtgtcctttgatgaaatgatgcaggttctgaatgctaaggacatccctcaagatggtctttctatttttgtgttcccgttccaatgtactgttggtatcctcttggagattcatcaatatgagaaaacagagaatggacaaccctcccttaaaaaaaaaaaaaaaaaaaaaaaaaaaaaaaaagaaaaaaaaaaaaaaaaaaagaaaaacaaaaaaatgtaaaaaaaaaaaaaaaaaaaaaaaaaaaaaaaaaaaggaaaaaaaaaaaaaagaaagaaaaaaaaaaaaaaagaagaaaaagaaaaaaaaagggggggccgttttaaaaggaccaacattaaagggcggagcatggagataaaatacttttttaaaaggcacgccaaaatcaaaccgattgccgccggtaaaaaaacgccagaaatggaaaaaccccggggggaacaaaaaaaaaccctttatacacaaaacccctttttcgcaagtgggaaaaaaacaaaaaaggccccccac

SEQ ID NO: 53439 - DNA, 298 bp, Oryza sativa
  Clone ID: PAT_MRT4530_5563C.1
atgattatggataagacatacattctatcctacgacttatggaatatacggatacgggtccatagtctctgagttctacttggagactaaggtgattcacggtataaaaggcatacccccgaggggttcaaataatcgaatcacagcgccaacacaaccaccatagtctacaatccggagaacgtgaagcctactcgccgggagatctcgtcgaaaccatctcgacgagggatctcaccgatcctcgtaccaacgtacgtaccccaataccctattcatccggtatatgggtatcccc

SEQ ID NO: 53440 - DNA, 477 bp, Oryza sativa
  Clone ID: PAT_MRT4530_55640C.1
cccacgcgtccggtctaacattcgatcattcgtcttattcaagaaatttatgtcattatcatagatttgattatgacttgattcagtatcaaggcttctttaagcatgatataaagattcttatatttgcacaaaaatcttgaatagcacgaatggtcaaacgctggtcgtaaagtcaacagcgtcttacattataaaacggagtacttaattaatcacgtgctaatagactgtaccgttttccgtgcgcactgtgcacattgccatgccctggtagcgaacacaccctcaatattctaatagatcgacatgttatcaaatgcatttcatgatagagtctaattgcctattgctgcgttggatagctagaatcatcttgctttggctgagtacattgccgtttgcgttctgcatgttcaatctgactctattgacacactcacttctcatctggaatgcttcatattcagataagtt

SEQ ID NO: 53441 - DNA, 637 bp, Oryza sativa
  unsure (1)..(637): unsure at all n locations
  Clone ID: PAT_MRT4530_55641C.1
gnaattgtnatacgantcactatagggngaattgggttccgggncccccctcnanttttttttttttttttttttttttttgnacactaagantcnttcnttcnttcntttgatnnaagcaaacgaaangaactttcttcntgngatnaaaaacncagatgggnnaccncncagttaacacnaactaaanngttccncncnaaactaacgangannacgatnggatgangatganggnngctcnantananagatagatnacttgggcntgangggcccnccgntcanttcctccanttcccgtcngaattgccnccgccgcnggtgccgtaaccaccancgtngctgncgccaccacggggcgccaccgtanccaccggcaccggcgtnaccgccttcncnggnctgggcgtaatcaccgccgccgccaccaacacgtanccgccgccaccgtancctncgcttcgncgggctgggcgtaccaccgccgcctccccctncggaaacgggcnantggggctcnttaacgngatgttcggcgtcaacccttccnttcatncccccaangntnccctggctggtcccncaaaantccaaccaacccccacnccncnccgatnntatatctgctcngttt

SEQ ID NO: 53442 - DNA, 252 bp, Oryza sativa
  Clone ID: PAT_MRT4530_55642C.1
atgcgcacgaatgtaagtaggcccggcctgagaaggcgggacgttacagcatccacggcgccggcgcgagcgcgagcgcgaggtgaggcaccggcggtggcggcgacaacacaagctcggcggctccgcctctcccctctccctttcggccctcgcacgccgccgttgccgctccggccccgcccgctgctccagcgcagcaaagggggagagaaagggaaggagaggatggttgtgggccccacgtgttag

SEQ ID NO: 53443 - DNA, 519 bp, Oryza sativa
  Clone ID: PAT_MRT4530_55643C.1
aaataagtctattccataacataacttccagtaaactgtgacaatacatttattgccagcttgtaatgctagcttggttcaaacctcttaccaatacatgcaaatgtatacatatacatacgtactagcaatcagagcttgacatgcggcatgtaatattagctagtatagaccctatccaacaatactatattattgggcgagcgagcgatgttgatcgtgtagtactacatgtaaattattaatgtgatgtacgtagtttgatcgtgagctcgatctctctctacatcacttcaatttgggagttttgagggcacccaggtccaccatagtaaatgtaagtgccccaactagtggtactggaggaaccagtcatgatattatagcaattgggcagcgaggctatcaagcccacaccattaggcggcatgggatggttggaggaatcaacaacttggattgctctactgtaggtggccttgccaaacccttcctcagggaaatgtccactgcccatgg

SEQ ID NO: 53444 - DNA, 306 bp, Oryza sativa
  Clone ID: PAT_MRT4530_55644C.1
atgagggagacgtgggagagggagcgccgcaacggcggaggatggcgtcgaggaggcacggcgaggtatcgaccgatacctgatgcccggtgcctaaggtaccgggtgatatctaggtatcagaccttggtaccaaggtcgacgcgggctgccggcgtccataccgaaggcgcaaaagcgacaggccgcagcagggacgacggtgacgccgaggccgagggcaaggacgaggggagctcccgcttctgccctcctcggggcgacaactccccggcacacacccgaccgacgagggcggcgagctag

SEQ ID NO: 53445 - DNA, 292 bp, Oryza sativa
  Clone ID: PAT_MRT4530_55645C.1
caccgacggcatgaatcatttcggtgacatgagcagtcatcatagcacatggccagtcgctgttattatctacaaccaccttctcggctctattaataggaatatttgaagcataagtacatcatgatgtcacttctatttcaggtgcacaaataacctagcaacgatattgatgtgtactttgagccgctagtagaggatcttgtgatactatggatggatggtgcacggatataggatgcatacaaacgagagtacttctagtgtcggactattttgttgacgaaaatat

SEQ ID NO: 53446 - DNA, 540 bp, Oryza sativa
  Clone ID: PAT_MRT4530_55646C.1
atggttgaaatgttctgtagaaagatgtcgctcatgagaagtgttcccgtatgctccagggagagcgatgccactgtaaggatgaatagtgagccatgccattgtccctttatttaaacacattacccgttatccaggggaggtagcaactgctagctttcatgtactctatttctgttccccattcatttatcattcgctgccatggcagtttgatctgcatacattagaatttgcttttgtgatatgtttgaaactttccttgtgtttgaacccacgtcagattctcttatcaagatgtgattgaatgtactctttcgaccaatcattgaatgaacttattttacaccttttggtaaatgatactctttgttttttctgcaagggcaaaggctactagtttgccacgtggcccactgatttgagagaattctgtttgtaacttcaaaggagctattgaaatcgctttctttctccaactttttttttgatgtgtacaaagtaagaatcttttcggcctattataatcctcccatcggt

SEQ ID NO: 53447 - DNA, 216 bp, Oryza sativa
  Clone ID: PAT_MRT4530_55647C.1
atgtcaacgtcacgtgtgaagaagacccagtcaacactgccacggagaggcgacaagctcgacctcggcgacggccacgcggtcgaccctggccaggaaggaccccggcacgccgctgtcgctccgccggccgccggccaccgcgccgctccgccgcgctcctccccagcggaggcgagcttcgcctccgtctccgggttccggcggccggagtga

SEQ ID NO: 53448 - DNA, 533 bp, Oryza sativa
  Clone ID: PAT_MRT4530_55648C.1
ggggaacggaaaacgggggcgagaaaagatggaggctaaccctagtctctatccagacggggagggcggagcaggagccggagcctggtcgcgccgatctttgctgccgaaaggaagacgtactgatccaccggtcgaaggaccacagtgcgctcgcgaaagggaaagataagtgccgccgctgactatgaccgcaagaacccttgtgtgctcctagaaggacggcatgggcggcacgctgatgatcccagcagacactccaagaaaggctactgccagctctcttccagcgcccagtacaccgtgtctggaaccatcagggccattacactggtgcgccccaacctgccgaccctcttacgagccacacggatggtatcacaatgcccgacttgatggcgatgggaagatgcaaagggatggagacggtgcccgacttgacgttgatggcaatacgcatagggccgccgacagtaccgcactagttggcgatggcatgatgcacatggttgtggatgatgaaatgacaacaa

SEQ ID NO: 53449 - DNA, 1779 bp, Oryza sativa
  Clone ID: PAT_MRT4530_55649C.1
atggtttctgccggcgttcatggcggcgacgacggcgtggtggtggatttcaggggaaacccggtggacaaggaccggaccggaggatggctcggagccggtctcatcctagggacggaattggcggagcgcgtgtgcgtggtgggcatctcgatgaacctggtgacgtacctcgtcggcgacctgcacctctccaacgccaggtcggccaacatcgtcaccaacttcctgggcacgctcaacctcctcgccctcctcggcggcttcctcgccgacgccgtgctcggccgctacctcaccgtcgccgtctccgccaccatcgccgccatcggtgtgagcctgctggcagcgagcacggtagtgccgggaatgcggccgccgccgtgcggcgacgcggtggcggcggcggcggcggcggagagtggtgggtgcgtggcggcgagcggcgggcagatggcgatgctgtacgcggcgctgtacacggcggcggcgggggcgggggggctgaaggcgaacgtgtccgggttcgggtcggaccagttcgacgggcgcgaccgccgggaggggaaggccatgctcttcttcttcaaccgcttctacttctgcatcagcctcggctcggtgctcgcggtcaccgcgctggtgtacgtgcaggaggacgtcggccgcggctggggctacggcgcgtcggccgccgccatggtcgccgcggtggcggtgttcgccgccggcacgccgaggtaccggtaccggaggccccaggggagccccctcacggcgatcggccgcgtgctgtgggcggcgtggcgcaaacggaggatgccgttcccggcggacgccggcgagctccacggcttccacaaggctaaggtgccacacactaacaggctcaggtgtctggacaaagccgcaatcgtggaggccgacctggcggcggcgacgccaccggagcagccagtggcggcgctgacggtgacggaggtggaggaggcgaagatggtggtgaagctgctccccatctggtccacgagcatcctcttctggacggtctactcccagatgaccaccttctccgtcgagcaggcgtcgcacatggaccgccgcgccggcggcttcgccgtgccggcgggctccttctccgtcttcctcttcctgtccatcctcctcttcacctccgccagcgagcggctcctcgtcccgctcgcgcgccgcctgatgatcacacgccgcccgcaggggctgacctccctgcagcgcgtcggcgcggggctcgtcctcgccacgctcgccatggccgtctcggcgctcgtcgagaagaagcgccgcgacgcgtccggcggagccggcggaggaggcgtcgcgatgatcagcgcgttctggctggtgccgcagttcttcctggtgggcgccggcgaggcgttcgcgtacgtggggcagctggagttcttcatcagggaggcccccgagcggatgaagtccatgagcacgggcctgttcctcgccacgctcgccatggggttcttcctgagcagcctcctcgtgtccgccgtcgacgccgccacgcggggcgcgtggatccgggacggcctggacgacgggaggctggacctgttctactggatgctcgccgcgctcggggtggccaacttcgcggcgttcctggtgttcgcgagccggcaccagtacaggccggcgatactgcccgcggcggactcgccgccggacgacgagggcgcggtcagggaggccgcgacgacagtgaaagggatggacttctag

SEQ ID NO: 53450 - DNA, 109 bp, Oryza sativa
  Clone ID: PAT_MRT4530_5564C.1
ggcccccgtactgcatagatgtgagggaagtgaagccggagccgtacggggaaacaccggcccgggcaggcaagcatggcgcaagattgagatcgccagccagcgctaa

SEQ ID NO: 53451 - DNA, 243 bp, Oryza sativa
  Clone ID: PAT_MRT4530_55650C.1
ggacgagaagatttgtatattttgcatttgaagtcttcgaaatatggggagattggtctttatcggttctgggggtatctgaactacaatgagtatcattccttgatgatcaacaaagatatgggctgcttctatttctaatgggaaatcgtttttaaccaaagctcaagtatcccctttatcttctgtggctagcttgccttttacaacaatttgatgacagcatgttctgcctttgattgt

SEQ ID NO: 53452 - DNA, 1712 bp, Oryza sativa
  Clone ID: PAT_MRT4530_55651C.1
gggtgttttttttttttttttttttgaatcatggcccgagctattttattttataaggatacatccactgtggggtacaatgtatagtgccgtaggtcagtagcaacctttggcatacagattccatttaagtttggtaacatgtaaatcatctaacttcatgcatccagtagccttagaacaacaggaagaccaaacttaggctgaagagttaacaggtctacaggtgcatgaacatagttaggggaaagtgtgaatgagaacttttttaggatcatagccataactgacttggcttccaacatcgcaaaattctgaccgatgcaagaccttggccctattgagaatgccagtagggcatgtggaactttggctgctcttgtgaccccgttctgaaatcttaatggattgaattcatctgtatcgtcaccccaaatctccttgtcccggtgcataattgctgaaggtatgataattgcatggtctttgggtatttttgtttctcctactgtaatatctgttagaggttttctttgaaggaaaagagcaggaccatagagccttagggtctcaaggaataccattgacattagttttcttgcctctttcagtttgctaaggttgtcaccatttggattttcttttccacattccctcaaagcttccaaccggagtcttgcctgccattctggatacacactgagcaaaaacactgtccaggtaagaagaagtgacgtggtttcatgaccagcaaagaagaatgttttgcactcatgtataatttcatcgatgcttaagctgagctgatgttgctcccttccctgatctgttgcaatgcaagcctcaagcatcaaaccaaggagatcgcttccgtatccacttccttttgatgataatcgggattgtatgatctgcatgagagtgcccctaagcttcttttcaagtgtcaatttcctccaattcccttttgtaggaaggtagctgaatcctggtatctgcacgttgaggagagattttacagcaatttcctggagctctttctgtgcatggaacgcttctattcctaacttatagctgcttccgaaggccgtatgagatatgatatctgctgttaactcttggaattgtttgtccaattccacttgagtttctccattcttgttgctggatgcttgatcttccaattccttcaccatgttttgagcacaagctaccattgtttttgtcatcatctttatcttatccatggtgaaagcagggttgattactctgcgatggcgctcccaatcaattccttcgaccagtactagtcccttgccaagcaacgccaacactgttggggtagtgtcattcttcagaaagtgtcctgacttgcttgaaagaatctgcctggcccactcatagttgaagatgcagattcgaggctttgccccaaaccagtatacaaagggctctccatccacattagtgatccttgggaggtaattgtggtcatgaacatcaagaaccagatcatctgcagcatccttcattttcttcacatcctcattgcagcctttcaagaacttgtagggtggtccacggattccttgctccctgagcctcttggctgcaatgtaaggcctccatatatggggcacaatgatgtagtcccatagccatgagatggtaggcaacaagagggcaaggaaaaccagagcaagagaggccat

SEQ ID NO: 53453 - DNA, 699 bp, Oryza sativa
  unsure (1)..(699): unsure at all n locations
  Clone ID: PAT_MRT4530_55652C.1
ccacgatggtnagaaggggcctaccatggtggtgacggtgacggagaattagggttcgattccggananggagcctgagaaacggctaccacatccaaggaaggcagcaggcgcgcaaattacccaatcctgacacggggaggtagtgacaataaataacaataccgggcgctttagtgtctggtaattggaatgantacaatctaaatcccttaacgangatccattgganggcaagtctggctanctgcatcgccgtcgccggcaccctctcctccacccccaacnacngtggcggcggcgtggcccaancngcggcgcggatcnacctccaactcccctcccccctcccccttcttcatcccttccgattctcgtccgcggcgccggcccggtcctcgtccacggtggctgcgtcccgtcaccggtccggtcctcncccgcngtggctgcntccccgtccccgtcnacggcggaagtgtggatnctctcctccttcggtccttctctcttcccggatgggcacngcatggcacaccaaaattgtntnggcccanaactgttgttttgatgaagaattctcnccctnaattncccntttttggctcccccttcttggtnaaaccatccnaaaatttctnaagtnaangggaatatctnaatttgggtatttaaggnnaaanaaccccttnttntttt

SEQ ID NO: 53454 - DNA, 393 bp, Oryza sativa
  unsure (1)..(393): unsure at all n locations
  Clone ID: PAT_MRT4530_55653C.1
atccaatccgaatccggcagcggcagccatgaaagccctccgccctcgcccacctagcctcgcctcgccgctccccgccttctcccccaagcccagggcgaagcccggctcggcggcggggcccgcgctgcggcgggctggcggtggcggcgccggcgccgcgggcgtacttctcgtcgtcgcccatgccgtacaccgcagccgcacaccggcggggtactcttccaccagcttcggcctgttgccaatggtcatcaaacactccgcggggaaggcgtaaaatcttctcgcgcctgctcaagaacggatnttgctcatccacggccaatcnccaaaaacgcctcgctcntcntccccaatgctcttctcatcgaaaccctcaacggtccacct

SEQ ID NO: 53455 - DNA, 584 bp, Oryza sativa
  Clone ID: PAT_MRT4530_55654C.1
tagtggatcccccgggctgcagattggtcacaggagagggggaatataacatggtatccttgcgtaaaactatcagggcttaccttttggaaatgggctcccctttcctaccatgcagaagtcggtcaggtcgctttgtggtgaaggcttactctcttaagatgtggctgaaagactctcctttttgcctggaccttgagttgaaagatgctcccgctcttcctaaaacgaactcaatgaagcttactgaaggatatttcatgagagccggtcttgtacctgtatttaaagatatacatgagcgacttggagaagtatggccaaagaagttttccagactagctctattgtcagaagaaagcagggatgaagttattaaagctgatataaaaggaaggaaagaaaaattggagaaaatgaaaaaacagggtcttgccatagcaaagagatctaaaagagggcctcggagagggaaatttgttaaacaacaaagcacacaggaggttctgaagtagtatttgctttacttagtgtcagatttgcctacatcagtgagaagcaatggtgataattaccgtggtgtt

SEQ ID NO: 53456 - DNA, 271 bp, Oryza sativa
  Clone ID: PAT_MRT4530_55655C.1
gcgagcgtgaacgatacatgatacaggggagcgcaaagaactgctcgaagagtgctactttcgatgatctgtcaggcctgatcggcggtcaggaggaaccaagatttgcatcgctacctactgcaagggcatggctgacacaaagggatgactggaccgcgcaagcacgtgggtatatccaacaagcgggctatgctagatcaacaatcactgctgaataatatctctgatcactactacagtgactgacacgggctctactaatgccttt

SEQ ID NO: 53457 - DNA, 299 bp, Oryza sativa
  Clone ID: PAT_MRT4530_55656C.1
gtaaggtaatcttccagtgagcttatactgtccatattcaaatcctcacttattttcttgtggctacctacagcatatgagtattgacagcttcatactgccaactcaacttaaacatcctttgaagttgtagttcctgttatttaatcttttaatcgttcaaaggggaagatctgcccaaaatatttctttggctatccactttacaaggggtgattatcctttaaattcttaacttctttccataaataattcctggtgaggattctatcaataatatatttttgaacctcttcata

SEQ ID NO: 53458 - DNA, 213 bp, Oryza sativa
  Clone ID: PAT_MRT4530_55657C.1
atggacgacgacgaacgacggccggcgacaaggtccgacggcagctcggctcggatcaacgtcggcgacgacgcaccggcggtcttcggcagctgcaatggggcggatggggtgctcctcctcctggcgaacccaacggtggcgacagaaggcggcagcgacgaccacagcagcgacaaccccgacatgtgggccccacatgtcggcggctga

SEQ ID NO: 53459 - DNA, 216 bp, Oryza sativa
  Clone ID: PAT_MRT4530_55658C.1
ggatgtgactgttaatccttagttgattatattatttgtgttgtcacaaaggccccaaagcaagaaccattccactgcaagaccagtcgagtgaaaggaaccgatgcctccagggacaaaagaaaaaaaaaagaacccgaggagcagagatcacccaccgactagaaccggacgcagctaataaaagcaagaccaacaagagtacatgtccgacaa

SEQ ID NO: 53460 - DNA, 280 bp, Oryza sativa
  unsure (1)..(280): unsure at all n locations
  Clone ID: PAT_MRT4530_55659C.1
ccttcaccttcctcggcttcnccgtgcaggccgacaccaccagcaaagggcccctcggacaatgggccacccacctcaacnaacccnctccacaccaccatcttcaacaccttctcctcatcctcttaatttaangctctttcgcgcgcaattcaaacggggatccatgcnttggtgtncgttcccnccncgcngtttacttttgtgatcaccancnanctgggaangtatggaaaaaangaaangtctcccttttncttgactnaccncntnactnngg

SEQ ID NO: 53461 - DNA, 262 bp, Oryza sativa
  Clone ID: PAT_MRT4530_5565C.1
ctcgactgtctgggcacgataggaatataagtgtcaaagctaattatgagatttttttacaataaagctgattacatgttaaaatcagatgaatacgaaaaacgaaaacctctattatttccggggatataaaatataattacgccattaaactatatcaaatggttagcccttttcgatatgtgagattaaatattatttatttattgatatatatatatatatatatatatatatatatatatatatatatatatatata

SEQ ID NO: 53462 - DNA, 675 bp, Oryza sativa
  Clone ID: PAT_MRT4530_55660C.1
gacgactagtatactttcattcacaaaaggacataacatgtgtgcatcatgaggaaaagtatgttggactctggtacacgaaatttgaattcttcttgagcagtccattcattggctgggctagcattgatcagggaccattagaaaaagtcttgtcaccagtaatctcgccgtgccaaaactcatcaactgttttatatggaccggttttgtggacgaagatgtcaagagttcccctccactctgggagggtgcttatcttgtgacgatcatcattggtgagctcccaatcaaagatgcctagattctctcttaacctgctcttgttgaagctcttgacgattacacaatctccttgctcatacacccacctcaagcatacctgggcaatagttttacccctctccatggcaatctgtttgagaagaggacaatccatgacagcattgttgctccatggtgtaccctttccacctaaaggagagtaggcacagagctgaattcctttctccttgcagaactccctcaatttattttgccgacagtaggggtgcacctcaacttgatttgctgcaggagagatggttgcgaaggagagcaatgtctcgagcttcttgcaactgaaattgctaacaccaatagccttggtgagtcctagcctttggcactccttca

SEQ ID NO: 53463 - DNA, 282 bp, Oryza sativa
  Clone ID: PAT_MRT4530_55661C.1
atgtgctgcgcctgcgcgtggtcgtggacgaagccaagccaagccaacgcaaggcaaagcgcagcgcagcaagaggaagaggaggagcagtcactgttggagttggttggtatcgccgcccgcgcccgcgcccgcgcccgggacggccgatcttatcctgcatccatacctcaccgcaacggagccagagacgtcctgaaatctaggagtaatggcggcgtgactatcgctcgattcttcaattggctttccttggcatgcagggcacatatctgtgactga

SEQ ID NO: 53464 - DNA, 1301 bp, Oryza sativa
  Clone ID: PAT_MRT4530_55662C.1
ttttttttttttttttggtgacgacgagtataccgtccctcggcttaaggccatctctttttttttttttttttttttgtttttgacgactagtatactttcattcacaaaaggacataacatgtgtgcatcatgaggaaaagtatgttggactctggtacacgaaatttgaattcttcttgagcagtccattcattggctgggctagcattgatcagggaccattagaaaaagtctttacttgtcaccagtaatctcgccgtcccaaaactcatcaactgttttatatggaccggttttgtggacgaagatgtcaagagttcccctccactctgggagggtgcttatcttgtgacgatcatcattggtgagctcccaatcaaagatgcctagattctctcttaacctgctcttgttgaagctcttgacgattacacaatctccttgctcatacacccacctcaagcatacctgggcaatagttttacccctctccatggcaatctgtttgagaagaggacaatccatgacagcattgttgctccatggtgtaccctttccacctaaaggagagtaggcacagagctgaattcctttctccttgcagaactccctcaatttattttgccgacagtaggggtgcacctcaacctcaacaatctgaaataaacgaactttcaattgatttgctgcaggagagatggttgcgaaggagagcaatgtctcgagcttcttgcaactgaagttgctaacaccaatagccttggtgagtcctagcctttggcactcctccatctccttccacactccctccatgtccatcatcacaaggtcatccttggaatatgtcattgactccggatcttcagccaacctcatgctcaccggaaagtgaatcaggtacagatcgagatactccatctgcatcttccggagcgcacgcctaagagatggcaggacatggccggggtgcgcgtgggcaacccatagcttggacgtgatgtagagctcgtcccgcgacgcgacgaggccggcgcgcaccgcctccgccacggcgtcgccgaggatggcctccgtctggtacacggccgccgtgtcgaagtgccggtagccggcctcgatggcgcgcaggacgacatccttcaccgtcgacgggtcggtcgcgccgagcgggaacgaagccgtgcccatgccgacccgcggcatcggcttgccggagctcagagccgcctccggcatcatccccctcacatggtcatgggatcgaaccgatcgagagattgtggatatggccccctgcc

SEQ ID NO: 53465 - DNA, 616 bp, Oryza sativa
  Clone ID: PAT_MRT4530_55663C.1
taagggagaagaggctatttggttctattctgtgagctcctctgtggagttccattctacctcagattccatcctcagttgctctacttaagaagaagataggggactcagaatggggcagaaatttcctggctaggtctgtcctccagtatcgggttttaatttttttttaaatgttatcatagttgatttactttgttatgtcaatgtctgctctatatccaagtgacccagttatacatatatacatgcattctttttcttatcttccatcatgttccatcacaagtgactgcatgtaattccctgtgctatacagcaggattccattgtgccttccactatcttttagacagagtccagttccaaggctactggttgatgctaccaacagaagtaaagacttccttacaagctgcccaccacaccctctgcaggctgtaggatgcctttgcttaacagacttgtaaacactggcaaaggaaaggctctttccaaaactaaattataggttcaaagagtttcagcctccagtcttctttatcaaactttatgagggataggacataggaggaaatggaaaagaatatgcaaaaaaaaacctcatctccataaa

SEQ ID NO: 53466 - DNA, 393 bp, Oryza sativa
  Clone ID: PAT_MRT4530_55664C.1
aaaattactatttataagaagagagaaagcaagacctgcccataaaagcaggacatgaacagcgatacaaccgatctcagttaggtacagacagagtagagaggtcaacccccggatgggccaaggctttaccaaaactgatacaggctcaccgcctagggtgaggagctgtttgatggtagcgctactttattcgtgtgaagcaacagtggttaagcatcatcctaaaacgcctcagagctcgttgactttagacacatcgcaatgggctgttgtttgaagcactaatgaggctgcgacgttcgtgcctgaacaggcttccatagaagcctaccctggagcagtgattaacacttgtgacaggacgatcgcacacgctttttatgacccagg

SEQ ID NO: 53467 - DNA, 712 bp, Oryza sativa
  unsure (1)..(712): unsure at all n locations
  Clone ID: PAT_MRT4530_55665C.1
gctcccgcggctcggggaggccgaccgcgtcgcggccaaccgcgtcatggggtgcgtcgcgcaggtgtggctcgtggggcggtgcgacggggcggggcggatgaggttcgcggccgactccgactcggagctctcccgcgggtactgcgcctgcctcgtctccgcgctcgacggggcgcgcccggaggaggtgctcgacgtggacccggccgacctcgcgccgctcggtggggccgccgcggggacgggggcgcggtccagggccagcacctggcacaacgtgctcattggcatgcagaagcgtgcgcgggcggccatcgcggcgcgtgagggcaggcctgctggggagccgttcccgtcgcttatcatcggccgcgacggcgccatccgcgctcaaggcacctacgctgaagcccaggtgatcttttgctcgtttgtttattatgttcattccgttgcttttattggttattccttccgttccctgtattttattcctgtgtattgccatgttccgtgttctccatcatttgtccaagcttctcttcggaagggttaacagtacggcacggagctactcagctcttcttattagttactccagtattactgatctctgactgaaaagacgtggtttcctctacaaattagaaaggagtgtatatctttgatttgttgcttttcactangatatggctaaaaatgtaagtgc

SEQ ID NO: 53468 - DNA, 373 bp, Oryza sativa
  Clone ID: PAT_MRT4530_55666C.1
cgctgcatccccacatttgtcgttttacagccttgggagctaggtgctaggcgcgccgcctccgcctccgccgcccggctgctacgatgttttccgtacccaaagttgcacctatgacgagatggttatctgtctccgatgtcagccggcttgaggtgtaggctcctaggccgacggacgccgcgaaccccgacaagacggccacactattgcgacggggacctgctcggagttccgcttacctgggcattataagcggcgcgcttacccgatggcggaagaagtcaatgccggtcacatgaactctactcatcgagaccaatctgcagaattgcacgcactgcctgaatagcacgagctgtccaacatacct

SEQ ID NO: 53469 - DNA, 359 bp, Oryza sativa
  Clone ID: PAT_MRT4530_55667C.1
aaaaccaaaaatgtataacatccccaccaccatccttttttttttttcaccaccaatctatttccatttcaccaaaaaaagggcccccataaaaaattttttacaccaccaaaggaccccaaaaccagaaattgtaaatccatcccacaattaaggaagggggaaaaaatccaacatttcttctcgtcattgataggtgaaaaaaacggaataggcttgctttattgccgcggggcaccttttttccaaacaatgtcccttgcccctcctaatcccctttttgtccgatgcttttaaaacaaaaacattctaaccacggggccctccatttgcatttttgttgccaaaacccgaagcat

SEQ ID NO: 53470 - DNA, 258 bp, Oryza sativa
  Clone ID: PAT_MRT4530_55668C.1
ctagagcatcgccatggtcatcctgctcctgctctggaagacgtcataaatccgccccttgatcgccatgagtagcggcttctcagggttggacctgtcgtactgcaacaactcctccgccatgatctcccccaccttgtagaccaccacggcgatcaccaccaccggcgacgcactcctcgccgccacccacagcaccaccgctgccacgaccacggcagggaggtagacagaggaggcggcgcgccgccgcgccat

SEQ ID NO: 53471 - DNA, 333 bp, Oryza sativa
  Clone ID: PAT_MRT4530_55669C.1
atgggtttgctgttcgtggagtcgctcccggggccgaaggtgttcaagtgcaagttctgcggggtggactcggcgtcgccggacgccatcgtgtccaaggagttccgcggccgccatggccgggcctatctcttcgacagcgtggtgaacgtgagccttggtcccagggaggatcgccttctcatgactggattgcacacagtgaatgatatctattgtagctgctgccaacgactccttggttggagatacgagaaagcttatagtgaggaccagaagtacaaagaaggcaagtatatattagagaagcacatgatgctgaaagaaggatag

SEQ ID NO: 53472 - DNA, 534 bp, Oryza sativa
  Clone ID: PAT_MRT4530_5566C.1
atgccgacgccgacgacgatcatctgcctcctcgccttcctcgccgtcctcgccgccgccacgggcgacggcacgacgacgacgacgcacctccacttctacatccacgagacgttcgcgggcgacaacgccaccacggcctccctggcgccgtccccgctcgccgtcgccggcagcaactcgtcgttcgggagcgtgggcgccctggacgacgagctccgggagggctcggacgcggcgtcgcggtacctgggccgggtggagggcctcgtcgtgcaggccgacctggggaacccggcggcggcgtggacgctgctgaccctcgccttcgccggcggggactacaacgggagcacgctggtgctggacggccgcgtcgacttcggcgccgccggcgacatggagcgcgccgtggtgggcggcacggggaggttccggcgggcgagggggtacagcctcatgaccaagttcggcaaccccacgcccaacaccggcgtcttcgagatggacgtctacgtcaccaccatggcctag

SEQ ID NO: 53473 - DNA, 697 bp, Oryza sativa
  Clone ID: PAT_MRT4530_55670C.1
gcttggaaaatctaacggtagccgtggtcgtggcagcggtggtgctgtgggtggcggcgaggagtgcgtcgccggtggtggtgatcgccgtggtggtctacaaggtgaggtccagtctcctcgtgttgccaccaccgcctccgccggcgaggccctaggaggagcccagcgaggaggtcctgccgcctccggagccggtgcaggtgggggagatcatggcggaggagttgttgcagtacgacaggtccaaccctgagaagccgctactcatggcgatcaaggggcggatttatgacgtcttccagagcaggtcgcttccgttaacaatgcttctgttactctcattagtcattacaatgctttttctgttactctggccctgtttagtttccaaaacaaaaatttttacgctgttacatcaaatggtttggacacatgcatggagtattaaatacaaaaaaaaaacaaattacatagattgtgtgtaaattgcgagacgaatcttttaagcctaattacaccatgatttgacaatatggtactacagtacatatttgctaatgatggattaattaggcttaataaattcgtctcgcagtttcttggcagaacttataatttgttttattattagactacgtttaatactttaaatatcaaatatgtgtctgtatatccgatgtggtaaccaaaccta

SEQ ID NO: 53474 - DNA, 644 bp, Oryza sativa
  Clone ID: PAT_MRT4530_55671C.1
taagaaaaaaaaaaaaaaaaaaggggaagaaggggggggaaaaaaaaaacaaaaaaaaaggagggggagacataacataagcgtgcaatgcagacggggtgggcgcttgtttagtgggggggtttttttttgggggttggcgcggttgtttttcgctggcgtggggtggtttcggccttttctttttcctgggggggggggggggggccttcccctccctcttttcccccggtgtgcccggtggcttttggggggggttccgctctgtcgtgcccttcgggggcgctgccctgtttggcggggtggggcctcgcccggtggggggcgcttctctttgcggcgggttgtgtgtggttcggcgcgctgttggcgcgtgcgggttggcggcgcggtgggggcccgttcctccccgctggtcttgccttttttcctggcctgggtcgccggctttgcccggggcgctgggtcccgcgggttggctttttggcgcggcttttttggctgggcggggcgtggttcccgtcgctgctttttcggcggggggggggcccttttgggggggcctttccccccttttgggggttctccgccccttggccgtgggtggggggtgtgggttctgggtggcgggttcgtttcttttt

SEQ ID NO: 53475 - DNA, 373 bp, Oryza sativa
  Clone ID: PAT_MRT4530_55672C.1
ttgttttgcggctccgtggtggcatgcagatctttgccaagacactgaccgggaggaccatcaccctgaaggtggaatgttgtgacaccatcatcaacgtcaaggtcaagatccaggtcaaggaggtcattaactacagaccagcagaagcattatctttgccgccaggcagcttaggggactgtaggacccttgctgactacaacatccaggacgagtgaaccgcttaccttgtgctacgaatcacgggaggtatgcaaatgttggagaagactctgaccatgaagaccatcaccctagaggtggagtcttctgataccatcgacaatgtcaaggccaagatccaggacaaggagggaattccgccggacca

SEQ ID NO: 53476 - DNA, 336 bp, Oryza sativa
  Clone ID: PAT_MRT4530_55673C.1
atggcgatgtggctatggggatgcggcgttgctctggccagcgcaaggcagtggcggtggtgcgagcaggtcgctagcgccgacgtggtgacggctgcgaccgagctgatggacggtggcacaatgaggagggcacgcaccaaggaactcgccgtgagggcgagggcgacgactgtcatgtggatccagggcggcatcgccggagctacgccagtcggaattggtgtggtgccgtcgccgccgttccctgtcatcgtcgtccgcgttgcctggggagtggggtgtcgaggaggagttccggaggccatgtcgagctccgacccgatgctgcgctag

SEQ ID NO: 53477 - DNA, 861 bp, Oryza sativa
  Clone ID: PAT_MRT4530_55674C.1
atggcgctagtgcaggtgggtatggggttgggccgcgtcgtcctcctcgtcggcgccggcatggccggctcggtcgtcatccgcgacggccgcttcgccgacttcgtcgcggggctccaggaggctctgcgcgacaacgacggcggcggaagcggcagcggcggcggcgtcatcgatcaaatcgaagaagccgtcaagaaggcgactatggaggttaatcagatgataagtcaaccagttactgtcattactgtagatcctgcagttgtgacaacgttgatagcacctgctgcagctgctggggcgttgacctatggttacatgcgctggaaaggcatatctattgctagtctgatgtatgtcaccaagcaaaatatggctaatgctgttgcaagcatgaccaagcatttggaacaagtgcagagctctcttgcagctgctaaaaggcacttaacccagcgcattcaacatttggatgataagttggatcagcagaaacagatttccgggcaaataaaagaggaggttactggtgcacgattgaaactccaggatattggttccgaaatgcaaaagatcaaacaagtggctcatggcctgggtggaaagttggattcaattgaagcaaaacagaactattcattggccggtgtgatgtacctcgtcgaattcatagagcaaaacggtgggaggttgcctcgtagcgtggaacacttgcaacgaactgccaggctctctggaattactggagaccaaaagcagctgcaggggctcggtcagttgctggcgatcgagtcggcgactcctgtaggaagtggacttcactgtacctcggcacggttattcaaggcagtggcatga

SEQ ID NO: 53478 - DNA, 379 bp, Oryza sativa
  Clone ID: PAT_MRT4530_55675C.1
cccacgcgtccggccacgcgtacgaagaagtactcgcgcaaagaccgagagagcttggtgagctgcatagatggccccatacgagatggcgtttgtatgctcaccactgtgcctcccttccaggggcttaagtgcaccggcgacatgcccgatgcccgacgatccgtcgactgcagcttgcgcatcctcagcagtggcggcaggatcaggtgcatgcatgtgtgtccaattgagggcattaagaagttcgatgaccatgtactacctgacaccgttcaccgtggaggacctactgaagcagatcgagtgcctgctacgttgcaagtgggtgccttgcctcgcgttcagcatggtatgattcttctaccgtgagaaccac

SEQ ID NO: 53479 - DNA, 162 bp, Oryza sativa
  Clone ID: PAT_MRT4530_55676C.1
atgtcggtgacgttcttccccagcagtgagccgacggccgagctccacgaacaagcagctacggacggcggcggcagcgcctcctccggcgaggtagcgggattggcggatccgggtaaggccttgttcgatttgaatggaattgaaaaggattggagatga

SEQ ID NO: 53480 - DNA, 214 bp, Oryza sativa
  unsure (1)..(214): unsure at all n locations
  Clone ID: PAT_MRT4530_55677C.1
ttcccgcangactcgtgcngantgatcnntcaagcnacnatactaggnacatggcccgtgcacatttggtgttggtcgccgtngtggnanctctgctcctcgccgccccgcacgccgccgtggccatcacctgcggccaggtcaactccgccgttgggccctgcctcanctacgcccgcngcggcgccggcccntcngntgcctctaaagggtt

SEQ ID NO: 53481 - DNA, 423 bp, Oryza sativa
  Clone ID: PAT_MRT4530_55678C.1
atggagagaattgatgggatggagcagctagcgtccggagccgggaagctttttgtggatcagacgacggttcagatattcagagatcacatcacatcttcgtcgacactgcctagctatccccgttctaaatatttgacaaaacttttggatcgttgtggacttttcttcgttcaactcaacggcggtctcttcgtggcagctgctatacctaacgtacgtgctcggctacgccttggccctttggatatagcttacaggattatcttaatacccgtgcgttgcaacaggcagtttcacccgaagggaacacttcttcaacagataaaggttctctttacctgctgcatgcaaggtggactacgagaacttactgaagagcatctctcctatagggtccttagcgtagaatttaaactcaca

SEQ ID NO: 53482 - DNA, 1045 bp, Oryza sativa
  Clone ID: PAT_MRT4530_55679C.1
aatgacactgcttgtttgtttttaagcagcttttcggctgttggaaatttggtcataattcggcatattttaatccaaaatattaagacaataaacatgacatacacaatgagaagcgatctagtgataaggctaaacataaacatgagcatgcttaaggtaaaataagcatagatattaaggagaaaatcaaataaagttagaatcttgtacccagagaatggtgcagaagatgttgaggtattcgtattgcctccattgatgttgtctcctccgttctctccagcagaagccatggtgaagcagaagtagaggaagatgcaacgttgtcgtcgaagaacgaagaacaggagcagtcgcgcttgaaacgctacccaaacttgatcgcacgcctacccgtgcaagttctcaagcggacagagttccggaggcacctgctcatcccgtacacatgtgtgcgcaggtcgccgacaggtggggcccacctgttgggcccgtctcccacctccggccgtcgccgccgtatcccgcagccgccgtccccctcgctctcgcgcctctcgggccacgttgcccacgtcaccaccttcctccgcaatccccgcacccactccctctctttcccgcccgcgtccgcgctcgagacgcccgggattcgaaaattcgaatcccgcctctctctcctccccacctctccgcacttcgccggcgaaatcgcggccatcccggccacgatcgacccccgcgggtctatataaagcgtccccgcctcctcctctctctttttcgttttgcaaccacccgctcccgtgccctccaccaccctagcgccgtcgccctcctctccgctgccgccgccatcgctccggccgccgctagttgccgtgccgagccgtgccattgacgccgtcgcgttcaccgtcgtgcggaccgtcccgtccactcctcctccgtcggaatccaccgccggaacccactccgcatcgtgcgccggtgagcaccgccatggctgccgccttcggccagcgtccttgccctcttccat

SEQ ID NO: 53483 - DNA, 113 bp, Oryza sativa
  unsure (1)..(113): unsure at all n locations
  Clone ID: PAT_MRT4530_5567C.1
tatacacatcgttaacatacntactttctcattgctcatctactatcaattttctgagctaggcgtataattccgaaacgtgctaactttcatttactactcttacctttcat

SEQ ID NO: 53484 - DNA, 471 bp, Oryza sativa
  Clone ID: PAT_MRT4530_55680C.1
atggaacacgtccctctgctgggggacgcgtttctctccgcgccttgccagcttttcgtggggagtcgctgcgttgggggcttggggcgctcgtggacacggctactgcacctgcgatttccccttctaccctcgacctcatcgctgggaggaggccgacggcggtggggaggaacccgaggcggctgcgagagagagaaagaggcgacggtgacggcgatgaccgcgccgctgtcgccaccgcttgaggcgcccgtgctcgccaccgaggaccatgaggacgacgtcgtggtggtggtcgccgccgtcgcgacctcctccgccttggcctcctccgcgcgatggcgagagagagtggagaaagcggcggcggcggtggcggctggggagggtgatgagggagatggcgccggcgctcgcgggagggagagggaggggaaggacggcgacggcgccgagcggagggagtga

SEQ ID NO: 53485 - DNA, 568 bp, Oryza sativa
  Clone ID: PAT_MRT4530_55681C.1
acattcaaatgtaagcaaatttctcaacagaaaaagggcagtagtatttgacctgttggaaatttggtcataattcggtatattttaatccaaaatattaagacaataaacatgacatacacaatgagaagcaatctagtgataaggctaaacataaatatgagcatgcttaaggtaaaataagtatagacatcaagaagaaaatcaaataaagttagaatcttatacccagagaatggtgcagaagatgttgaggcattcgtattgcctccgttgatgttgtctcctctgttctctccagtagaagccatggtgaagcagaagtagaggaagatgcaacgttgtcgtcgaagaacaaagaacaggagcagccacacttgaagcgctacccaaaaacttgatcgcccgtctacccgtgcaagttctcaagcgaacggagttccagaggcacctgctcgtcccgtacacctgtgcacgcaggtgaacagaaccggggaaggattctgcagctcaggaacataggaggaggaactcgaagtgcaagagtcaggaagaacttcgtcaatcc

SEQ ID NO: 53486 - DNA, 434 bp, Oryza sativa
  Clone ID: PAT_MRT4530_55682C.1
atgcgtgcacgattcccgccgatccggcatcggcagcgcgagtatggatcactggcggaggtgcttgaggcggcagcggcgtcacgttgtcggaggagagcggcgaggcgtggtgatggcattccggtggcagagagggcgcgggcggattcccgccgatccagcgtcagcattttgaatgaaatcggtgaggggcagggaatccgatccggcgatggagtgggagggagggggagcgatggaggttcggcgatgcgaggcgatggcggcaacgtctggtgtgcggcgatgcgatgcggcgatggtggtgtctggtgtgcgagagagattaggggagggggagcgtgcgggtccaagcttgcctcgacagttgactctattgaaattagcaatgaaaaatttggggggaagtacctgagctccagggctctcct

SEQ ID NO: 53487 - DNA, 457 bp, Oryza sativa
  Clone ID: PAT_MRT4530_55683C.1
gggaacccaaatttgtgcggaaggaatacttgcctataaagcaggccttggtgctaccttagacaagtccttgctaaaagtgcaagcgcaacacacgaagcaccaatgggctggagtttttccacgcccaaggacatgcttttgtacataatgctacacagagaacggctacaggggccactaccatgcactgcacatccacacaccagggaccagagctgggcggatactaaacacttgagagctgctccaaaggctgcgatgttgttgggccttgcataggtgacacctggctaggtcgacacaaccataatggacaccttcttgcctgcctgcgacaaacccttaccatacaatacactcaacctgcttgagttatcaaacttcataaagtgcttgcacaagatgcatgtcccgtccaccataatcatggtacatttaactaacccagcttgaa

SEQ ID NO: 53488 - DNA, 396 bp, Oryza sativa
  Clone ID: PAT_MRT4530_55684C.1
ctactcctaggtgcggggaaaggctcgtcttttcaagcgagcgatcctagcgcgaggcgcgtactacgtacgtacattacgtgtcgacctgctggtcgatcgatcgatgctgccccgtgctgtactacacgtgacgtcccgcgcgcgtatggttatgaacgaccgtctccggcaatggaacataccctctccttaaaaaaatcagcaaagtactactatggaaaacgattttttatggcgtatgtcaccctaaaattttcgctgacggccgtatgcgaaaccgtcggaaacaacgtaaagagggtgtggggctacggaccgccagcaaaaactgatctagcaaagatgctgcagtttttgctagcggcgcactttaagacaccgctagcgaagatt

SEQ ID NO: 53489 - DNA, 338 bp, Oryza sativa
  Clone ID: PAT_MRT4530_55685C.1
tattttttttttttttttgaccaactaaaaacaagaactcaatgatcctatgcttcatggatctgcattataaaggacacatgctttcgaagttccgagtacttttgtgcagcacaatacaatgtcactgcggttccttattaggggtaaaaggagaaaaggaagacaaaaaaacatcgctcatcagaagatgtcacccctgcttgtaatcacgtcctggctacagaacgggcatatagaaaccagaatccaaaaatttaacttgtacagaacttaacaatgaagagatcttatgaagccgactccttggcgatcttctcagctttagcaatgaccga

SEQ ID NO: 53490 - DNA, 308 bp, Oryza sativa
  Clone ID: PAT_MRT4530_55686C.1
ggactatcaaattccaactttattagcatatcacttttgcaggggcagatgcaaagaaagcatcatatacgattatttgaagtgggaagatataagcaaaccacccccatgaattacactcattatgctggagtaatcactgatcacgctttgtttagataagaaaaggcttgggctatatcacaagggatttagataaaaggcaggggatcacactcacctgtatccactttatttaaggccctaattgcaaactgattatttgggtagggccttagttaacagctgcctttacaatcctattgaaa

SEQ ID NO: 53491 - DNA, 1569 bp, Oryza sativa
  Clone ID: PAT_MRT4530_55687C.1
atggcgatctcactgatcacctccctgctcttctccctaccccaacaatggcagcccgtcgtcctcacagggctccttcctgtcatcgtttccctcgtgctgctggcgaggaaagggcgcctcaagatgccaccgggcccggagcaggttcccctcctgggaaacctgcaccagctagctggcccgcagccgcaccgggccctgcgggacctggcccgggtccacggcccggtgatgcggctgcggctcgggaaggcgtcggccgtggtgttgacttcggcggaggcggcgtgggaggcgctcaggggccacgacctcgactgctgcacgcggcccgtgtccgcggggacgaggcgggtgacgtacggcatgaagaacgtggccttcgcgccctacggcgcgtactggcgcgaggtgcgcaagcttctcatggtcgagctgctcagcgcgcgccgcgttaaggctgcatggtacgcacgtcatgagcaggtggagaaactcttaagcactctacgccgcgcggagggaaagccggtggcgttggacgagcacatcctgagcctctccgacgggatcatcggcacggtggcgttcggcaacatctacggcagcgacaagttctcccagaacaagaacttccagcacgcgctcgacgacgtcatggagatgctctccggcgaagggtcctccgccgaggacctccagctccccgccgccgtcggccgcctcgtcgaccgcctcaccggcttcgccgcccgccgcgagcggatcttccggcagctcgactccttcttcgagatggtgatcgagcagcacctggaccctaaccgcgcgccgccggagaacggcggcgacctcgtcgacgtcctcatcggccactggaagaagaacgagcctcgtggcacattcagcttcaccaaggacaacgtcaaggccataatcttttcgactttcgttgctggtattgacacgaacgcagcgacgatattgtgggcaatgtcggagctggcccggaagccgcgggtgctgaagaaggtgcaggcggagatcagggctgcggtgggtgtaaacgggagggtgcaacctgatgacattacgaagctcagctaccttaggaaggtcgtgaaggagaccctgcggctgcacccgcctaccccgctgctactaccaagagagaccatgcggcacatccagatcagcgggtacgatgtgccggccaagacgcggatctacgtcaatgcatgggcgatcggtagagatccggcgagctggcccgatgagccggaggagttcaaccccgagaggttcgaggcaaacgagatagacttcaagggggaacatcctgagctgatgccatttggcactgggcggcggatatgcccaggcatggccatggccatggccaatgttgaatttacgctcgccaatctgctcttcgccttccagtggtcactcccggaggggacgacgccggacaatgtgtgcctggaggaagaagggaggcttgtctgtcaccgcaagacacctctcgtgcttgtgcccaccgtataccgtcacggccttgaatag

SEQ ID NO: 53492 - DNA, 193 bp, Oryza sativa
  Clone ID: PAT_MRT4530_55688C.1
acccacccgtccgacggtcgtgtctctgggaaacacttcgatgctttggcgagactgcctgagcttgttcctgaaacagcttgccttcttactttccacaaagatggtaatgccatttcagaaacggagatcagccctcacgtacttcagagaaatgacgtcattaggattgtccatggggaaaaagagcctg

SEQ ID NO: 53493 - DNA, 495 bp, Oryza sativa
  Clone ID: PAT_MRT4530_55689C.1
atggcagttaaggaccggatggttgagcataaagggtttagtgctttgatgaaatggatgaacaataactatgaattcattggcaagaagtccataaataatgaaagaatgaaattttatggatctgaaaaggaccaactcataaaacgtcttagggaggctgagtccataaggttaactatagatatgtggacatccaatcaaaaccgtcagcatatgtttttggtggctcattacataaatgctgtttgggttctgcaatatcgtgtcctaaactttgttgaggtggatcctcctcacaccaatattgtgatagcccatgctatttttgattggttggttaaatggaaaatagaagataaggaagatggagatgttgacattgaaacaatggagttccctaattatgtagtggcaagcaactatggtttcgatggtgtggctcatgagccaaacgtgctatctcaagctttcaaacgagttgagccaagctag

SEQ ID NO: 53494 - DNA, 384 bp, Oryza sativa
  Clone ID: PAT_MRT4530_5568C.1
gaagagaggcaaacccgctcggtctaaatcgcgagccgccttcttcttcgatcccctctccctccgatctccccctcccccgcagatctaatggaggagctggcgcctaagctgacacagatgcatgaccaaggagtgccacgcggcaaggttcgcggcgaaaccagggtgcgcgaaccacagggcaatcatggagaccaaccagaagtacgtgcaaccacccgtccaccatctagaggagccaggtagctctcaaagaagctcttctacacccgcctcgccagccttcctggtcgctaagaggtataccggaaggaagcgtcatcaagtgaagaacttgcggagaaacataaaggatctgcacctcaagtatgatgccgatgc

SEQ ID NO: 53495 - DNA, 1663 bp, Oryza sativa
  Clone ID: PAT_MRT4530_55690C.1
atgctcctccgctccctcctccgccgcgccgccgtcgccgccaccgccacggcggccggcggcggcgttggtgtgggcgcccgcgccacgacgggccgagccgatccgcccgcggcgctggcgtccctcctcgtcgcgtccaggtcgtacgcgaaggccaagggcggggggaagccggcgggggccacgtcgaaccgcggcaaggtccgcgccaaggacccccgcggcgtggcgtccgaggagggcgcggcgggggagttcgagggcggcggcggcggagcgggaggcggcgacgaccttgatgtggagttcgagctgcccactgacccgctgcccccgacctacgacaccgcgctcgacgtcgggcccggcggccgcccactcttcgccttcaccgacaccttcgcgtccttctcccgccgcgatgccaacgcctacgtcgatttcaccttggatgaatggaaagctatgttaccagagggattgccagccggcatggatgaaggagtttcaggagacaagacggtgtgctgtgatggtgagagagagcttcctagtcctccgggataacttccgaaccattgttgatccagctattgctgccaaccgaaaagatgccacaagacaaattgtattagatggtccccggagctgcggtaaaagcattgcacttgcaatgcttgtccactgggcacgtactgaaggatggctagtattttatgttccacaagggaaggattggtcacatggaggattcttctatagaaacacctacaatgatctctttgatactccaatacaggctgcaaagatcttacaggatttcttgaagtacaatgaaaaccgcttgcagcagttaccatgtcaaatatttgagcctattcccttgggggaaggtgctggtgttggaatgatgaagggggctgacacagtggaaatgcctgaaggttcgacactgtatgatctcattcaaactgggataacacattcgcatgcttcagttggtgttgtagttcgtttaaggaaggaattgtcacttgtgaaagatgttcccgtattatttgcaattgatcaggtcaatgtttataggccaatgctacacaatgatatgatggtaggagcattttcacattcaactgcagttggaaaattacgacaggacctcccagatgttccatcagatgctcgtgtgatgtttccacggtacactgtaaatgaagctgagactgtctgccactattatatgaggcaaaagatcatcaagcgcgaaaatttttcagaagagaagtggaaaaagatttattatttgtcaaatggaaatggctcagagatgagatggcttgctgcctttatctgagttctgaggtagggaactctcgacattacttactcaggaatgatctgcaatcacataacttggtgcatcagcttttggatgagatttgcccttcatttgaaatcccttgcaagtaattccctcttcttgtttgcacctttccgtgcagtttctcatacccggattgcttctgccaaagaaaaaaaaccaattgagttcaagcaggctgtgcaggttttaaactgaagccatccattgttgtatacttgcagtacacatcttgtaaaactcgtaggagcaaggtgctacctaatgacggttctatga

SEQ ID NO: 53496 - DNA, 277 bp, Oryza sativa
  Clone ID: PAT_MRT4530_55691C.1
acgcccacgcgttcgcgctgatgctgatgcggacattgctgaaggataagtagcaggatccaccgctgaggggcccgctgtaggaggaggaaatcgcgcgcatggaagtcgccgtctaccagctgcacgcgtaaaggtgcaaggagaagagggagaacatccacacgtacttccgcaagggcaaggaaagcggcaagaatcggacggagcacgccaagacgtgccgctactgtgacgagctcaaccgcctctacttccgatacgtctactgcagctg

SEQ ID NO: 53497 - DNA, 1356 bp, Oryza sativa
  Clone ID: PAT_MRT4530_55692C.1
atggcaaaaactctggatcgtttaaaaccaaagaagaaacaaggctctgataccacttgtaggatcaaaacacaagaactaagccaaccagaggaggggtcaatggttgctatgcccaaaaacccaaacttattgcggaataaaaagttaccctcaaattcgacgaagatcggtctgaccgagattgacctggcgctagatgattttctgaacttggtagctactcctacagtacctgccactctatcaccatctcctgatggcctcaagggtggccctgcgagcaacaacggtttgaatacaaccatggggacgcagcaggcttcttcttcttcttcttctgctgctgctgctgctggagaagagcgtgcttgtgtcatcctgtacaaccctgttcaaagcccgtcgataccagggctggcaaggttaatggtttctcgtctgattggtctggctaaaaccgaggatgacaactctggttgcggctcgagcctgaagcagctcctgagaaaggagaactaccttcatgagacggccttgcaggatgcagtgcgcagtggaaataaggaaattatcaccgagatacttgaatttgatccagaattggccagctcaccgatggatggaacaggaacttcaccgatgtacatagctgtcttgcttggccgtgtcgacatcgcaaagttattgcatgaaatgagtaaagggaataatccttcgtactctggcccagaaggacagaatgcattacacgcagcggctctacaaggcaaagatagcaagcttgcagtcgcctatttgattaaggagcgacctgagatcgctggtttccgtgattctaagggaaggactttccttcatgttgctgttgaaaggaagaagtcagatatagttgcgcatgcttccagtattccatctttggcctggattttgaatttgcaagacaatgatggcagcacagctatgcatgtagtagtgcagcttgcgcatatcaaaagtttttgttctctattgaggaacacggaagtaaagttaaacataccaaacaataaggggcagagtcctttggatgtatcgcagagtaatattccaagagggactttctatgactcgaaaaataaccctgaactacagattgcgagggcactaatagcatgcaatgcaagtactggtcgtcggatggatctctttctggaacaacgacaaaagcaatcagatgaaaagacggaatcagagaaaatgacatattcaacacaaactctgggcgttgggtcggtgctgattgttactgtcacacttggtgcaatcttcgccatacctggaggttataaaggtgacgattgttacataagttag

SEQ ID NO: 53498 - DNA, 1056 bp, Oryza sativa
  unsure (1)..(1056): unsure at all n locations
  Clone ID: PAT_MRT4530_55693C.1
caggctgcaaagatcttacaggatttcttgaagtacaatgaaaaccgcttgcagcagttaccatgtcaaatatttgagcctattcccttgggggaaggtgctggtgttggaatgatgaagggggctgacacagtggaaatgcctgaaggttcgacactgtatgatctcattcaaactgggataacacattcgcatgcttcagttggtgttgtagttcgtttaaggaaggaattgtcacttgtgaaagatgttcccgtattatttgcaattgatcagtataatagttggtttacattcagtgagttccaggaaccggtgactgttagatcatgtcggccaattcatgcaaaagagcttacaatggtcaatgtttataggccaatgctacacaatgatatgatggtaggagcattttcacattcaactgcagttggaaaattacgacaggacctcccagatgttccatcagatgctcgtgtgatgttcccacggtacactgtaaatgaagctggaagactgtctgccctctattatatgaggcaaaagattcatcaagcgcgaaaatttttcagaagaaaagtggaaaagatttattatttgtcaaaatggaaaagggtcaagagatgagatggcttgctccctttatctaagttctgagtttctcaaacccgggantgcttctgccaaagaaaaaaaaaccaattgagttcaagcaggctgtgcaggttttaaactgaagccatccattgttgtatacttgcagtacacatcttgtaaaactcgtaggagcaaggtgctacctaatgacggttttatgatttttttatttctaccccagtaatttgaagtgcgagcaattttggcagcagcataaaaatttcacccatgtgcctgacgacgacgttgatgtgtactgagtaggaatgtagtaggattcactcaacaagccagaactcaagtttgtgacgcagttctgcccatttatatttgatgaattttgaggtgcgttgcttagtgacgcaggatacaataagaactggctgctcttaactttct

SEQ ID NO: 53499 - DNA, 231 bp, Oryza sativa
  Clone ID: PAT_MRT4530_55694C.1
gcacgaggatgtgatgcaaatgttggtgttgatcaatctcggccagttagtggttatgtttgttgctatgtgtgtgatgtttctgaagtagatggctgcatgtaaaccaaatgaaaaatgttagtgtgcagccatttcagaacaatgaatggattgtggctgcatgtatgcttgtaaaccaccttaatggtttgaaattattggtgaattttggcatgactttgccctgtt

SEQ ID NO: 53500 - DNA, 668 bp, Oryza sativa
  Clone ID: PAT_MRT4530_55695C.1
ggaaaaggcatttcaaatttggtaaaaatccagaaaattcacaaataatttgaaaaattcaacattcagctaatacaaaatatgaaaaattacaaaaattgaaccttggatgattggaatattttacataggcatacattaaaatgacagataaagcaagctaaaacattagtgtgatgtcttttcaacaactaatgtgcaatcattaacagttggcacacaaatagacacacatgtaagcaaaggttaagtggaaaagatataatccttggaattttcaaataatcatctcggtgcaactggtcttaatctttactcttgtcacttgttgatccccaaaacttggatctgcgcctcaacgcctcctccgccggtgcgtcgcgccaccttggatctccccccggtcctccgccggtgctgtgcgcccgtgctgccgaggcgccgctgcgtcaccgccgcgtttctgtgcctgcgatgcgagagatgagaccgaacggaggcgaaaaccctagaggaggagaacgggaaccctaggaggatgagaggaggggaaagaggagaagggcttatccttctcgccggaggaagagtcccggtggtggcgcgtctcaccggaggaggaggcacggcggcgcccgctcttgtcgctgcttttgcgcctcgtgccg

SEQ ID NO: 53501 - DNA, 697 bp, Oryza sativa
  unsure (1)..(697): unsure at all n locations
  Clone ID: PAT_MRT4530_55696C.1
cccgggctgcaggaatcggcacgaggggtatatagaagatcttctatgatcttatgancttgacatctctgactcgtacacgttgattcggaaggcctagatgggtcgcgactgtttacgaatatttttattgatggtgaacacctcagtatttttagcgtgtcaaatttcacaagcaactgtttttatgggatcaaataatgttgccgctaaaacactgttttttactaatgtaataattgattcattatttgcacaaaatgaatatggcctctgctgtaatttcctgagaaagttcagtttttgtgatatacttggaaatcccttgattgtgtctcttgtcaagtttttcacttaattttggttcttgccaaatgttttgtgcgtgttcattgtacgtattctggtacatattatgggcaatactgattgaaaggaacagctaggagaatcctcacattgtgtgtccatatgtgaaagtgctattcatcgatgagcagtgagcacaaatgctgtgatagatcacactagaagggtgtttgctgtccacctctcaagaatcttgtattttgttctgctgtacttgttgggttagtttgcgcttcattttcattggtagtattcgcttttcattgagtagcttccactgaatgcatgatacctagcatctgctcgtttacactcttgtatttgaagg

SEQ ID NO: 53502 - DNA, 148 bp, Oryza sativa
  Clone ID: PAT_MRT4530_55697C.1
ggagtgtataaaagaataaatactgttgcggtttctgacattaggttcgtattaactcgatcttctttttattatgaacacttgcgagcaagctggatgagagaaatatggccttcctctgcagctctgctggatgccgtttcttggt

SEQ ID NO: 53503 - DNA, 210 bp, Oryza sativa
  Clone ID: PAT_MRT4530_55698C.1
aaaaaaatagtatagtttgttggacaaaccaatactgattcatcatgcaaaagtcggaaactgcatacataccgtgaatgggttatgcgtgcatataactatacaaaaatttccgcgcccaactggcaaaggctccctggaacttattggtctcgcacttgtgcctatatactgaaactactttttttggtcccaagtacagggttctct

SEQ ID NO: 53504 - DNA, 930 bp, Oryza sativa
  Clone ID: PAT_MRT4530_55699C.1
atggtacctcctcaaggaccgtaaaattgctctattatcagaagtgctgaatctgactttttttgtgcaagtagtttaaccttttgaaataactaaaggtattctcaagaagatttttctggcaatgtgatgaacataaaaagaagtatagggtagcaaaatggagtattctatgtaagcctaaggaatatggagggttggggattcaaaacttagacattcaaaataagtgcctattaagcaaatggctctataaattgtttaacgagggaagcatgtggcaaaatctgttcaaaaggaagtacttagccaattgaacaatcactcaagtggaaaagcggtctggggatttacattttagggccgggcttatgatggttaagaaagattttttgcaactaggatctatggtagttggacacggagaacaagtgagattttgggaggatcgctgggtgggtgactaactcctttgataagttatatccctccctctatttactaacaataaacaagcatgcgagagtaagcgatgtactgggcaatgttcctctaaatgtgccctttagtagagctttggtgggggataacctgaatgcgtgatacaagctggtatgctaaatggtcttgtttaacttatctaatagtccagatatttttagatgggaagccaatgggaagagagtcttcccggtgagttctatgtacaaggctcttatgtaccataatgtggtaccaagaaagtcgataatctggaaacttagaattccacttaggattaagattttcctttggtatatcaaaggagtagtcttaacaaaagacaatttggttaaaaggagacgaaaaggtaagtgttgcttctgtaactctgaagaatcaattgaacatctgttttttattgtcatgttgcacattcagtttggaata

SEQ ID NO: 53505 - DNA, 249 bp, Oryza sativa
  Clone ID: PAT_MRT4530_5569C.1
gacactataaaaagctagacgtcaacacacgcgcgcaagcgtgtagactctagagcgcgcccgcccttttttttttttttttattttttttttttttttatattatttatcttggggcatatatattttgtaagtttttttatttacaacgcttcatgttttctttcaaaaaaaaagaaaaaagggccctttacagaccgggggggagacccgaaaattctgaaccgggccctataggggaaccaacat

SEQ ID NO: 53506 - DNA, 438 bp, Oryza sativa
  Clone ID: PAT_MRT4530_556C.1
atgctgttgtgcccaccggagctctggagcgtgctttgcgcaccgccgcagcgacatcatcgacattcccacttatctggaccaagccgggccaagctgtcgcgccagcatcttcgcctcatcctcctctccatctcccctcaaggaccccgaaaaatggtgcaccggagagggagatcgcaccccttcttcgtcggcgccgatctgaacccgccgcagtcgtcggcactcgtcaagcgcaccgaagggagcaagggcactggccatcgtagcggtggtgatgccgggacccatcgtagcctccccgcctacgcttggtgctgcctcccggccgcgccccaccgcaccggcactgtcgtcgcctgcccgctatcgatctggccgaacaccactcctccatggtcgcgccatgccatcgaccgccccggccgctggtga

SEQ ID NO: 53507 - DNA, 1221 bp, Oryza sativa
  Clone ID: PAT_MRT4530_55700C.1
atggccgggaggaaggagaccgtgataaaaatggcgaaggagctctccgtgctctgcgacgtccccgtcgcgctcgtctgcgccgtcggcggcgcggtggaggtgtgggagtcggaggagggcgtcctcgaccggtaccgcgccctcccgcccgaggtccgcgccacgcgcgcgcacacgcaccggggctacctcgagcgggagctccgcgcgaggagagccaagctggccaaggtccgggaggaaggcgcgttcaagtcgtgggggcgcgacgcgctcagcggcatcatcacggcggaggaggcgccggcgctgctcgagtccatcgacgctgcgatcgccgccgcgaccgcgaggcaggaggcgcttgctctactggacggcggcgggctccatctgcagcacgtcccggcgagcgcttccgacgccgtcgcgcctgtcgtcggcggccacggcgtccaggtccagtacatcggcggcagcggcggcggcggcgggagccagcaggagatgacgccggcagccgacggagatggcgcccgcaacgccgaccagtacgacgacatcctcccgtgggatggcaacaccttcgaggcgcacaacgcccacgtgatgctgcccgcgtgcggcttccaatgcaccggcgactaccgcgtggacatggacggctacgtgtggggagccccggatgatgccaacgcctaccatggctggcccgatgaggcaatgtggtgcaccgacgagtcgtgctcgtgcaacgccgccaccgccaccgccgtgccagccatgtatcatccccccaccctggacaccgtccacgggagcttcctcgccgcgccagctcaaccactcgccttcagcaccggcgccgacttcatcaacgcgccgaacgactttctcaccgtgggcgtcggcggcagcttcatcaacgtcggcgactactcggcgcagagcttggccgacgagttccaccacctcagcgacgccaccaaccagctcgatcagacgcactacccaccattcggtggaacgggcggcgccgagcccggcgacacgcagtcccatagctggggggactactacttggcgcagagctccgccaatgagtgccagctgctcggcgtcgacggcggcgacatccatctcgatcagacgcattgcctcggtggtgcgggcggcgccgagcccggcgacacgaagtcccacaattggggtggctga

SEQ ID NO: 53508 - DNA, 1377 bp, Oryza sativa
  Clone ID: PAT_MRT4530_55701C.1
ccggccgggacgcgccctctgaccccgatagaaagggaggaaaaaaaaaagagaaggcgaaaccccaaatccgccgcgatggccgccgccgccctcctccgccgctcgccggcggcgcgcgccctcctctccccggcgctctcctcccgcctcgtcgcctccaagccccactcgtcgtcccccgcgccgccgccgccgccgtcgaaggcgggggcgaacaccaagacgttctcgatctacaggtgggatcccgactcgccgtcgacgaagccccacctcaaggactacaaggtggacctctccgactgcgggccgatggtgctcgacgtgctgctcaagatcaagaacgagcaggacccgtcgctcaccttccgccgcagctgccgcgaggggatctgcgggagctgcgcgatgaacatcgacggcgacaatggcctcgcctgcctcaccaagatctcgtcggcgtcctcggcctccacgatctcgccgctcccccacatgttcgtcatcaaggacctcgtcgtcgacatgaccaacttctacaaccagtacaagagcgtggagccgtggctcaagcgcaaggacgcgccgccgcagcccgggaaggagatcccgcagaccaaggccgaccgcgccaagctcgacggcatgtacgagtgcatcctctgcgcctgctgctccacctcctgcccctcctactggtggaaccccgaggagtacctcggccccgccgcgctcctccacgccaacaggtggatacaggacagccgtgaccagttcactaaggagcgcctggattccatcaacgacgagttcaagctgtaccgctgccacaccatcaagaactgcacacacgcctgccccaagggcctcaacccagcgaagcacatcgacacaatcaagaagctccagctcgaggcctgagtgagcagtatatctctcttcatgagatgaaactctgtcgaaaaattgtaatcagccagcctcttgtttctctgcctttttagtccatcgcctgacgaataattgctggaacgcaggattcccttctgggcctccgatctgatgacttccatttccatcagatggagggagcattgtagggagtgaataatttgctaccgtattttacgttttgttctgtatctaattcggtttgttgttcaccgtccattccattatgtcgtgcggtttatgcatgaagtaattcatggattttacctttgttttaatgaaaaaaaaaataacaatcataattttaacccggccatcctgagcactctttcaattatttagttgaaccaatgtactgtactgtttttctgcctattgagcatttatgaagttaaaagttttggaccaaaaaaaaaaaaaaaa

SEQ ID NO: 53509 - DNA, 420 bp, Oryza sativa
  Clone ID: PAT_MRT4530_55702C.1
cttttttaacgctacatcattattttgatcataccttggtatgcggcctgaggttaacttcaaatattgttccagaacaccttgattgaggagacacagaggtaactctatctacaattgtccttgatggatcacacacacacacacacaattaaggcacatgcataacatgccatgatatatctgctactgaagggtgggtgccggggtccgacaagagtactcctggtacgttggttggcgcgatggccaccgtgtccttgggcgtactggcctgggactaagttagtgggaggtgcccggcctttgggggcaacggggttgtgggacagcggccaaaaaggttctggatggggccattgccggcctgatggactggaaaagaagcccaaatgcaaaacatggcgaggcggccgcttt

SEQ ID NO: 53510 - DNA, 1233 bp, Oryza sativa
  Clone ID: PAT_MRT4530_55703C.1
gaaaccccaaatccgccgcgatggccgccgccgccctcctccgccgctcgccggcggcgcgcgccctcctctccccggcgctctcctcccgcctcgtcgcctccaagccccactcgtcgtcccccgcgccgccgccgccgccgtcgaaggcgggggcgaacaccaagacgttctcgatctacaggtgggatcccgactcgccgtcgacgaagccccacctcaaggactacaaggtggacctctccgactgcgggccgatggtgctcgacgtgctgctcaagatcaagaacgagcaggacccgtcgctcaccttccgccgcagctgccgcgaggggatctgcgggagctgcgcgatgaacatcgacggcgacaatggcctcgcctgcctcaccaagatctcgtcggcgtcctcggcctccacgatctcgccgctcccccacatgttcgtcatcaaggacctcgtcgtcgacatgaccaacttctacaaccagtacaagagcgtggagccgtggctcaagcgcaaggacgcgccgccgcagcccgggaaggagatcccgcagaccaaggccgaccgcgccaagctcgacggcatgtacgagtgcatcctctgcgcctgctgctccacctcctgcccctcctactggtggaaccccgaggagtacctcggccccgccgcgctcctccacgccaacaggcttccgctgttggggacgctaatcaaaccaaaacccaacatgttcatgcacatccaagctcgaggatatcacggggtatcggagaagagaaacttgctggatcacaaacgtagattgcttgcagcaaaatatgaactgaaaggaaagctttataaggctgtttgtagggaccctgatcttccagcagatatgcaggaccagtttcgctataagctgtccaagttgccaagaaatagctccatgacacgccttagaaaccgctgtatcttcacgggccgctcgcgcgctgtttacaagaaattccgcatgtctcgtattgtgttccggtcattggctaataagggtgaattgttgggtgttaagaaagcgtcttggtagatgctaacaaccagtagatcaaagcactagctctgcagtagtccagcacaataagtttgcctccatgcagtttttcagtgtttgcaacctgaaactatatttcaatcttatgaccagcagccaatctggcactctttcaattaaaaaaaaaaaaaaaaaa

SEQ ID NO: 53511 - DNA, 326 bp, Oryza sativa
  Clone ID: PAT_MRT4530_55704C.1
cttgaagataatccagttaccaatctgagttgtaatgtggtggatgagcatacatgcttgtacgctactcagactgtaaattttggttactttctaagacatcttaatttttaattgcaaagactacacatggttcctagctatgaatgtgtagatcatagtgtatgtatgtaaatgatgttctggcagacccaatgcatacgaaaaactcactataaattacaacttttctactgggaatccgattaccggattgaactatagtgccttggaacgcaaggattgcagactcttgattcgacagggtccacccaagggcaccaaag

SEQ ID NO: 53512 - DNA, 136 bp, Oryza sativa
  Clone ID: PAT_MRT4530_55705C.1
tgggccctatatcaggttcaatcatacacaggggaccgggatgtattgtcccacaacataaccaactggtgatgagtctgcccgacacatgctggctcctgtaccaagacattcagaactgtaactgacatggcct

SEQ ID NO: 53513 - DNA, 2301 bp, Oryza sativa
  Clone ID: PAT_MRT4530_55706C.1
atgtcttctgttcatccgaaccttgtgactacttcgaatcattctacaccatcaagagacgaatcattccactacttcgaacctgatgctacgatggaggcaataaatagattggatgtgcgagataactcagatatttattcaaatgatgatataacttctccagtaatagaggatgacaacaccagtacaccaaaaaaaatatcaagaattccactcaattgctccgtttttacaccagagtgtgatgataagataaggcctgcggtagggatgacatttgaagatattgcctctgttgaaaaattttacaagtcatatgcacaccaagttgggttctcagtgcgtattgggcagcaaaagaagttggatggcgtggttcagtgcaagcactttgtgtgctcaaggcaaggatggaaacatgtgaatgataaggagattgttgatccatcgaagaaaaaaaagattaaattgaaagaaactagatgtggatgtgatgcacacatttacgtgaagctatgttctgataacaagtacacgatagcttccttggttgagcaccatagtcatggacttgtatcgccagataagctgcatttgataagatcaaatcgtgaagttagtgagagggcaaaaactacactcttcacatgcagcagagcaagcataggaacctcccaggcatataggctccttcacgtgagtgatgggggatttcagaatgttggatgcactaagagagacttgcagaattactatcgggacctaagaaagaaaattaagaatgcggatgctcaaatgtttgtggcccagctatgtagaaaaaatgaggtcaattcatcctttttttatgattttgatgtggatgaacatggcagattgaagtatgtgttttgggcagatgctacaagcaggaagaactatagtcactttggcgatatcgtatcatttgattctacgtacaccactaaccagtatgacatgatttttgcaccatttactggggtaaatcatcacttgcaaagtgtgttttatggtgctgcattcttagcaaatgagaagattccagcatatgtttggttgtttaagaccttcctaagagcaatgggagggaaagcccctacactcatcataactgacgaagatgccagcatgaaagcagctattgaaaaagtttttccaaccacggtgcataggttgtgtatgtggcatatcatggaaaaaatgtcagacaagatcggaccactatggagagaagactgcgatttaagggaaatgatgaagtcatgtgtttggagatcagaaactgctactgagttcgaatcacagtggaaatctatcattttggactttcacttggaggacaatgagtggctgtcaaataggtttgacattcgtaaatcatggattccagcatatttcatggacatatctttggctggcattctcaaaacaacttcaaggtcagagagtgcaaattcgtttttcaaccgtttcattcatcgcaagcttgctcttgttgagttttggctcaggtttgtcacatctttagaatgccaacgccaagaggagttgaaggcagataacacaagcatccatacaacatacaaacctgtaactccttgggcaatggagacacaaggtagcattatgttcacgcatgaggtttttgacaaacttcgagaagagattatagccgccagagatctttgttgtgttaaagacattgcacaatgtgatgggttgaaaattgttaccattagtgatggatctcacaagctcagggtagtccgttgcaatacaacgacaatgatagcgaactgttcgtgcaagctatttgagtccgatgggatcccgtgtcatcatattattctagttttgagaggtgaaaatcaaaatgagttaccaactgcatacatcatgaagagatgggagaaaagagtgaaaagggagaatgtgtatgacgaacaaggcaaccttatagaagagaagccaattgactcctcggaggcggcaatgagaaagaaaatatcaattgcacgcaacaaatttgaagatctcatacaaaaggctaagcactcagatgaaggcattgacttcttaacatctagtgtgttcaaccttgaggcacccttggaccaaatggtgtctaatgtcaagcatactagacatgaggagtttgagtcttttcttggttgcacaattcctactgaaattgatatacacccaccaactgatattcattcgagggggagaagcaaaagaattagaagaagcaaggatgacaatactgtggattga

SEQ ID NO: 53514 - DNA, 126 bp, Oryza sativa
  Clone ID: PAT_MRT4530_55707C.1
atggcgacggcgcaggagaaagcggtacgcgagtccccggttggcgcgattcgccgccaaccatctcctgtctatctaccggggcagtgcagtatccccaatctacaggctaatactcgtaagtag

SEQ ID NO: 53515 - DNA, 315 bp, Oryza sativa
  Clone ID: PAT_MRT4530_55708C.1
ctcaggacagcccgagaatagaaccgacgacatacgaggcaaacaccaacaacagtagcagcagtggaaccaatggactaacacccaacaccacaggcgatggctgggaaccaagacgtaaccctaatcttcactttacttcttcttcaacttcagatggggtacactttacccacacaacattactaactcggatcacccagcccgtggagatcagccacgtcgggagaccttaaggctttcatgacaaggcatttcgaaaaccgatacagagtcgccatatgccaacgagaggggtcccaaaccaacaacagg

SEQ ID NO: 53516 - DNA, 2594 bp, Oryza sativa
  Clone ID: PAT_MRT4530_55709C.1
atgactgatgacctcgtgctgcagcagccattcgcgtaccgtgccggcccaagcacggcccagtggtcgtgccgtgccgtgccgcccgtcgtgcccgttgtccaggcccaggcacggctcacgtacgggccgtgccggcccagcccatttacgggccgtgtcggaccgtgctttctatcgtaccgggccatcatgccttgggccggcttgataaagcatggcccaagtcccagctctaagcaagggagaccgaaaactgtgccaattcgttacactgacacttttgcaagtgggacaatagcacttgagaaggaacttgagaaggagtttgaaagagcatttgagcaaagtgatattgcgaacgtaacaaaaacgcttgaagagaagtgggcggaacaagtcaggaaaaggaaactgcgaatccctcaaaggaggaagcggggaaaacaaccacaagtgaagtggaacttgccgaaatggcacaagcacaaggggctgttatgataagcaaagaacaatacgaaggactatagagagagctacaaagactccaggctttgcacagtcaagcaattggagcaagtggatctggtgatcaactggagacataagaggctgatggaaaacaaccaaacttggcagaaaacactcatcaaggagatactttagctggagatcctcaagtcgtgaagttagcagaagagattcctcaagcccaaattatcaaaatacaagttcccacccaacaaatccttcaaatgcaaaaccccacccaacaaatccctcaaatgcaaaaccccacccaaatccaaaatactcaaacataactttccacccaagctcaaatttctcaaaaccgaattcctatccaacatcccaaccaaattcacttttcaactcaaattcatccttctcagattccataccagatataccaaaaccaaacacaaaatcctcaaaaccacacaactcacgctcagatttcccaagcatacacccatataccccagatacaaaacactcaaacacaaataccacaagtacaaatcccacaaatccatatacctcaaatccaaacatctcaagtgaactttccacatacacatgccatacaaaatcaagcaacacaaaactccagtcaacatattcaaaccttttctccttttcttacccaataagatgcgacaaatgaacaagtctacattccacaaatgcccaaccacatgcaatacacagggacattaccaaaccaaacattcccattccaaacaactcaatcctattttcaaccatcaaagcggtggacaccaaagccctctgatcaaaatctgcaaatggcgccttggccattaagtttaaagttgtcaaatatcaccaaatacgagggtgataccgaatccccatgaatatttgagggtatatgaaagagcagttgaagcagcagggggagatgataccacaaaagcaaaaatactttccaccatgttagaaggagtagcattgtcatggtatacaacaatactaccaatgtcaatatattcttgggaacatatgagagacactttttgagctggatttataggagcctatgaggaacctaaagaagcagatgatttgtatgctatgcggcaaacgcaaggagaaaccatcagaagtttcattttgaaattttcaagagtaagatgtcaaatccgacaagtggatgatgagatgctcatagcggcagccaaaagagctctgttgcctggacctcttaggtttgatttagcgagaaatagaccaaaaactgcaaaagatttgtttgagagaatggaaagttttgcgagaggagaagaagatggattaagaatgcaagccgaagaagcagcactgttggggaagaaaatttccaaaaacaagcaagcatttcaagcagaggaacaaaaaggggaaaatacaagtaagccatagaagaaatataagcaagacaactacatgaatgagcaaaagaagcaagacaatctcattagagatgagggtaacaatggagaatattttgatcaggaggagaaaggcaaaggtcagtggaacaattttcataaaggaaaaaatcaatggaatcagcagggaagaggaaaaggccaaagatggaactctggtagaggaagaaacatgtggtggaataatggaagaggaaaaggtggagagaatggtggacaaaagttttgtcacacacatggacttagaggtcactccactgaagagggttacagtaattctagaaaatacatgggccgtgcaatcacgcaaaagaagaatgtcgacaaatgggaagtttggatggagaaacttgtagggcatacgagggaaatatgaaggggtccaaggaggacaaacatgctggaaggaaaaaagtgatgaagaatgaagctttggaggaagcccaaagagggggataatgccttaacgggcggttcatttttaggagtgaattaaaaaaaagagaaaagttttgggagaaaaataatttgggggaaaaggtttcaataattccccgctttataaaacaggtattgtaagactggggatcccggacctttttggtttcatttatc

SEQ ID NO: 53517 - DNA, 300 bp, Oryza sativa
  Clone ID: PAT_MRT4530_5570C.1
atggagcaactggatccaccgcctccaagactccaagttttgaatcaaggagtacagcttcaggaccacaagcctggcgtcctagccgccgtcggcctccgcacgacgggtgaagtcgtggatctgcaaatcgacaagctttgtgtgtatgtgcatctaaaatccaaatccttttgctccatttgcttgatttgcaactccaactccacgaatgtgcacacgagcaggagggcagcgtatagctcgcgagctaaacgagctagctcgagctttcaaacgagccgagccgagctagccttt

SEQ ID NO: 53518 - DNA, 1112 bp, Oryza sativa
  Clone ID: PAT_MRT4530_55710C.1
gcacgtggcctaacaacacacctcctctgcacttgctccttctcttcttctgtccatcgaatcgacaagaagaaatttacaagcaagaatggccgccaaggtgcatcctaacgtcgccgccgcgccacagccaccctgcattagcagcatcgtctcccaacaacaagaagaagaggagcccccggtggtgctcacggtgtggcgcaagtctctcctcttcaactgccacggcttcaccgtcttcgacgccaagggcaacctcgccttccgcctcgactgctacgactccaccagctcaaggcgcgccgacctcgtcctcatggacgccgccggcaagccgctcctcaccatccgccgcaagaggatgagcctctccgacagctggatcatctacgacggcgacggcgccgccacctccaccgccacgccgctcctctccgtgcgccgccgccgcgtcggcctccgcgcctccaagtccaaggccatcgcgcacgtcacgccgctctcctcctccctgccgctcccggaggcctacgtggtggagggctcgtacgggcgccggagctgcgcggtgcgcgacgcccgcggggacgccgtggcggaggtgaggcggaaggagtcggtcggggacgacgtgttccgcctcgtggcgcagccccgcctgggcgcgccgctcgccatggccatcgtcatcgccatcgacgagatgctccgcggcggcagctcatcgctgctacggaggacttgctccgcctaaaccacatctcttcctttccttgcttgctgggataagaagctcggggtcccacctgtcagcgactcagcagcagagtctacctagatgcaaagcactaaacacccaggcaaacaacagaggaatttacatctatatcttgtttagttgtagctagctactggttggttaagaatcatccatgttaataggaaaattaagcaggattaatacaggcttgtgaaagtaaagcacaagtaggacagtacatatatacagctacaggggagttcatttttttcttccccggatgtaatattacaaagattattgtttattattagatggagaaatggaactgcttctccttttccttcct

SEQ ID NO: 53519 - DNA, 528 bp, Oryza sativa
  unsure (1)..(528): unsure at all n locations
  Clone ID: PAT_MRT4530_55711C.1
gtcctgatcccaaaacgcctccccttcccggccctctccgaggcgacctcccctcccctctccttagatccctcctccccttaccggccctctccgtcagccggcggtggctggcgaagccgcgtcagtggcgtcgggcggaggcaggcagcggcagacggcgggcgcagccgcgtcggcagcgtcgggcgaaggcaggcagcagttgggggctagtgacgtcgtcggagccgcgtcgacggagccgcatcggtgggaggaggcaggccactggcgtctatggcggttggtggcgggcgganccacctccgcggcggcgggcggangcgcgtcngcgggaggagcangccgcgtcagcggcggctggcggaggcggacctctcgcggcggcgggcggagcgcggctggcgggaggagcangccgcgggagtcgcggtggcgggcacnattcggtggtgggtggtggcgatttgatttgtgagttttgtgaatgtgtgtgatgtacattgatctgtaattttttatttc

SEQ ID NO: 53520 - DNA, 351 bp, Oryza sativa
  Clone ID: PAT_MRT4530_55712C.1
atggcgagatcactcctgctcctcgtcctcctcctcgccagcgtgctcgcggccgccgtgtccgcctcctcgtcggaggagtcgtcgtccaagccgagcatcctgattcccgtggcggacaccccgctcggctcgtacgagggcgccgacgggcccatcgccgacgacgccctggaggacatggaagctgcgcccttgggctcgcccatcggcaccaccatgaccgaacctgagccggagctcccggccaacgcgccccctagctccgctggtgccaccgcttcttctacacccacgaccctacttgccgccgctgtcatggccgctgtcgccggcgtctttgcattctaa

SEQ ID NO: 53521 - DNA, 428 bp, Oryza sativa
  unsure (1)..(428): unsure at all n locations
  Clone ID: PAT_MRT4530_55713C.1
tggttgtgaacgccgcggcggccaccatcatgacgaagcgtaccattcactttgcggactgttgccccacggcgtacaagtgatgtgttaactaccaggcgcacagagtcgtcccggagggagacctggccatggttcagagggccgggcgcatgaactgcaactacaccaggagaacaggggagtgctaccgcatagacaccaggtacgaccttatgcactgcaagcgcgccgtccctcactggtgctatatggaggacatggatgggtngaaagctttctgcgggggctcaggcctgtgcatactatgcccaagatggctattggagatatggagttgcatgcaagtgtgaccacccaagtggcacgcttgggtaccagccgggtgctttggccctttctgatatgccaattgccccatattctat

SEQ ID NO: 53522 - DNA, 1404 bp, Oryza sativa
  Clone ID: PAT_MRT4530_55714C.1
atggatctcgacaagtctacctccaccagcgcgtcgctgaagaagctccaggcggatggcgctcttcccggtcgcgggaccatggagagagaagcaagaggtattgaaccccagcctgtcctgggtcgcatggttgcgattgaagactacattctctgtggttttcttcctccgccttctgaatttcttctcttggtcttgaatttctacggcctttctttgctccatttaagccccaactccatcgccttcctcagcattttttcgcatctttgtctgagcagcgaagccgtggggcgccgtgtcggccaattgatgatcagcggcccgacaacggcaagcaacgtccccgttcccctttgtgagaaggaggcggccgaacgcgacgctgccatcaatgctcaacctctgattgatatcatcgggccgctcgtggaccacaaggtggcggcgtcgctgaaggagaagatcgccaaggaggcatccgatgctgctgctgccgctgccacaacgagtggcgtcgacgttccaaaaaaaggggaggaaattctcctctgtaatcggacatcgtcggaagccacccaccccctcgcctttcatagggcggcgcgggcgagggcagcgcaagatgggtctggagggacctccagcgcgtctcctgccgtggcctcgacggatgtcgtggtcgtgcccaggagccacgaggcgacacctagcggcctagccaacgatctcgtggctggtcatggttcgccggctgccgtcctcacctgggaggagctccaggttgagatggggcgcctcctcgaggctggtgctcgcagcattggccgcgagatcgcagaggcgagaacggcggcggtgtcgtcggcgaacgagcgcgccgactggctagcgtacgatttggcggaggatcgtcgtatccaatattggaagacgaaatttgaggtagcggaactcgagagaactatgctggaagtaaagaaggagcaggctgtggaaacacttcgaggtcgtgaggtgtggttcaactcgtacttgaagagttgttgcacgtccatggccagagtttgtagagagctccgagtaccccgtggggatcctgaggaatcggcggccggatatatctcgtggctgaatggcgcctgcacccagctcgaaggcatcgatcaacgcatcgatgaagccttgaagcaggagtgtcatcgctcaagccgatatgccggggggcatgtgttggcctgcatacgagatcatcgtccgcagcttcacctcgagttcctctgcgatgggttttctcattctcggagaactcctatggagatagatggcctggcgaagtcgatggcgccgctggcggagaaggttttccagtcgatggactggcgttggccttcctggtag

SEQ ID NO: 53523 - DNA, 275 bp, Oryza sativa
  Clone ID: PAT_MRT4530_55715C.1
gtttgttggacagagctatacaatccttggaggggcacctccattggcggcggactatatacaggattacagtctggagatcaatacataaaacccactcgctctacagggggaactcgtagcagcatgtgcagactaactgaaaaaactctgggcagatggtccaacttatatcactccacttgcattcaagacaaaagttgctcgtgatactacacagatcactggatacgatgaagatgattctcaagagtcacttagatttctattggatg

SEQ ID NO: 53524 - DNA, 3069 bp, Oryza sativa
  Clone ID: PAT_MRT4530_55716C.1
tcacctcttgtcaagatccaccttcttctcgagttcttgcaccaggcagcccagccttctgatgtggcgcttcagagctcgtgcgattttgtggccttcttccgactcgcatagcctcttcaagatatcacacgcgacgaagaacccttccgttttgctcctcagcaactcctggaaaacaatttcaactgcctgtggagtgttagctagcactggttgaaggttcctgaatcgtgcgatgtttctcaaagtgaagagcacttgtttcaggacttcttggtctggaactccacggttcagcaaattgatttgcttcagcagaatttcgacagcaccagcattgacaattgtctgacagcacttctccgaatgctctgtagccgtacttaatgttgcacaaatctgtcgaatagtgctgatgctccgctgtgatactgcagcaatcagtctgttgatcagacacatgatgtcatcggtaatttcttgcttcgatcttttcctcagaagataagctttaacataggactgaattatagttatacgcttcttgtttctaacagcagtctgccgtgcaatccatccccggacatgagcctggataacaatcacagatctcttccagatcccggtgaccaagagcctcgctacagcttggatggtagtaatattttgaatttgccttttgaaacgtatccgcacagagaaacagcgccaatggctttggatcttaattgcagccgaaattcttgaacgtattctgtgggcaaatcttctataggcaaactgtatctttcgagcagccattgccttcctgcagaacaggaagtcgaccttggtagatactggatcatgatagaacaaaacttgacaggaattgctgctgcagtccacatcatcctcacacacaagcttagtggctgaatctatgcagctactatcagcaatgctcttcagaggactggatgaagcaggatcatgccccttgttgcatggctgtgttgcattcttaagcttacagtatttgctcattgcattaagtcttctagcttgagtttgtataactgttgcagcccactctcgggtactgcgtgaaccatctgtctcctctgtctgaggaaaatggcacttcatgtcagttgttcctcgagatctacgcctaggagaaacctcagtaaccagactttgatgatccaactttgaatcgatcagattctttagttgctccaatcgtctgacattagtcagatgtgaagataggaatgcgagcagaattattgcacttttttcaacaaataatacatcattagctaggatattccaaccaggtaggtcctgaagaaattgtgcaagcacttttccaatgttgttgaattgataagtggtgatatcagcaatcatgtctgttttatgacaactgaacaattcctttcgacaatcagataatgtttcctgaatccaatcataaagcaaaccagtctgtgacttcatttcagagattgattgttctgatactggtgcctttagccttgatatttcctgagctactgaagtttcatttactaacactggtaactgcatataaatgaacatgttccaaagcaacgctagaattagctccttatccccattgacaatgtcttccgcagagattgagagtccatctgcatcagacaacggaaacccagcctgcttgatatattggattgccatggtgcagttatgcaatcttttcttatatgtatctgatggagcaatcactttcaaaataatcgatgcatcagatgttagcagctgaataattctacagagaattatgccatcttgaagatcttcaaataaatttcctacagtgaaatcatactctgatagagcaagctgctgataattcaatttatatcccatgatattgagatgcatcaatagatcaccttctccatgcatgacttcccccaatgactcctgaacaatttgccgactagactttatttcggtctggcgacaaaataacaaaggggatccaccatcgaggccatcgattccagattccgaaggtaaaccactttctattttagctctgtctaaggcagcaacaagaagaaataaccttttcagtatactgttgctggccgcttcagcataacatgctctacggtgcccctcgggcgccttgttgagagcggaaggttgtgtattcatatgaacaaacaattgcttctccagaacaaatttcagaaaggcaacttccttgtcctttttctgcgattcattctgtatccaggaatcacccccgaggacaatatgcagtcctatcctgagccacttaggattgtaacacatgaagattcttattgctttatctctcagcctgagatcagaaacaagggggcaatgttctttcatctttaacctcccattatcaatgtttttgcagatttggcacatcatgacgagcacctcctcgcacgcttccctgctcatgtggctgcccatcctctccgtcacgtcatccaggctgcacacctccctcagggaatccctcaacgaagccgccatggccggcgtcatcgtcttcctcctcggccccggcccgccgcgatcctcaccaccccggtgccgcttcgggctccgcccacgcgcgcgctccccatcgaccgcgtcgcgcttgccctgcacgccgtgagcaggagcgtcgcgggtgaccctggcggcggccgcggaaggcgcgcagccgcaggccgaggggtcccggaggagcagggagagccacgacgtggcggaggaggcgaaggcgcggagggcgccgtcgcggccggactcggcgcggcgggcggatcgcgactggtcgagctcgagcgcgcggaggcggcgggcgaggggcgtcgcggtcgccgcgccggggcgaggaggaggaggaggcccccgccggcgccgggtcgtcggggtggcggaagggaggggttcctccttggaggcggaggatttggggttaggcggcgccctggggttcggggtgcggaggttggagaggtcgcggaagggggaggagaccgccggctcccggcggctcat

SEQ ID NO: 53525 - DNA, 231 bp, Oryza sativa
  Clone ID: PAT_MRT4530_55717C.1
atgtctggggagtggtcagttaagctcttcgactgctttggagatagcggaacctgctgcttgacttgctggtgcccctgcattacgttcggtcgcattgctgagattgtggacaaaggctcaacatgtaggcatattaacttatcacttcgcgctttggttcaagcacagaaaaccatcaatcttgatgggaaggtagcaacaagatggttgggtgtgtacaaggcatga

SEQ ID NO: 53526 - DNA, 2014 bp, Oryza sativa
  Clone ID: PAT_MRT4530_55718C.1
ggagaactagttcgtttttttttttttttgcattaggtagaatcacattaacactgtaagcattagctggggcatagtcagtctcagtcgcaacaccaccctacacttgtgtagtttataagtgtcaagtgtcatagaatgatgctcgagtataatacagtcaaaagagcaaggagagctggttatgagatccaacgagaggggaaaaaattatgtaatgacaacatggttaatattggcaatccctaatggcaatccatacaaactcatgttcaactgtagtgctgggctgttgtcatctgtaccgttggttctcacgcttgctgaagttcccgccatcccttgagctgtgtctgtccgatgtctgaggcgcatctcttccgggtttcttatcatcgcggcatagtagatcatccatttcgagcatgtgaattacatgtcccattttaggcctcttgtggccatcaggatcgacgcagcgaagggcgaccagaagtgcccgtttcagtgctttgggagaaggcttctcgggcagcttggggtctactacctcctctgctttcctctcagcaaccatggtcttcagccattcaaccaagttcacctctccaggtgccctggtgtaatctactggtgatctacccgttataatctccattataagtactccaaagctataaacatcgctcctctcatttaacatccccgtgctggcgtattcaggtgccacgtaaccaaaggttcccataacacgggtagtaacataacttctctctgagcacaatagcttcgcaagaccaaaatctgacactttagcattccattgctggtcaagaaggatattgctagatttgatgtcacgatggacaaccttcggttctagcccctcatgaagataggccagccctttagcagttccaagaattatgttcatcctgacttcccaagttagtgggctcacttcccctacatcaccatgaagccattgatcaagattgccgttgtctacatactcatacacgagcatcctataagcgccctctacacagtagccgagcaatctaacgagattcttatgccgaacacgcccgatcgcttcaacctccaccttgaactccttctcagcctggcccctattattgagtagattcttgacggcgaccatggcggaattctgcagcgtgcccttgtaaacaatcccgtagccgccttccccgatcacattctcctccgcgagcccgtcggttgcctcctcgagctcccggagagtgaaccaatggccccacccgaggtgcgacacctccggcccagccgagccgctcgccgtgctcctcggcgtggcgccgtcccgctcgctcccgccgctcgtcgtggccgacatgccgctggccgccgtcgaccgcgtggatcccgccggtagcaccggcggctgcgtccgctgcggcggcggcggagtctctgctttggcgagctgcaccccatgttgcgccgccggtggaggcggctgcggcggcgtcggcgtcggcgtctgctgctgccgctgctgccggcgaacgatctcctgtatgtccttcggcggcgtgggctgctggagatgctgcttgagaatcttggtgtcggccgggtacagattggatgcgaggtcatcgcggcgccggcgccggcgggagaggcagacgaagacgaggaccaggacgagcacgatggcggcgccgacggcgatgccgatgagcacccagaggcggagcccgaacaccgccgtgcgctgcgacagccacccgttgaggtacccggcgctccacaccgacgacggcgcgccctgctggtgccgcgaggggtgcggctggtgcggaggtgcctcggcgagcagcctcctctgagccgccatcgccgccacggggagctgatgaagcagagagagagagagagagagagagagagagagcgctttggtcgctctgctttacataggcatgcgacttgacgaccctcgtgccgattcctgcagcccggg

SEQ ID NO: 53527 - DNA, 1315 bp, Oryza sativa
  Clone ID: PAT_MRT4530_55719C.1
gcacgagctactgcctcctgctgctgccgctgttgcacatttctgctctcctttgttaaagagggcgtctttattgcggccactccgtatctcttctcctacgcctgctgctgcgcgtcgcctcgcctcgccctcgccttccctgggctctcctcgcgttccctttgggtctttattcccctgccgatccaattcccctgccgatccacggggcagggagaggaatccatccgttcgtccgtccgcctgctcgctagcagtgctgttaaggctgcggcttcctttcctgctggggtctgcttgcagggcttggttgtttcttcttccgttttttattatccactcgtcttaaaaagggagtttttgagagaggagcagtgaagcactagctccacccatcatcttggtacgtgccatgtcccggttgcgcacggtgcggatcttctgggacgaccccgacttgacagactcgtccggcgaggacgaggggtgcggcggccggagggtggggagcatggtgcgggagctgccgcctgcccagatgcccgtggcgcaggcaggttttgctcctgctgctgcagccgctgctgctgctttgccggagcagtgcagcggcggggacggtgatatgggaagaagggtcgttggtggcggatgcactgtgggtgtgggacggaggaggttgacgaaggacggagggcctggcgcgccgagcaccaagttccgcggcgtcaggcggaggccgtggggcaagttcgcggcggagatccgcgacccgtggcgcggcgtgcgcgtctggctcggcaccttcgacaccgccgaggaggccgcgcgcgtgtacgacaacgcggccatccagctccgcggccccagcgccaccaccaacttctccgcctccaccaactccgcgggtgcacaagatccggtggcagttggctacgagtccggcgcggagtcctcgccggcggtgtcgtccccgacgtctgtgctccgcaaggtcccgtccctgtgctccctggccgaggacaaggacgactatgaggccggcccctgcgagcccgcaactgccgccggttccaacctcaccgttctcgaggaggaggagctcggcgagttcgtgccgttcgaggacgcgccggtctacggcggcagcagcttctgggacttcgagcccgagtccggcttcctgtacgccgagccgtcgtcgcctgagacgccgtgggacgccggcgccacgtcctccggcgaggcccaagactacttccaggacttgcgcgacctgttcccgctcaacccgcttcccgcaattttctaa

SEQ ID NO: 53528 - DNA, 461 bp, Oryza sativa
  unsure (1)..(461): unsure at all n locations
  Clone ID: PAT_MRT4530_5571C.1
gcgtcgttcctgcattataggtagctgcttgactagatcttataggaaccagctagctaagcttatacacacccacggtcagacctgaaccttctacctactaccgcacanaaacacaagctgcctagctctctaacatcaatctcattcgcatgaatcgcaggagatcgatagtagctactagctagcaagttcatatatagatcgatctatgatcgatgctagctagctaatagtatcatcgatcgggaaaacagacacaatttagagctagctagagcccccgccggccgggtcgacgtactgctgctaatcaatagccagaatacacatgcgagatatacacgtcgggaggaaggagaacccccctccagctgggtttgattttcttgacctaaaaaaactaggggatcgaggcccccctaagtagcacaagacgtgggaattgattaaggcgcatg

SEQ ID NO: 53529 - DNA, 483 bp, Oryza sativa
  Clone ID: PAT_MRT4530_55720C.1
gtttgattcaagccgtgaccgtgggacacccttcaagtttaagttgggacaaggtacaattccttctccattctgccttcttactttttgatggcacatctcatagccaatgtgatcgcaacttgtgccaatcaccattttgtgcaaatttttgggcatggtttcagtcatctattcatatttctgtttacatgctactagttttgatgtttactaatcttttgatatgttattcttctcaaatagaaatgactgtattacagatacctctgagataagggctcttaatacctagttcgtttttcactgggaagtaaaaccgtgattgtttccagtcccggagcatgtttaatggccctgtggctgatatcacccagtgatgctcaactgtaacactgcactgatcactttagtctgtcaattgctggtgctattacaattttggggatcagctttttcttaggtagagaatgtaacagcagt

SEQ ID NO: 53530 - DNA, 1068 bp, Oryza sativa
  Clone ID: PAT_MRT4530_55721C.1
atggcgcccgagctgtcctccccgtcgtcgtcacctcgctacaccgttggctacgcgctgctgccggagaaggtgagcagcgtcgtgcggccgtcgctggtggcgctggccgccgaccgcggggtgcgcctcgtcgccgtcgacgtgtcgcggccgctcgccgagcagggcccgttcgacctcctcgtgcacaagatgtacgaccgcgggtggcgcgcccagctggaggagctcgccgcgcgccaccccggggtgaccgtcgtcgtcgactcccccggcgccatcgaccgcctcctcgaccgcgccaccatgctcgacgtcgtctccggcctccgcacccccgtctccgtcccgccccaggtcgtcgtcagcgacgccgccgccgacgcggacgagctcctcgcccgcgccgcgctccgcttcccgctcatcgccaagccgctcgccgtcgacggcagcgccgagtcgcacgacatgcgcctcgtctaccgccgcgacggcgtcctccccctcctccgcgcgccgctcgtcctccaggagttcgtcaaccacggcggggtgctcttcaaggtctacgtcgtcggcgaccgcgccacctgcgtgcgccggagcagcctccccgacgtgccggcccgccgcctcctcgacctggacgccgagccctccgtccccttcgccaacatctccaaccagccgctccccccacctgatgacgacggcggcgccgccgacgacgacacgccggccgccggcttcgtggacgaggtggcgcgcgggctccggcgagggctgggcctgcacctgttcaacttcgacatgatccgggagaggagcgaggagcacggcgacaggtacttcatcatcgacatcaactacttcccgggctacgccaagatgccgggctacgaggcggccctcacggatttcttccttgagatgctccgtggcacaagacctgttcctgagcagctgggcccgggctcgggcctggacatggaggcccgcaagctcgagcctgggctgggtatcggtctaagagaattggagtctggccgagctcaggcctag

SEQ ID NO: 53531 - DNA, 127 bp, Oryza sativa
  Clone ID: PAT_MRT4530_55722C.1
gctgcccagagctggagcttcgtcactgtcaccccgtgctcccgtgccacagtcgttgccaggctcgcctgcccatcaccgttctcctgcttctgctgctccaacaggaggaacctcccgggcccct

SEQ ID NO: 53532 - DNA, 280 bp, Oryza sativa
  Clone ID: PAT_MRT4530_55723C.1
gtccgaactccgttgcacgcagtcacctcgctattcctcccccggcctcgccggcttgtccgccccctccgtcgccatccgtattccccgccgacggcgaacttgttcgttccttagtcgcatcgtccgtctgggagcggacgagtgtggtggcgtccgagcgagcgacaatcttgagcaagagttctggcgagacgacgaaaatgatactaggatggaacaaggatctcatcaagcaagccgaccggcacagagggagcacgcctctccacgtcgcggc

SEQ ID NO: 53533 - DNA, 3278 bp, Oryza sativa
  Clone ID: PAT_MRT4530_55724C.1
cgcgtacgtaagcttggatcctctagagcggcgtcgcgatctagaactagtccggacgcgtgggttttttttttttttttacactgaaaacaaaacatttattcaactataatcttattcgtgagccagtgggacaagataggtcaacgacattttgaggaacagcctcgagggctctttgatgattccttcttgtggtatgatatgacatattgatttttccctaaatagattacatatacagccaaatcaacaacagatgcgtgtacatcagacagtatccctctataaatatatgcagttgggaacgcaggcacaaacagaagtgcagaactcacatctgttttgtataactcgtatacagattccgaatgttgctcaaccgagatggattggcagcagcgctgcaagcctgcgtttggcgtgagattctacctcgtggaatagttgctctttcatggaaatctgaaccttgttttatggatgaatctccaaaataggtacataaccagcaggaaagtataccagatcaaacgccatcttcagattggttgatgctatagcttggagtgtggtctcagagggcatccaccttcaaaagcatggtcaagtacttcctcgatgcgcttcacaagcagaatctccaagccagagagaatgggtgctggaacctcagccaagtccttcatgtttctttctggcaatattactctcttgatgccatatctatgtgctgcaagtaccttatccttaacaccgccaactggcaacacaaggcccctaagagtcatctctcccgtcatagcagtgtcagctctgacttttcggtggctaaatagtgacactaatgatgttaccaatgtcactccagcagaaggaccatcctttggcaccgcgccagcaggaaaatgtatgtgaatatcacgactctccaataagttaatatcagaagtaggtgacagattaaggtcagcagctcttgctctcacccatgtcagagctaactgtgctgactccttaattacgtcaccaagttgccctgtcagatgcaaatcacccttacccaccatcgctgtagcctcgacaaattgtacctccccaccaaatgaagtccaaacaagcccaactgacactcctgggctcgccacacgatctgcagcttcgctatcatcaaatcttggaggcccaagcactttttctagcatagcctcatcaacaatcatgggtgatggattctcataagtatttgatatgtcctggcccataggaataacttccatttcaacttcaccaccatcagcaagcctagaatccagtagagttgtagtaattggttgtatttccttgccaagtctaagcgcactatcttgctccgcaaccttgactgcagctgcacgggccaatgcagctaggttccgctcaagattacgtacaccagcttctcgcgtgtatctctcaatgatgagtctgaccatagcctcaggaatctgaagatatgtggagctcaagccatgctgttccagtacccttggtatgagatgtttcatggctatttttagcttctcttcaggtgtgtaacctggtagctcaataacttccatcctatctaacagaggaggggggatgggttgcatcctgttggcagttgcaacaaatatgaccttcgacaggtcaaatggaacattcacatggagatcgttgaacgttttgaccgacactctctttagtccatcaatgagacgtcctggcatgcttccaatgtatgttcttcggtgacccctaatatcagcctcatcctttacaccaccaagagagattcttatgaacttcctatttagtgcctttgctatcgacgatgctaatgatgtctttccaacaccaggtggtcccacaaaacacaggactggacctctggcatcaggcttaagcttacgaacagccaaatattcaataatccgttgcataaccttggtcagcccataatgatcacggtcaagactctcctttgcagctctaaggtcaagctccctctcctcactgactttttgccaaggaagttcagcaagaagttccaagtaggttcgagagctgctatatccaggttgctgaggttgcatctttcttagacgccttaactccctttgagcatgcttccaaatattagcaggcattccagcattctgcatcttcctttccaatgccgctacatcatcctcatcatcatcattatcgccaagttcctctttgatagcccgcatctgctggcgaagcaaaaactctttctgagactttgatagctgaccctcaaccttttgagttattttctcagctacaagaattgactgcaggtgcctgtcaacaagttcggttgccttggaaagtctaacttttaagtcaactgaatccagcattgacaactgctcctcaaaacctatttcaaagctagccacaaaaatatcagctagtctgtacacaggaactgtctcaagaagcaccttagtcctaccaactgtcttctgcttctgttcaagaacggaaattagttccattgcagtagctttgaactgcctagaaagagcaatgagatctgggtcctgctctgcgtgctccaactccgtttttgtcatatcaagacgtgagacacgagcgacatgatatgaacctcttgcactgagctcttgaacactgaacctacataaaccttcaaggacgacaatatatgtaacccttccacttggtttctccacacctctggaaaggtgcaaagccctagcagctactccccggctgtgccagtgaatggtctccttcccattcttagtatcctgcttcgttgattctcctgcagaaccaccaggcgccttgctcccaccctcacctgaatcgctgcctacaccaggagacagcaatgagccagcagcttcggagtcatgcacagggagcaccccgatcagacccttctcctcccgttgccagagttcctgctccacaagcttcacactgctggggttggtgcagcggatccgcacgatggcccccgggaggagcaccttgttgcggaacggcagtatcgcgagccgtccaggcagctccaccgccgcgtccgccatggccacgcacctcgcccaccccaccgcgctggaatcgtacggaagtggaggggattacggctcccgcgctggaattgaaatcggaggttggagacgatgacgaagacgacgaaggggatattatgggggggaggagagagagagaaaccctcgtgccgattcctgcag

SEQ ID NO: 53534 - DNA, 404 bp, Oryza sativa
  Clone ID: PAT_MRT4530_55725C.1
gtagtcttgacttgggcaccttctttagccctttctattgtcccatgctaatacacatatttaaccccgccatccaattcccctgttcgttccagttccagcacccacttgctggccagctgcgagcaccttgcttagtccttaccgaaccaggtgttgtaaccgaggaccttgcggctcgccatgtagatgttggcaccgagggtagcccacataaccatatagtaaggggtgagcaccaagttgctgccaggcttgatcctccagatgcgggtgtgggcgcgataggcttgctggtagaagcgctggtgctcgggcaccgggttgtgcttgttcacgagaccggccatcttttccgttttgtgaggagtggagtggttgtttcggggaggtagcctcgtgcc

SEQ ID NO: 53535 - DNA, 486 bp, Oryza sativa
  Clone ID: PAT_MRT4530_55726C.1
atgcaacaacgccccaggaggaaagaggcgcccgcaagcgtcaccgttgccagcccgaacactaggctttcacccgtagtttcatactctcccacgtcattgagtaccgcgctgacgcctcgccgctggccagccatcaaagcaggatctcgacctccggagcgctccaaatccatctacgtgggtgggttggagagggagagggtgagagagaagaatggatctcctctccgccgcacaagtccatccaacatggctatcttgttgcggcaagccatcgtcgcaaaaggattgatgcctggagaggagcttgccgcagccttcaacacccaccttgctcgtgttcacaacgggccgcctggtcacctcgccgtcgcctccgtcctcccaccgcggtccgccatcgcccacggccttctcgtcgctacccactgtagtgacattgccatccagccaccgacgccggcctcccgcttcaaacactga

SEQ ID NO: 53536 - DNA, 2540 bp, Oryza sativa
  Clone ID: PAT_MRT4530_55727C.1
cggcacgaggcccaatctctccacaaaacccacggctcgaatccaccacgaccttctccgtgtcctccctccctcccctagggtttcgtgacctagctagcaccagcggtctctctcggtggccatggcgaccacgaccttccccacctcgacccccttcttcgcccaccatggcaggcggcggccgtccccgtccgtctccgtccgcaccgccgccgcggtgtacgggcgcggcgggggccggaggtggcggccgctgcgggtggcgtgcgagaaggtggtcgggatcgacctcgggaccaccaactccgcggtggcggccatggagggcggcaagccgacgatcgtcaccaacgccgagggcgcccgcaccacgccgtcggtcgtcgcctacaccaagtccggtgaccggctggtggggcagatcgccaagcgacaggcggtcgtcaacccggagaacaccttcttctccgtcaagcgcttcatcggccgcaagatgaacgaagtcgacgaggagtccaagcaggtctcctaccgcgtcatcagggacgacaacggcaacgtcaagctcgactgtcccgccattggcaagcagttcgccgccgaggagatctccgcccaggtgcttagaaagctggtggatgatgcatcaaagttcttgaacgataaagtcacaaaggcagtgatcacagtcccagcatatttcaatgactcacaaaggacagcaacaaaagatgctggccggattgctgggttggaagttctccgcatcataaacgagcctactgcagcatctttggcatatgggtttgaaaagaagaacaatgagaccattcttgtttttgacctgggaggaggcacatttgatgtttcagttcttgaagttggtgatggtgtttttgaggtgctgtctacatctggtgacactcaccttggtggtgatgactttgacaagagggttgttgattggctggcggggaacttcaagaatgatgaaggtattgacctactaaaagacaagcaggccttgcaacgtcttacagaagcagctgagaaggcaaagatggagctatcatccttgacccaaacaaatatcagtttacccttcattacagctactgctgatgggcccaagcatatcgagacaactcttaccagggctaaatttgaggagctatgttcagatcttcttgacaggttgagaccccctgtggacaatgccctcagagatgcaaagttgtcatttaaagacatagatgaggtgatccttgtcggtggctccaccagaattccagctgtgcaggatcttgtgaagaaaatgactggaaaggaccccaatgtgactgtcaaccctgatgaggttgttgcacttggagcagctgttcaggcaggagtgttgtctggtgatgtgagcgacattgttcttcttgatgtaacaccactttctctgggtttggagacactgggtggtgtgatgaccaagattatcccaaggaacacaactttgcccacctccaagtcagaggtcttctcaaccgctgctgatggccagactagcgtggagatcaatgtcctccaaggagagagagagtttgtcagggacaacaaatctcttggtagctttcggcttgatggaattcctcctgccccacggggtgttccacaaatcgaagttaagtttgacatcgatgccaatggcatcctttctgtcagcgccgtagacaagggtactggaaagaagcaggacattacgataactggtgccagcacattgccgaaggatgaggtggagaagatggttgaagaagcagagaagtttgccaaggaggacaaagagaagagggacgcaatcgacaccaagaaccaggcagagtctgtcatctaccagactgagaaacaattgaaggagctcggtgacaaggtcccaggcgatgtgaagggtaaggttgaggcgaagctgacggagctcaaggacgctgttgcaggtggctcgacacagacgatgaaggatgctctcgctgctctgaaccaggaagtgatgcagctggggcaggccctctacagccagcagggtgccccaggagcaggacctaccccaggagctgatgctgccgctggctctgctggcccatccgagaagccaggaggcgaggaaggtgatgtcatcgatgctgattttacagacagccaatgagcaggagagtagttaggtccgaaattttaaggaacgtttcgcgacgagtttgaaatttgttccacaagattgtaggatctggggtgtatctttttgttagatgggcacctttgcttcctatttgtggagttttgggcggcggagtttttgagttctgggaatttcacttccaaatagatgatgctttcgttgctcatacatacatattcttatgccctgtagattcgagttggcaactgcatggttctcaaaaaaaaaaaaggagttggcaactgccccagcccaaaaaggaattaccaaacttctggcaaaaaaaaaaaaaaaaaaaaaaaaaaaaaaaaaaaaa

SEQ ID NO: 53537 - DNA, 279 bp, Oryza sativa
  Clone ID: PAT_MRT4530_55728C.1
atgggccgagtatatagagagaggccatggcccatgggacccagtggaaaacgcgtcggggtgtcggcgtgtgcgggtgagggtgaggtgaggctttttgtctgggtgtcggaggccaccgccaaccgcgccgcgccgtatcgcgtggtggcgctgtcgacgcgcgacggtggcatgtggcatatgccatccatcgcctattggatatcgcttggtggtttggtttgggagcccatgctgatgctgtgccatttcgcgatttcagcgagcatggaatag

SEQ ID NO: 53538 - DNA, 1257 bp, Oryza sativa
  unsure (1)..(1257): unsure at all n locations
  Clone ID: PAT_MRT4530_55729C.1
gccctctcgccgacctcctcctcctcctcctcttgcctcctccgctgaggcagccagtgcgtgcgccgcgcgggcagcgtcggcattagaggagtggtggcgggcggcgcgccgacggagacgccagatattcagcagaaggcacttcctctgtttgatttgcaaaaatggcttgctgctttatgtttgggaatgatacaaaacaaactagtgaaggtgaacaaggagaaaaagcggtcaggattttttcttacaatgagctgagaagagctacacatgattttagtggggcgaacaagattggtgagggcggcttcggttctgtgttcaggggaaggctcagagatgggacaatagttgcagtaaaggtgctctctgctacttcaaggcaaggcgtccggtcaggccgtagcaacatccaattcaattggagagctcgtgtcaaaatcactgtaggtgttgcccgtgggcttgcatttcttcacgaagaagttcgtcctcacataatacaccgggacataaaggcaagcaatattcttctcgacaaggatatgacccccaaaatatctgattttgggttggccaggctcctcccaccaaatgcgactcatgtgagcacccgagttgcaggaacaatagggtacctagctcctgaatatgcactcagaggacaagtgactaagaagtcagatatctacagtttcggtgttttgatcttggaaattgtcagcggcagatgcaactataattctaggttgccttatgaagaacaatttctgcttgagaggacatggacatgttatgagcaagggcatttagaggagatcatagatgcagatatagaagatgatgtggatgtcgaggaggcatgccggttcttgaaggttggactactatgcactcaagatgcgatgaaactccgtcccaacatgatcaacatcgtccagatgctgaccggagagaaggatgtcaacacagaaaggatcaccaagccctctgttgttggtgacctgggagacctgagaggtagcagccagcagagaccaattgatccacagtctctcctgatgagatcctttgccaccactgacccatccacatcatcagacacgactacacgatcatcgctatgatgcatgaaaacctaattacgttagtcggctgctgtgctggagggtctantaggatccttgatacaattatcttgagaacaacagccttcaacatacactactagggtcaggccgtagcaacatc

SEQ ID NO: 53539 - DNA, 306 bp, Oryza sativa
  Clone ID: PAT_MRT4530_5572C.1
agctgctaaaattgtggtggtcagaactgagaagtcaattttgaagtcatttgaggctaacttcttttgccactattctagacacacttctgcaggcatttatttacaatgcagaacgtgacaacattataatgcttccttagtgaaatccttagaaatgagatagtacaggcaggacagttggaagagttgttgtcaaaacaaggtaccaatgtacttctctgcttttcgtagctccaaaggatcttccattcaatcaaattgtcatcaaattggcccgtacctgcgattattgtgctgcctgtc

SEQ ID NO: 53540 - DNA, 257 bp, Oryza sativa
  Clone ID: PAT_MRT4530_55730C.1
atggagtctctcgcccacatcgccggccacacaccgcggcggcgtggagaggcggagtcgccgccggcggaaagcggccccccggtggcggcggcggagatcgccggaggactagcatttcttggcagtcgggattggtggcggcggtcgcagtttgaatcggcggcgggaggaagagacgccgccgcgtcatggggtgggagaggacacggggcgctccagctccaaagcattgcgacctcaggcgaggttatcag

SEQ ID NO: 53541 - DNA, 260 bp, Oryza sativa
  unsure (1)..(260): unsure at all n locations
  Clone ID: PAT_MRT4530_55731C.1
atggacgatgtgatgatcntgtnaattgtgcgtgganccngtgcttatnnancttaatttngtttctgtcaaaaaaaangngngaagangnaatntcaaaataaanaagctcnagggggggcccggtncccaatncgccctnnattgagtcntttnncaattcactggccgtcgttttacatcntcctnacngggaaaaccctggngttncccnacttnatccccttgcgaacntcccccnttcncnaacnggcgtaata

SEQ ID NO: 53542 - DNA, 451 bp, Oryza sativa
  Clone ID: PAT_MRT4530_55732C.1
aacaggaaaagcccattctattaaatttaaagccccatcaaacgcccaaaacaggggctgggaggggtcggaatattttcctttttgctacaggggccaaacggggcgggggtgggaaaaatctgatgtttttccccggcccagcgaaaaaacccggggggagtttattaagggggggaaaacaattgcaaaacgggggggtaaacaggggggggggagggaaatcttggcgctaagccaaattactgaaaaaaagctaagggggccccacggccaacaaatatacccccgggaaggaccagttatttttagcccagctccggccaggccgggagtttgttttttccaaaccatcaggggaacaaacaaacggccaaagtcccattgggttccagcgaaagaagggggtttttctcctttgggaattcccttcatggggaaaaatttaggg

SEQ ID NO: 53543 - DNA, 139 bp, Oryza sativa
  unsure (1)..(139): unsure at all n locations
  Clone ID: PAT_MRT4530_55733C.1
actctgntcggtcctctagcnncgtaagncnanncttanctgctnatgcgttgtnntcctcgattcngattcgntgctttaccctgaantctgtaactgctgcacctgtcgccagttcaacntcaaaagatttttctga

SEQ ID NO: 53544 - DNA, 458 bp, Oryza sativa
  Clone ID: PAT_MRT4530_55734C.1
gacagctatatggccggatttcaaggaattccttcatcaacaatgacgagcgagaacgggttcaacaatattactacacaatacattaggaccgatcaaggcgtcgtgaaaggaaacgtcccgctacctcaagatgtagtttcactgaaggtaacatccgattcgcccaacccgtcctttgctaataatcgttgtgtagttgcatatgctacctctagttttgctcctatacaatatgcttataatgctatgggggtcaacgggtgtttatacggccgattacacaagaatcggctatatgcaaaaccgagctgacggtatgaccggtcgtgacaccggtctaaccgcatcctttgccggtcagaccgtgcccaccatggccggtcagaccgtgtactgcaccggtcagaccgtgcctaccatagccggtcagaccgtgccctatcctggccagatcg

SEQ ID NO: 53545 - DNA, 516 bp, Oryza sativa
  Clone ID: PAT_MRT4530_55735C.1
atggtcggtggtcaggtgtcgggggtggggggtgactcaccggagtggttaggaggctcgggcgatccagcggggcaagccgccggagatgggaaggagttaagattactgcaacacaaacttgcaaagcagcaattgcgccgtctcgaagtggaagccgtccgaggtcctcgtcgtagttgttcgtcgacgtacggcggcaacgcgaagtacgctaaattcgaggagaacgtccggcgagtcgaagagattgaaatctccaatgtcgtcctcgccatcccgcctcgcaaagcgcacacggcccggcgggctcgccagcgccggttcctttcgcttgttgaccaggcgcagcagcggccgatctcgtcggtcagatcgtggccgtgcgtgatcgatcccttggtcagatcaggtacggtgtcaagccagatcgctctccagctccgcatgcatgcgcaccccgtggtgcgtcgtcgggtgcgtggcggcacccgtcaatgcgcggccagccgctag

SEQ ID NO: 53546 - DNA, 410 bp, Oryza sativa
  unsure (1)..(410): unsure at all n locations
  Clone ID: PAT_MRT4530_55736C.1
gggtgcaggattcngnacgaatttttcatgaactggtactcncaaatgctcctggaanacggngaangcatcctgtncgnggngtccggcgtgttcaccggnacaccccngngtnaaaatatccntgaangtggncgggatccactggnactacgggacgcggtcccnccccncggaactnaanggagggttctncnacaccaaggaccncnaanggttcnacnanncgcgcattctnggcccccncngggcggngntcnacttcccnttcgtnganantcgccaccnccaacaancccanganacgcaattcccgcccaagaanttgtgcaacaagtngngggcncngcncnggaatncngcnttggggtcccccgcnaaaaaannctnnccnangttnnaaaaaaang

SEQ ID NO: 53547 - DNA, 474 bp, Oryza sativa
  Clone ID: PAT_MRT4530_55737C.1
atggcgtgctgccgggccctcgcgctccgctcgctcctcgtccccgaccacccccgcgccgccgccgccgccgcggcgcgaccggcggcggggaggagggcgccccgccgccggtcgcgccacctccgctgctgctccggcggcggggacccgggccagcccccgcaggaggccgtgctcgaggccatctccaaggtagccaggtctaaaggaagggttgcactcacaacaaacatggtccttggtggcactgtgacagatgatgcaagtgatgaatggcttgttctggatcagaaggtaaattcataccccacaaatagaggatttacagcaattggtactggaggtgatgattttgtccagtcaatggttgttgcggttgaatctgttcttcaagaacccattcccaagggccaggtccaagccgtgtatcgtgccatgagaagtgataataggatgaagtatttcttatga

SEQ ID NO: 53548 - DNA, 309 bp, Oryza sativa
  Clone ID: PAT_MRT4530_55738C.1
atggcgtggaccatggacaccatgattgatgccaccaacgcctacgctaccaccagcgcatcccacgtgaccaaaatacccttctctccctctctttcgttcccatcttcccctggcatagtagccgccggcgccgccagggtgggacacagctcaagcgggacggggagagtgaccaggagacagtgtgccgccgcgccccttccctgccagctcctcggcggcgcaagcaaggagtccatggtcgagcgcgctggcccgccagccgagcaaaggagaaccaatctgcggacgacatcagttggataa

SEQ ID NO: 53549 - DNA, 1147 bp, Oryza sativa
  unsure (1)..(1147): unsure at all n locations
  Clone ID: PAT_MRT4530_55739C.1
ccggccgggaggcccagcagcagcagcgaacgagaactcccgtcttcagacgcaaccgcgaaaatatccggccgactcgccggagaggaggagagagaaggcatcgccggccgccggcggagattccgacgacccagcaatcgtgcgatggcgtgctgccgggccctcgcgctccgctcgctcctcgtccccgaccacccccgcgccgccggtcgcgccacctccgctgctgctccggcggcggggacccgggccagcccccgcaggaggccgtgctcgaggccatctccaaggtagccaggtctaaaggaagggttgcactcacaacaaacatggtccttggtggcactgtgacagatgatgcaagtgatgaatggcttgttctggatcagaaggtaaattcataccccacaaatagaggatttacagcaattggtactggaggtgatgattttgtccagtcaatggttgttgcggttgaatctgttcttcaagaacccattcccaagggccaggtgtctcataaattgtcatctagggggaagtatgtttctgtaaagattggaccaattcgtgtagtttccagcgagcaggtccaagccgtgtatcgtgccatgagaagtgataataggatgaagtatttcttatgaactgaaataatacgccatgtatattccatatttccgtccatgttgtttcatcatcatcctactgcattctggcatgcttgctgggagcctttgtaaatcgaagaggaatagggaggaccctttttgtgacatcagagcccaaccagaaacggctccaacgcatgcgctacaatgtaacaagttattagtctgtagcatagagatcacgattagctaatgtgtattgttttatgttgcatgtttatcgatttaataaaaggaaataaatatgcatgttaccaaaaaaaagcttttttatggaagcatgtgtgagaaatctctgtatgtttagccacggcgagatgctcctaaacttttttaacagacgttttgaagcttgctgctagacaacttggcagagcgtcatactggtattctgtacattcttcgatacngtgatgtgtatacagaatggcacacatgccccaaatttgttctaaaaaaaaaaaaaaaaaaaa

SEQ ID NO: 53550 - DNA, 1154 bp, Oryza sativa
  unsure (1)..(1154): unsure at all n locations
  Clone ID: PAT_MRT4530_5573C.1
ccggccgggaccccaacccaacccaacccaacccttctctccacgcaggcgcagcggagtaggtgaaggtgaaggtgaaggtggaggtgaccatgccgccgccgagctcgagggagtcgctctccgtcgccatggccgcccgctcccaatcgcagccgcacctcgacttcccctccctcttctccgacctcacctcgctcctcctccagcacccgccgcctccctcctcctcgtcgtcgcctggccccgtcttctcctcctcatctctctccatccccgcgcccgcgcctgcgtcggctgccgtcgccgccacggcgcctcccaccccgctcgcccgcgcggccatcggggcgtgcgcgggcgccgcggcgggggccttcacctacgccgctctgctccccatcgacgccgtcaagacccgcatccaggccggcgccgccgcgggggggtcgtggcaggtgttcctcgacatcttccgaaccgacgggcccctggggctctaccccggcctctccgccgtcatcctcggctccgcgtcctcctccgccgtctacttcggcacgtgcgagctcgccaagtcgctgctccgcccccacctcccacccttcctcgtgccgccgctcgccggcgccagcggcaacgtctcctcctccgccatcaggtgctccttcagatcctccagaccgacggattcttcggcctctacgccggctacgccgccaccctcctccgcaacctccccgcgggggtcctcagctactcctccttcgagtacctcaaggcattcaccctcaagcaacgcaacaaggagagcctcacgccgggagagagtgtgctgtgcggcgctctcgcgggggccatatcggcggcgctcaccaccccgctcgacgtcgtcaagacgcgcctcatgaccagggtgggcaccgaggggagccgcaccgtggttgggacaatgcgggaggtcgtcgccgaggaggggctgatgggcttgtcccggnggattggtccgagggtgctgcacagcgcttgcttcgccgcgctgngatactgcgccttcgagacggggaggcttgcgattctcaaatggtacattgaagactgcgagaggaaggctgcagcggagatgaaagctggagtaagcgctgcttgagttt

SEQ ID NO: 53551 - DNA, 468 bp, Oryza sativa
  Clone ID: PAT_MRT4530_55740C.1
tcggtgtgtagcaattaactgaaactcaaatcgtcgaccgctaattaactgaggtattcagacaaagaataacaggcatcatgcaacggtggacgcgcaacgggatgctgaacttctcgcagccggcgtcgtcgtcgccgttcggattctacgacgccggccacggggcgtcgagcagcggcggcagccggtcgcacggctgcaggagccagaacaaggaccagcgcaacctggagaagaacctgaccaaggtgaggaaggagtggatgaaggtgaaggaggagatgggctacgcgaggctcctcagcgagcacctcagcgagacggtgacggagaccgaccggaaggtggctgccatgctcgaggagctcgaccggacggacaagtacatgcaggatatactgtcgtcccagcagaaatagtagtgacccatgacatcagatattcagatgcgtattttgatggatt

SEQ ID NO: 53552 - DNA, 600 bp, Oryza sativa
  Clone ID: PAT_MRT4530_55741C.1
atggacatggacgcccacgccaccgagctgcaactaatcggccatggcctgacggcgacgacctcctcctcctcctgcttcagctccggcggttccggcgacaacggcatggtgattgtgacaaccaccccgaagagcgctgccgcctctggttcgcagaagcgggcacgcacgccgtcgtcgccgtcgcagggagcagagctgctcgagtactccaagaagcagcgcgccaacaacatggagacacagagctcaactgccaagagccagcacgagaggaaggagatgcgtgagaggattagcgagaggaaggagacactactgattgttgccggcttcacgctttgtggtatgttgagtgttgttggcttctctagcgtgctaggaccgacggtagtgggcagcgtgggagtcgacatggcgggtttgaaaaacgggatggtagacaggagtagcatggttgttagcttccagggtgtggatggtggcatggcaggcaaggaggcattggaaggattaaagtccttgcaagcagggcaacgtccacaagatatccgggagtattgcaaggaagtgttgtgttccaaggtggtggagtga

SEQ ID NO: 53553 - DNA, 255 bp, Oryza sativa
  Clone ID: PAT_MRT4530_55742C.1
atgccaagattcgtgcattggcttatctcctccaactccagtgggctccccttcttctccagcgctggcgacacctcaactccggcggggcttagagggatggccgtgggcggcggaggaccagcggtgggtggtggactccggcgggcagaggcggcggccggtggtggcggatccggcggcggggagccgccggagacggggaagacggcggggcgggggcacctcgtcgtcgccgccatgaggagaaagtga

SEQ ID NO: 53554 - DNA, 466 bp, Oryza sativa
  Clone ID: PAT_MRT4530_55743C.1
aacagaaataaatagttatatttgaattgcaatgtcatatatttattatcacaaattcaaataagtgcattctccaatagaaaagcaaatcacaccaaaagaatatctatgtactggtatttctggcacagaccgtgccttcttataacacgaacatataatatccttctgattgtaatcggtctgatgaaaatgctcaatctgcatccatttgcaaggacccctatgcactgaaggcttatcttcatttggttcacttctgagttctgaattctaatgcttcgtgacttccttcttgatcttgagtgtacaggtcaaaaaatgcatcactgacaaatcgatatataaacggaaccaatcgatacaagattacagcatcttttttcctctgtatttgatggtcttttcagaattcagactcagaacactcataagagtgaaccctaagttgatgcggatggtgcag

SEQ ID NO: 53555 - DNA, 1908 bp, Oryza sativa
  Clone ID: PAT_MRT4530_55744C.1
gcgcggggccccgggctgcccgcttcccgcccacacccagccactcttcgcgcctctcctcctcgttccatcccctgcttgtttctccattgccacagcagagaaggatgcgttcttgcctgtcgtggacccggcgggcgcggacgagcgggaacaggtcggtgggcgggtcgaacttccgaatcaagctgccggcgggtttcggcgaggtgcccatcgcgctcttcggcgccggcggcctcaccggccgtgccgtagcttctcccgcctgtttcgcgctccgagaggccgtcctcgtggaggcgccggcgtccgacgtggcgcttgagcttacgctggggcagtggcggagtcccttgatggatccggccagtctgaacggttatctagcgtagcaggactcggtcaggatttttgccttggccgacttggcagccgagatgtcagacagcaagtgcgccagcgtcaaaggagctcctcgccgccacggcagtgcgatggcgccgtcgaggtggacgagcttgctcgatgccgtgcgttgcctgaggagcatggcgagcgcagaggcatggctggatgatgagcctcccgggaaggttgaacatttccacgtggccgccgtcgctgcccactgctgcaactgcgggctccgggtacggtgagatgttcgaggcctaccgatgccgtggcctcgacatccatcgattccgagcaagaagatccagccaattgggatcggcacccaaagaccgcaccaagcgcagaaaagatctgcccgcggaggaccatcacctagcaggcgatgatccgggggtgaagatatcatttagaggagtggcttcacgaacttcccttaccttccaagggcttgagcatcgttgacgtggttgagagtagcaaaattgtttaattcaagttgtttagctgttgagccgtgtgtgtttatagtccacggaaagaatttattgaaatacaaaagaaaatcgccagctccttacggcagaccagaggtcataagtggagcagctacgttagcttgcacaaggaagagaaatcacaaggcgctgcatcttgatcttacatcactgatggctctgtagtcctacccatcactcttcattgtgaacattcagatgcctaccttgccagcaaccgtgtttggcgagaacgacggcgacgggataagcctagttctttatttcaagctatctgacagttttgacaaggaaatttctcctcaactaaaagaaagcatcaagaagcttatgggtgatgaaatggagagagttaaggggtttccggtagacagcaatgtgccctacactgagaggctgaaaattctggctggtttggtgaaccctgacgacttacagctcagtgcagctgagaggaagcttgtgcaaacctacaaccagaaaccggtgctgtctcgcccccagcacaaattcttcaaggggccaaactacttcgagatcgatctcgatgtccaccgtttcagcttcatttcaaggaaagggcttgaggccttcagggaacgattgaaacatggagttcttgatcttggcctgaccattcaggcacagaaggcagaggagctacctgagcatgtcttgtgctgcatgaggctgaataagatcgactttgccgacagcgggcaaataccaacattgataatgtccagtgacgaataaatttttaatgtcactgaaatttactaactttgagagagagagagagagagagagagagagagagagagagagagagagatctgtacaaatcgggagagtggagtagaaactaacacaaatttatgcattaagctgcataaacatcgtgtaaatactcatttatttgccaaagaatgacaacaggagcattctgcagtgagaagctgtacttttccct

SEQ ID NO: 53556 - DNA, 546 bp, Oryza sativa
  Clone ID: PAT_MRT4530_55745C.1
atgccatctccagggacggtggcagcggcgccggctctaggtgaggcggcagcggctacaagtgcagacatggcaaaggtgtggttccggtgcgcgcaagcgatcagaagcggggaggcagaacagaggcagcacaggcgcgcggaggaggaagaacaccagcgagagaaagcaagcgagagagttctgatcggattagcggcctccttatatagcaggagtgatatccgccagttgccgcacgcgccgttacggaggcaatcgtgggatcgtgcacgcgccattacagaggcaatcgtgggatcgtggttaagtgccgttacggaggcaatcgtgggatcgtgcacgcgccattacggaggcaatcgtgggatcgtggttaagcggggaggcagcacaggcgcgcggaggaggaagaacaccagcgagagaaagcaagcgagagttctaatcggattagcggcctccttatatagcaggagtgatatccgccagttgcgcggaggaggaagaacaccagcgagagaaagcaagcgagagttctaa

SEQ ID NO: 53557 - DNA, 187 bp, Oryza sativa
  Clone ID: PAT_MRT4530_55746C.1
gacatggtgcacactcgggaagaccgatgcaaatgcagagagcactggatgcctagtagttttcacatggttggggtaccacttggtgataagctaggagcatactcgcgcgtcgagtcatgcccacggcgcgagttaacggcgtcgtgtacggcatgcagatgtaatagaggggacatggcaagtc

SEQ ID NO: 53558 - DNA, 754 bp, Oryza sativa
  Clone ID: PAT_MRT4530_55747C.1
gcctcctcctcgatcgcctattaaattctctccccgcctcatctagggtttggccctccgtgtaatcctattcctatctctatccattactactctccagtgttcttttttccgtacccatggcggcggcggcggcggcggcgaagaggaagccggtgttcgtcaaggtggaccagctcaagcccggcacgggcggccacacgctcgtcgccaaggtgctcagctccaagaccgtggtccagaagggccgcgccgccgcgggagcgggcccggcggcgcgtcccacgaggatcgccgagtgcctcatcggcgacgagaccggctgcatcctgttcaccgcccgcaacgagtagggtacgatctgtgtccccattctgtgcatagtattcagtttccgttaccacgtttgcttcctttgacgaggctggttttgaagtcgcatgcttagtgttaaattggtacaataatgtgcgatagtatgtacttgtaggtgtttatctgatatcaggcaagagtatactactgtgttccatgtaatgcagcatgtggtttttagcacaaccaaactaagattaacgtttggttccgaaaatttggatttaaatgtaaaatatgcttggctgctggctggtgtatccagttggtaagattgaggctatttgtgtaacccaaatggtacaggtgtcactttctatatttatctgtgtaaggttatgtaagtacctgtacgtctgtacttgtgaactgtgcatca

SEQ ID NO: 53559 - DNA, 729 bp, Oryza sativa
  Clone ID: PAT_MRT4530_55748C.1
atggcgatgacggtggtgaggcagatgaactctgagcacgaagggccccacgcggagctccttggtgacgatggacaaccaccaaatctggtcgaagtcagggatctgcgagaagacgatctgcacgatgccaaagaggatcatgttgtttgcttgctacaacctgctgctcttgttcatcgtttttcgactggccttcagttaatggttgctgtacttcatgacccgacagtcataactcataagtcgggggctgccgtatttggggttctcgaggcttttgagtctcttcgcctgattggctgccagtcggatgttgttgagctgcatctcttgactaaccgctggttgtgggatgctcaattttttcctgacttgccaatccaatcaatgtcagaaggtttcatgttcctgaacaggtgctctgatgcattagaatcggagcttctagcatgtgtggagggaatcagcctggtgatccaatggacgatgcttcctattgaagtggagatggattgcttgacggcggcccagttgatgcagtccaaggaaccggaccgttcttcccttgctttcattgttagacagattaaagggctgatcgatggagagagggaattcatcatcaggaaggtaatcttcaggacaacatattggcttcgatactggactcaactacaaaggtgtgacgaagattgtgagcttataaaatttagttatgtcttttag

SEQ ID NO: 53560 - DNA, 633 bp, Oryza sativa
  Clone ID: PAT_MRT4530_55749C.1
atggcgcgcgcttgcgcatacaacccgcggaagagagagcgggagaggtcgctgggagaggaggagcggtggatgaagctggcgaggacggtgccagcgatcctcatgcgcatcggcacctctcggaaagcgatcaaatccaccatgaagggcatgaaggccatgaaggccgccaagagaggcgatggcggagtgttctccgaccagatgcgccacgcttccgagcacctcgatggcgcccacggcaggatcgcgcggctcatcgcgacgcacgcggaggccggccacttgttcgtccactgcgccgcgcacataggcggcctcaagggcggcggcggcggcgcgccggcgtggcaggcgtgggaaggccaccgcgccgacgccgtcctccacgccagggacgcgcggtggtggctgtgccgcgccgggggggctgtcgaggcggcgctggacgtgttccgagtcgtcgaggggaggagcgggagcgggagccaccggcctcgggaggccaagcgcctccgccgccgcgcccgcgacgacgtctccaaagcgctacacgctttgacggatatgcgccacgctattgttctggagttcttcgacgcctggatggttctgaatcagaatcgctaa

SEQ ID NO: 53561 - DNA, 3732 bp, Oryza sativa
  Clone ID: PAT_MRT4530_5574C.1
atgcaagatttttcaatattaaatcagccttgttattccttcaatagcagttcttggagatcagatgtgataaatatgcacactaaaggggcttcttctgatgttatcagagtaagcacatctagtgcccctagtacatcaagtcacggttctgcacaagatgactgtgattcttcaggtgatgtgtatgtatggggtgaagttatctgtgataactctgtaagaactggttctgatactgtagttaggtcaactgttaggaccgatgtcctgcgacctaagcctttggaatctaatttagtccttgatgcgtatcatgtggattgtggagttaaacattctgctttggtcacaaaaaatggagaagtctttacatggggtgaagaatctggtggacgccttggccatggatcacgagaagattctattcatcctcgtctaattgagtcattagcagtttgcaatgtggatattgttgcttgtggggagttccatacttgtgctgtgacaacagctggggaactgtatacttggggagacggaacacataatgttggacttctaggccatggtaaagatgtaagccactggattccaaaaagaattgcaggagcattggaaggtcttgcagttgcttatgtatcttgtggaacatggcatacagctttgattacaacaatgggccagctatttacctttggtgatggcacatttggagttttaggccatggaaaccgagaaagcatttcatgcccaaaggaggtcgagtctttatcggggttgaaaacgatttctgttgcatgtggtgtatggcacactgctgccattgtagaagttatagtgactcagtcaagttcaagtatatcttctggaaagctcttcacatggggagatggtgataagcatcgacttggtcatggtgacaaagaaccacgactcaagcctacatgtgtggcttcacttattgattatgattttcacaggatagcatgtggccatagtttaactgtgggtctgacaacatctgggaaagttttgagcatgggtaatactgtttatggtcagcttggcaatcctcgttcagatggtaagattccatgtttagttgaagagattgtgggtgaaaatgttgtgcaagttgcctgtggttcctaccatgttgcagttttgacaattaagagcgaggtttttacatggggaaaaggagccaatggaagagtaggtcatggagatatagaggacagaaaaatacctacactggttgaggcattgagagataggtctgttaggcacatagcctgtggagcaaacttcactgctgctatatgccagcataagtgggtctctggagccgagcagtcacagtgtgcttcatgtcgacaaccatttgggttcacccgaaagaggcataattgccataattgtggacttgtccattgtaatgcgtgcacctcgaggaaggctgtcagggcagctttggctcccaatcctgcaaaaccttaccgtgtttgtgattcctgtttcttgaaattgaacaatgctgtagactctagtgcaattagtaaaaagaaagagaatgtacttcgcgaaagcaactctgatggtagattgacaaaagcaattatacctagtaatctggatatgatcagaagtttggatagcaaggcagcaaaacaagggaaaaaaacagatgcactgtcgtttcttcgtacacctcaaatgaattcgcttcttcagcttagagatattgctctatctggtgggcttgatctgaacaggccagttccaagagcagtgcgcacaacggcagttcgatcggtaaatacttctagggctgtttcccctttctctcgcaagcctagtccgccccgttctaccacaccagttccaacaactcatggcctttctattggaaaaggtgctgctgataatcttgcgaaaacaaatgagatgttaaatcaggaagttgaaagactccgtgcacaggttgataacctgaggcaccgatgtgaggttcaagaacttgagttgcagaaatcagccaagaaagtacaagaggccatgacactggttgcagaagaatcttcaaagtccaaagctgcaaaggaagtcataaaatcgctaacagcacagctcaaggatatggctgaaagactgcctccagatcagggagcctatgatgggaatgaatcaaaacaaatgcattttccaaatggcacagagttgcatgctgctatctactcgagcacgaatggcatccaccagctacaaaatgagtctatcagtgctttaaacacgcctagcctgaacactggaagatccttgcatgcaaatggaatctcaagtcaacataaatcactgggtagtattagtgaacatagtgaagtgagcactcacagccatcgggtttcaagccctcatgacactgaactttcaaatcgaagggcacggatcagtagtgatgagttgttcagtgcaagcggtaaatcggatgatagcaataacagggatgctaggtcccttcaaaatggtgaagatggttacaaacctcgagggacagtatctctgtccagcaaccaagttcaggctgaatggattgaacagtatgaaccaggggtatacattacactgacaacattacgcgatgggactcgggatctgaagcgggtgcgcttcagtcgcaggcggttcggggagcatcaagcagagaactggtggaacgagaaccgggagaaggtatatgagaggtacaacgtgttcctcgacatcctccgaaccgacgggcccctggggctctaccggggcctctccgtcgtcatcctcggttccgcgtcctcctccgccgtctacttcggcacgtgcgagctcgccaagtcgctgctccgcccccacctcccacccttcctcgtgccgccgctcgccggcgccagcggcaacgtctcctcctccgccatcatggtccccaaggagctcatcacccagcgcctccaatccggcgccgccaagggccgctcatggcaggtgctccttcagatcctccagaccgacggattcttcggcctctacgccggctacgccgccaccctcctccgcaacctccccgcgggggtcctcagctactcctccttcgagtacctcaaggcattcaccctcaagcaacgcaacaaggagagcctcacgccgggagagagtgtgctgtgcggcgctctcgcgggggccatatcggcggcgctcaccaccccgctcgacgtcgtcaagacgcgcctcatgaccagggtgggcaccgaggggagccgcaccgtggttgggacaatgcgggaggtcgtcgccgaggaggggctgatgggcttgtcccgggggattggtccgagggtgctgcacagcgcttgcttcgccgcgctgggatactgcgccttcgagacggcgaggcttgcgattctcaaatggtacattgaagactgcgagaggaaggctgcagcggagatgaaggctggagtaggcgctgcttgagtttgtgagtgctctttcaggaaagttggctgttgattttgctcccaatgatgccatgactgtctcaggagttttactgtacctacctagctatgctatgatgcagataatgcacctgcttaaattgtttgaaacttaagcatccttgaaagttcattgtagagttgaagtgcacaagcaataaaatcaggccattgttaatgtaaaaaaaaaaaaaaaaaa

SEQ ID NO: 53562 - DNA, 510 bp, Oryza sativa
  Clone ID: PAT_MRT4530_55750C.1
atgacgaagcaaaagatcgtgatcaaggtgagcatgccgtgcgagaagagccggtccaaggccatggcgctggtggcgagggcgtccggcgtgaactcgatggaggtcaccggcgacggcaaggaccggctgcaggtggtcggcgacggcgtcgacccggtctgcctcgtcgcctgcctccgcaggaagatcggctacgccgagatcgttcaggtggaggaggtgaaggacaagaagccggaggagaagcagccggagccacccaagcccgtgccatgctactacccagctcctccctgctactacccgccggcgacggtggtctgcagcgacgagccgagcccctgctccatcatagccacctccacctgcgagctggagaaggaggctcgagacaagtcgacagggagtggaggagagcagagtttcatgcttggatctgtgcccatgccatgcaaactcgccgactggatctgcagatgctcgccgcgaaggttgcaatccatctga

SEQ ID NO: 53563 - DNA, 1755 bp, Oryza sativa
  Clone ID: PAT_MRT4530_55751C.1
cttgttcttttaatcttgattaacagcagattggcctttgaaacatttcccctccatgtatttgatttttcatttgcagtgtacatgagtggaactttagttacatcgcggttccaacgttattttcagaattatgcattcagttgatacattgggaaaaagaaagagggtaaaaaaggaaacatgaagcttcaggcactccgtgaaacggcaactcaaactacctattagactatttcagttgtatttttatcacatcgcagcatacatcggttgctcaggaagctcggcaagccattcctccttgagtttcccttgagtaaatctcctcagcatttccagggaagctttgggttggtccattggaaccatgtgaccagcattgtggaccttgaggaagctgagtggcccgtggctcttcaaaacaccagcttcggcaccatctactacaaatggcgattcatgagatgatacaaagtctttctggccagaccattccatcgagtggacccacctcgagtttccaagccaattgcatataagatcatactctccagcatatataagcacattgatcccatcctcaagtagagctgggatgccaacttccaagtttctcatccagtctgtcagcattgcttgataaacagtagtgctgcatgagacaaattcaaggtcgccaactccaattgcttctttgactgctttatctccaaaaaacttctccaagtttgagaaatcatagcaaagtttcccttcgcattccttcctaacgtcatagtaattctttgtcccaacaagcttcatgatggagctgaaaatagaattgcagaccatgtatgctgccatgcaagatgctttcccattggtaccacaaagctttattgcaaattcacatggtgggatgaacttgttgatcctgtcgtaatctgattttttaataaggttcatgtccaatgcataatcggtgtaagctttgtactggattgctggatccgtgaggccattaccgatcgcaaaacccttcaagtttatgtgaatgccctcgtttgctttgtttccttggtgaacccggcttgcgaatgctggaatgtagtgcccagcataagattctccggttataaagaagtcattctttgcaaactctggatgcttcttaaagaacacctgaagaaagctatataggtcattgctgacgcctgtctcatcatgacgagtatcacgatcatcagagctatagctaaatccagttccagtgggttgatcaacaaaaattatatttgaaatcgtgtcccagccgaatttgttccaagcaagcgacatgttgttcgagatggtgaacgggccattctcgtagaagacggccagctcgctgctgcatccggggcctccggtgagccagatcacgacgggatcctccttcttccccctcgattcgaacaagaagtagaacatcctcgcgtcgtgcgtgttggggaggcggtagtagccggcgtggtggccgaggtcgccgaccccctgggggagcccgggcagcgtgacccgccgctcaagcagctcgccgggcgccacgctggggacatccccggcgccggttggcccggcctccttgggcagcaggttgagcgagcggatgagccgctcggcctgcgccgcggggaacttggcgtcgcggggcagccggagcccctccgcgcaggcggaggcggcgaggacgacgacgaggaggatgagggagacgcgcgcggtcgccat

SEQ ID NO: 53564 - DNA, 402 bp, Oryza sativa
  Clone ID: PAT_MRT4530_55752C.1
atggagcacgagggtcacgcccccctcctcgccggctgtcgccgccgcagacgtgaagaggtggaggacgtgcggcgtgagggcgaagcgagagaggtgggcgaggagggaggcgaaggggcggtcaaagagcgggcggagcggtggagacggaggacgaccgggagcgagatggccaggagatggcgggactgggagcgacttgggcagggacagcgtgagcagggcggggaggcggggcagggaagggttgaggaaccagtcgggcgaggtgaggatggcggcgaggataaaactgcttccaaaaccgatcggggagttgatttgcaacggttttcggagttgggggatgggttatacccggttttgcagttgagggatgctattcatacacggccatga

SEQ ID NO: 53565 - DNA, 570 bp, Oryza sativa
  Clone ID: PAT_MRT4530_55753C.1
atgtcgccgagcgccgcgttgtgttgcagcatgaggacggagaggctccggcatggggactacagcgacattgccagcagctgttcaaccgagctgtgcatggcggacacccgctccacgtcacgtgcacactcgaagaactccgctagcttctgcctcgaccggagggagatgccgcttgccgccgctcgtcggccgtccgcgcgcggggaggagctcgtcgcccacctcgccgccatcctcacctcgcccgactggttcctcaacccttccctgccccgcctccccgccctgctcacgctgtccctgcccaagtcgctcccagtcccgccatctcctggccatctcgctcccggtcgtcctccgtctccaccgctccgcccgctctttgaccgccccttcgcctccctcctcgcccacctctctcgcttcgccctcacgccgcacgtcctccacctcttcacgtctgcggcggcgacagccggcgaggaggggggcgtgaccctcgtgctccatctcgccgccactggcgccgcctccatacacagccggtcggtgttatgcacctaa

SEQ ID NO: 53566 - DNA, 267 bp, Oryza sativa
  Clone ID: PAT_MRT4530_55754C.1
atggactcccctcacccaaacgtgtgcgaccaacggcattacggccacacgggtgagccacggagatcggggctgcatcgcctgcgaataccaaaactttctccccaaccccagtttcttggaattccggatcttgtgtcacactcggtcattcaacttgatgtgcaaaaccaaggtggctgcggtctgcggcgtgccaagtttcaggaaagcggtattgcacaagctgaggaggtcccaggcacagcagcaaaagcaccagaaaca

SEQ ID NO: 53567 - DNA, 541 bp, Oryza sativa
  Clone ID: PAT_MRT4530_55755C.1
tcaacaccctgatagtgcaagggaagtgcatatatactctctgatggtctcttgtaaatttctttcttgcattgtctactgtacattcgtcttgaatctgagttgtttttaggttccttgttttatcctgcactttctttagaaatttcgatctaatactctaatttattttgaatcctattgttacttggggcacctgttgaggagtgacggtgttggaactgccactgaggctgagctccaagtgatctaccgtgtattcattggcgagattggcctcaagctgcaactgtgaatttaactaacatcctacgggcctgttgacttggtgttgtcatattctgttagcatagttttttactagcccaaaaatcatatcgaatgattatgtaaaaccaaatcatttctagctttgttttgtaatgctaaatatggtaattgatgtgatccgtaactttggtcacattgccacgtaagataacatttgatatatgaagacagttaataatgcatattttgtatcgaaaaaaaaaaaaaaaaa

SEQ ID NO: 53568 - DNA, 144 bp, Oryza sativa
  Clone ID: PAT_MRT4530_55756C.1
atgaagaataagctgatggataggggatctctagaaatccaactgtataattttgggaagagacagtacgtgcagccaggaatcttcaagggtgcagagccgattatacgtactcgtgcaattgacattcccagaggcctctag

SEQ ID NO: 53569 - DNA, 167 bp, Oryza sativa
  Clone ID: PAT_MRT4530_55757C.1
accgcacacagcgaccgcccacgcgtccggagccgtacttaacaggtacggaaggggacccaacaccctcgccagaggatactccaagggcagcgggcttacagccgatatcatcggaaccatcctgactcgatacaccgtgatttacatgacccagcccaagcgca

SEQ ID NO: 53570 - DNA, 1629 bp, Oryza sativa
  Clone ID: PAT_MRT4530_55758C.1
atggagacgctcaggaagcaggccagcaagctcagggagcacgtcgccaagcagcagcaggctgttcggaagcagttcagtgcacgctataaccaggatccttctcttgtcgatgaggcggaacttgagtgccaccagaatcttcagaggctatacaacagtacaagagctgctaaagtttttgagcctcttcgagaaatgataatgagtgctcctcttgaagatgcccgcctgttaacttaccgttatcaacggatcagacaagatatggaatctcagatagctgatgtgatgagaaagcaactgaagtccaaggagagtagcggtaatgcagataattctgtgaaactgcaacatgcagaatcaaaattatctgagctccgaactacattatcagcattaggaagagaggcaactgcagctatggaggctgtggaggttcagcaacaacaggttgatgctgagagagcttatcatcagaatgctgctgatattctgaacaaacttcacgacgagatggtccaagcaaaacaccatgatgagccggaaaaccattatgatgagacatcatcagatcctaaaacagctgcaacacatgagcattcacgtagcacatccgaagatcacatatttactaatactagtgaacctacaaggactgaaaccagtgaacctacaaggactgaaactagtgaacctacaaggaatggtcaggaagtgcattatgttggagaggtggctcccaatgggtggtctgaaggggaatgcaaaggaaaagctggctggttcccatctgcctatgtggagcagagggacaaagccccggcaaagtggctggcgccgtcatccaacgggacggtgccagcctctctggcgccgtcctcctgccaccgtggcgcacgcgaaccgacgtggcaggaggagggcgccagcatggctggcgccgccgcctctattcctgtttctctgtatggagttgcaacggcaggcaggcaggcgcaggtaaaaaccttgcccccgctccccgtcctcgcgccggatctgccgccgattcgtgcggccgcggtgagcccgtgcgtcgcgtcagcttgtgtgttgctgagtggtgaactggtgatgccgcggcagcgggcgctcaaaactggtgaagcacttcttgccttcaagaaggcagttacaacttctgatgggatatttctcaactggcgtgaacaagatgtggatccttgcaattggaagggctcttccattgtgatgttccacggggacctcccttactccactaaagaaatcctcaagaaactagagaccatggatgatgagaatatcattggagtagggggcttcgggacggtttataaacttgcaatggatgacggtaatgtttttgcattgaaaaggataatgaaaacaaatgaagggcttggtcagttctttgatagagaacttgagatactgggaagtgttaagcatcgttatttgattgagaccttggatgctctactttctcttgctaaacaatgtgtaagttctttgccagaggagcggcctacaatgcacagggtggtacagatgttggagtcggatgtaattacaccatgccccagtgatttctacgattcagaatag

SEQ ID NO: 53571 - DNA, 312 bp, Oryza sativa
  unsure (1)..(312): unsure at all n locations
  Clone ID: PAT_MRT4530_55759C.1
ctaaaacncccccttttttttttctttctctttttacaaaaaaattgacttgatattaccggggatcaaaaatccaggggttttcaacttctttccattaattccattactcaacaacattaccttcataaaaacctgttaattttccaaggatattttaaacttacaaaaactataacatatctctatagcaataaataccatgtattattacaagcacacacctatagcgctgcccactctttgtccaaaaaattctttatttttcttcaaatttacgccaactactcttcccatgctgatactttttct

SEQ ID NO: 53572 - DNA, 358 bp, Oryza sativa
  Clone ID: PAT_MRT4530_5575C.1
caagcaaatgttgcaaggcaagcttacaaggctatgtatgcctcagtgccactggtggcaccaagttgccagatgatgcagagcatgcaacaagttatttgtgctgggactcggcaagcaagcaagatggatggaagatgcgcgatggcaagatggccatacatggtggcaaacatgggcacccatggtgcaaacttccaaactgctgcttgcactgtgggttgttgttgatcaaacgtgggttacatgtacttagtaataaggtgttgcatactatcgtgcaaaacaactagaaataagaaccatggaataaaatatcaaatcatgttcagactggcaaaaaaaaaaaaaaaaaaaa

SEQ ID NO: 53573 - DNA, 1326 bp, Oryza sativa
  Clone ID: PAT_MRT4530_55760C.1
atggagacgctcaggaagcaggccagcaagctcagggagcacgtcgccaagcagcagcaggctgttcggaagcagttcagtgcacgctataaccaggatccttctcttgtcgatgaggcggaacttgagtgccaccagaatcttcagaggctatacaacagtacaagagctgctaaacatttccaacgaagtattgtacgaggtgtcgagggtttcattgctgtcagcaccaaacagatggagattgtgaaaaagctagctgaggattgttgcagatatggaaacgacaatcaaaattttggttttattcttgcaagggcttcagttgagtttggtaattcccatagccaaatggagaaagagcgggagaatcttcttaaatttcttggagagcaggtttttgagcctcttcgagaaatgataatgagtgctcctcttgaagatgcccgcctgttaacttaccgttatcaacggatcagacaagatatggaatctcagatagctgatgtgatgagaaagcaactgaagtccaaggagagtagcggtaatgcagataattctgtgaaactgcaacatgcagaatcaaaattatctgagctccgaactacattatcagcattaggaagagaggcaactgcagctatggaggctgtggaggttcagcaacaacaggttacctttgaccgtctccttgcaatggttgatgctgagagagcttatcatcagaatgctgctgatattctgaacaaacttcacgacgagatggtccaagcaaaacaccatgatgagccggaaaaccattatgatgagacatcatcagatcctaaaacagctgcaacacatgagcattcacgtagcacatccgaagatcacatatttactaatactagtgaacctacaaggactgaaaccagtgaacctacaaggactgaaactagtgaacctacaaggaatggtcaggaagtgcattatgttggagaggtaatccatccattcgatgctcaggctgatggcgagctcagtatttccgtgggagattatgttgtggtccggcaggtggctcccaatgggtggtctgaaggggaatgcaaaggaaaagctggctggttcccatctgcctatgtggagcagagggacaaagccccggcaagtaagcaaagcaaaggacggattgcagcattcggtatgtctgattgggtagaagaagaaggcatggttgctggattcctggatccaactttatctgaaaccctgaaccttaacgggaacaggagcacttgtttgattgctcccctcctctcatcatttcactgcccacaaagttaa

SEQ ID NO: 53574 - DNA, 359 bp, Oryza sativa
  Clone ID: PAT_MRT4530_55762C.1
atgaacaacgattttacttttttcttttatgattatgaaagtttcggcataaatccagcaactgatcgacctgcgcaatttgcgggtattcgtacggatagagaatttaatattattggtgaaccggtaatgttttattgtaaacaaactaatgattatttgccttcagctgaagcggtgatggtaacaggcattgcaccacaactctgtaatgaaaaaggcttgtcagaaccagaatttgctcaacgtattcatcacgaatttagtcaacctaatacttgcattattggttataacaatatccgttatgatgatgaaatgactcgttatacgttttttcgtaatttttatgatcctta

SEQ ID NO: 53575 - DNA, 231 bp, Oryza sativa
  Clone ID: PAT_MRT4530_55763C.1
atgcgcttgaaccatgtgatccaacttttctcaggttgggaattgcaactaggttggaaagatgctgcaaatccaaaagaaccaagaaggggaaaacaagatgaggtgttggaagatcggtctgatgctgagaaaggggatctagtcgatgggaacttacctcagcgtactcagctgacggtgcggcagacgagctggcggaagaagacatcgtcgcgggtggagatctag

SEQ ID NO: 53576 - DNA, 2492 bp, Oryza sativa
  unsure (1)..(2492): unsure at all n locations
  Clone ID: PAT_MRT4530_55764C.1
atgggaaggccgcatatgaggcaattagganagtgttatgaggttgaggatgggactgggagagaggatggaatgatggataaagtccaagtttgacctgagtcaaagcagtgtgtacttttttgggggaagtagtcaaagcagtgtgtaatacattgttgaccagatagaatgaagcacatgggtgcacacaggcttggacactaacttccaaagcagcggtccattagtccacaatctcatcccctttttaaagaaagaattagataatattgctgacgaggactgcactcacagaatcacaatggggtcatcacaacacggcattaggacccaacaatagatagttgatagttctcaccatctgttctgtacttccagcctcaccttcaatcgacacagaagatgcacagatttctagtgactgctctactcttctctcttctcaactatggagccgtcatggccacagaatcggacgaggcagatttcttccgaaactgtccgccatcccgatgcagcagtgatggaccagacatcaagtttcccttccggcttgaatccagctcttcatcttgtggtgctccaggaatgcagttatcatgttctgggcaagatactctcctactgcaccatgttcttggcctatcgaaggtaactggaatagactatatatatggtgtcatcaacatcgtccctcttgcagagtcatggtcacagtgcgcacttcagaagataatttctgcaaattattcaaccagtgtgtacaaacaatatgggttccaatatgcaagtcttgtaagttgttcagaagagttcatatgggacagtacagacagcatttttggcccgatttcttgcctcagcaatgcaagccagtccctgtacttggtagccccttatgcatttgtgtcaattctcccgttatactgcaaagtggtttcgacagagatcatgataccctacacttccaatcaaggcagaaaggattataatgcaagcgcaagcacagagtttaacgaaagtgcaaaaagaattactacattctctgagataacattcacttggtcagctcctaatatcactgatgtttgcatcgactgtgaacgacaacagcggctctgtggattcagttcacaaaggaggacagcattctgcaaacctcatggttcaaaatcacctgccaaagttatcatagtggcagtatctgtacccacaattgtagtacttacactggtggtggcctctgcactctatctgtctcttaaaaccaagaatgacgatgagatacaactgaaggttgaaatgtttctcaagacatatggcacatctaaaccgacaagatacacattctctgaagtgaagaggattacaagacggtttaaacataaactaggcacaggtggatttggaagtgtatataaaggtgagctgtcaaaaggagtacctgttgctgtaaagatgcttgagaactcaaaaggagagggggaagagttcatcaatgaagtagcaaccatagggagaatccatcatgtcaatgttgtccgcctcttgggattttgctccgaaggaacaaggcatgctcttatttatgaattcatgcctaataattcactggagaaatatatattctcacgtgattatattagttctcaagaagtcctagttcctgacaagatgctcaaaatagcattaggaatagcccaaggaattgagtacttacatcaagggtgcagccagcgcatcctccactttgatatcaagcctcacaacattttgctagaccacagcttcagcccaaagatttcggactttggccttgcaaagctctgcgcaagggatcaaagcattgtcacattgactgcagcaagaggcacaatgggttacattgcaccggaactatattctaggaactttggcgcggtatcttacaagtcagatgttttcagttttggcatgctagtgttggaaatgttgagcggaaagaggaactcagatccaagtatcaacagccaaaatgaggtttttgttccagagtggatatatgagacaatagtcagtgcgcaagagtcagaatttgccaaggatatgacacaggaagagaaagaaaagttgagaaagctggccattgtggcgctatggtgtgttcagtggaacccagcaaaccggccctccatgagaaaagtggtgaatatgttaacaggaagcttgcaaaatctgaagaatccccctaggccattcgtctcatctctaagctaacctacaccagaaaatctggcgagctaaatgtatcagcatgttacatacaagttgagcatgtcatgatgtccagtcagttctgaaaattgcactctgaatgtaatatgtagctagaacaatacttctatttcctaatcgatttgtgaattgtaagcatgcaaaaattgttacttcctccgtttcatattataagactttctagcattgtccacaaaaaaaaaaaaaaaaaaaaa

SEQ ID NO: 53577 - DNA, 920 bp, Oryza sativa
  Clone ID: PAT_MRT4530_55765C.1
gcacgaggcacgcgtcccttgagcccccaaccgatctaccacgcgtgcgggcgcgccgttctcctccccacccggccgccgcagaagcgcagaccatcaccggatctttccgcgcgaagacgagcacgccttgtgaatggtgggagcccgcacgacctcccccgcctccccgccgcagccggagagggcctccttccgcagcttcggttgctgcatgcagggctggcaccaccgctgcatcggcctcgacccgtgaacgcctcgtcgccggcgacgagcgcgcaacgggcgcaggatttcgtcgattcgattcgactcgactctcccgcctgattcttttttttttttggtcgtgagttcttcctcttcttgcgagaaaacagagagaaaaaaagaaagttaggcaattctttgattttagttggatttgttccgatttggccgttgctctaccgccgacgatgatgaagctgggcaaggcggagtccgcccgcggaaaggtggcgccggccgggtccggcggccgagcgcgcatgctggtgacggtgaccgtgctcggcagcgccgggccgctgcggttcctgatcgacgagggggagacggtcgccggcctcatccgggctgcgctccgctgctacgcccgcgagggccgcatgcctctgctcggtgccgacgccgccggcttcctgctttacaccgccaacggcggatccgacgcgctcagcgccgacgagaagatctacttcaacggctgccggagcttcctgctctggcagaaggcggcgcgcgacaccatggccaagggcggccggcctgagctggcgaatgtcgcgacctgcaatccctgcaagaaacggggcggcggcggctggaagggcggcctgaacaagttcctcctcagcttcagcttcaaggtgtga

SEQ ID NO: 53578 - DNA, 619 bp, Oryza sativa
  Clone ID: PAT_MRT4530_55766C.1
acagcgaaggaaatttgttggaaaattttgagatttggatttttgtctaggagaggggaaggttagaagaagttgagatcggtggagaactggagatcgaggggagatggatcagatcatggggaaagtgggcgggtactggttcaagcagaatgccggcaaggagatcaacaacatcggcgacgatatcaattcaatctctagcagcattggagatggtgccaaatggatggtcaacaagatcaaagggaagatgcagaagccattgccggagttcctcaaggagtacgacctcccagtgggtctcttcccgcaggacgcgaccaactacgagttcaacgaggagacgaagaagctgacggtgtacatctcgtcggcctgcgaggtcggctacaaggactcctccgtgctccgcttctccaccaccgtgacgggctacctggagaaggggaagctgtcggaggtcgagggcctcaagaccaagatcctcatctggaccaaggtgatggccgtcaggaccgaggccaccaaggtgcacttcgccgccggcatgaacaaggccaggaatcgcgacgcctacgaggtcgtcagggatggcgtcggcatagacaagttctag

SEQ ID NO: 53579 - DNA, 177 bp, Oryza sativa
  Clone ID: PAT_MRT4530_55767C.1
ggtttctgcgccgcacaatctcccagcgctgtgaaattaaaagagatctctctctattagcgctatatgtctgcgacatctcccccatctcgagatgtcgacatttcgataggcccggcccctgtcacaatataggagaggagagggagaggggcacaagggagagcgccctagcca

SEQ ID NO: 53580 - DNA, 304 bp, Oryza sativa
  Clone ID: PAT_MRT4530_55768C.1
actggagggcaagaggagaggcaaccaccgctagtaatgaacggtcaaagcactccacagctccctatgcgtcagatgcttaagaaagtttttacaagagaacgagagcatgatcaagaagaagacactgactttatggcgccaggttgtcatgttaagagcgcggcagctgacaaagcaagacaagatcatacaaagcataagcttagtgagcaggaaccagaggatgaagtggaagaggaagatgaggatgaatatgaagatgatgttgaggatgaagatgaataagtagaaaaggatgacg

SEQ ID NO: 53581 - DNA, 393 bp, Oryza sativa
  Clone ID: PAT_MRT4530_55769C.1
cacgaggttgttcaataacctggctattcttgtgctaccttttactcgtctgaatatctgactaaatcagctcattgatttcccaatacatgccatattctattattccagtgagaactatgtatgtttctcttaaaatccacttcgaagttagagctatcgttgtaactttttgtcagcctgttgttttttcctttttggaaggtagggtgaaaactcctgtgagattctaccaaaggcatgtggcacactagcactacagtatgatgccttatcaggggcagtcctatgttcagctaccctggtgcaccggacaccgggtagcttggccatttctaactgtgttacgctaccttaatcacaatattactcaataattagcttattagtatg

SEQ ID NO: 53582 - DNA, 1299 bp, Oryza sativa
  Clone ID: PAT_MRT4530_5576C.1
atggcgatccggaacttctggtcgatggccgcggcggccgtcgggttccggctcgttctcgtgctcttcggcggggacctccacctcgcctcccgccccgaggtctccacccccctcacctccatccgccgcctggcggaagggtactggctgaagcaggcttccatgtcgccctactccggtctgttggacatcatgatcatatatattgcagattttatagctgccatgcttatccgagcaactggtcgtagactccaaatagcacgcaacagaaacttgaagtcacttgagctcacagaggcactacttattgttcttattgatactgttcctgcagttaacctattgagaacaaagttctttttccagatcattcttttattgggatatggtccagatgctcctccaacaaaagtatttcgtataaaaagctcaagtgccagtaaaactgacgtatcagacaatgataaaagttctagctcaagagatgttcaacaattcttgtggaaaccagttttccacttcatattgtggatgcttttctggacattttatgtgttgctattgagcagcatagttctaaataaagtgggtggtcttcaggagatgtttgaaaaaagcttcttccttatagtcttcaatatgaacattgtttttatggtattaccattggcaatccgtctgaagcatcgtccatgcttccttgccttcatttacacagcaattgtcgcaatattgaaatcgtatccatcggtcggagattcagctctttatcttggtcttttgggcctatttgctaatgaattagcagagatgcaattcactttcttcttgttttttggatatatcggagtctctctccttagccctgtcatgcacaacctgtggatctggagggggactggcaatgcaaatttctactttgccactggtttggcttacacttgccttcagaccgtgttggttgtagagagtggctttttaccctttaattcctttacagagatatattcattattggggcctcgggggtcccaggtccatcgataccactaccgtgctaataataagtgtactgagcttcattcatggtcacaccaacaaaatctgtgtagttgctgcaggtatattgaaggttatagagttagaaagatatggggtatgtctcatgggtcctgcggatatccgaattattatccgtatccgacggaaacctggtaccatattcgtattcatatccgggagaaaacattcgtattcgtatccgaactatccaagaattatccgatccgaaag

SEQ ID NO: 53583 - DNA, 174 bp, Oryza sativa
  Clone ID: PAT_MRT4530_55770C.1
gccggtgtgtatgagttagtcgataattctgaggaattagtcgatgattcagaggaacttcctatttgccccgacgtggcgtgggcccgccacttaacggttctagacatatttccaagtatgcctaggatggagaacacgtatcgtgctggtgcaaggctagattctaagtag

SEQ ID NO: 53584 - DNA, 262 bp, Oryza sativa
  Clone ID: PAT_MRT4530_55771C.1
acagaaaaatatttatatgcaagcgtgcattcatgtcaagaaaaatatctgatgcaagtgtccaataagctgacataattagctgaacattatatgtatatggatgaattaattaattcgagaggaattattaattacgctttgggacgcactatggcgtaaagtactattactccatgggtttcgggttcacggttcgcagcttctgtttcactaaacctgctttgcttgttacaggcactgatgtgcttacaagtctctt

SEQ ID NO: 53585 - DNA, 2783 bp, Oryza sativa
  Clone ID: PAT_MRT4530_55772C.1
ttttttttttttttttgatctcatgctacagatttcacccacatttattcagttaaaacaaaattagggccacgtctagtaagttcaaaggaaatcctgcacctctgaacacatacaaaatgcatctcttcagacaggagatgagattaattacaacattacactgaagcttccagctcagtcagcaatgtacactactagttacacttacggcttcattcattcagtagttcagtgcttgctagaatatatttgtagcctttgtcctataaacagatttatacagcaggaagaaacggatattcagatgtttccctaccaaaacagctactggattcctagcagcacagcattgacagacaataaatagctttcccaatccaatggaaagtgtgataactgaactctgaacaaccaattacacagcttcaactgaggatgtcagctcagatgagcagagacgcgaagagcgccgtcaccatcggtagaatgccggctctcatgacagcagcggcctgagagcctgacggcgacgcaccgggtgcaggggtgctcccattggcagcgccgccaggtgcattcttcggcgcggcagaagggaacggcggttcagtgacgtctgatgagttcagtaccggcattggtgccagagctggtggctgggcttggctgccgttgagtagctgcgctaggccgccaatttccgcaggattcatgtatgaaggcatgttaactcccagaccggtacaggagttcactgcgaaccggatatcatgcgtgcaagcagcaacagtgagtgacaccataatatggccaggataaattattttgtatcttctgactgttttcggaaaatcagttatgatgccatcaatattaactgactggacatagctattgatttccactgttacatctgaaaagaaatcccaaggtggtgatacaaactcattccggaacacctgtgcatagatagctagcccagcagaacggagatctttcacaagatttgtttccttcatgataaagccctggctctcggggaaaatagattccctgtcaacaatgacagcatcagcaaatttcttcacatctaccagtgaggaagcagaagcatccccgatagttgatgggagagtgtagacaagcttgtatttggtttccagctgcttcaggttgacaagaacagcactatcttctgactggatcataacctccttggctttggtagtttgattattatagccagcatcacttaaggctttggttacagaatcaacaacatcaaatcctaatgaatttgccataaatacagcattctttatgatgatcatgatgccagacaaatctttatccttagcaaatgttagaaagtcagataacctgaagaaatttcccgcatttttgtgcactgggttccttacaagataatatatactctctggggaagatatcttgggtctcaaatcgctactgctaatatcagcccaagtgagattgaatgtgaagattcctggagtaggctgaatatctttaaagatagaagcacgattgctgaaaggggttctctgaacattcgtggtctcaaacagattaattgaactcatgcatacaggaactccatcactggtcatctgaatggaacaatcaatgacatcggcgccatcatcaaccgctttctgataagccaaatccgtacagtctgggtagtctccactagcaccattgtgcgagataattaatgggctcccatgatctgtcttactgcttacattcaaattagtgaaacaaccaatagccgctgctgcagtgagtgggaactcagataatactccatcaacagagaagttatcactaccaacaaaatgcaaatattcttccaacggatcatagctgtaattatacggaataattctatcatttgcaaagtcagaagcatatatttctaaacctgcactgtgggcatctctgacaattgatttggcaggctgaatatagttattagttgtcactggccaaatgtactccttgggaaccattataccagaggcaacagtcttaataaatgtcaaattactcaacagagaaccatatgtttggtttgaagaaggatcagaactggttgcatcaagaaaacgaaacactagcttcgttttgcgattaactcttcctgatatactttggagaaaacccaattcaggtgatgagatatactgcacagaaccacccttcggaattgaaaggatgtattttgtcatattcaaaccatgctgtctgtagaaaatatcgtgcaactgatcccacctaactacaaatggtaatttctgcacagtgtggcagataacactttgcagcgaagacatggtatagtcaataggaaaccatccttttttttcttcgccgttgacaaggtatgccttctttcccgctcggtaagcttggcttatactggtgcagttgtccataagtaaatcccggaggcaaattccgacaccatccttggttagttgcacattgcaccacaaaacggtgtcacccgaggtagaagacaaggcaaaaacgtaggcatttttgctggaatcaggaaacactcctgaaaagccaccttcagctatgacgatgggcgcgttaccggagagggtcttgtaggccgggggcctctgcgcggcggcgcctccgcccccgcctccgcctgaaaggagcatcaggaggaggccgcagcaccacagccgcacggcgccaccgccaccaccaccaccaccaccccagctgctcgtcgtcat

SEQ ID NO: 53586 - DNA, 297 bp, Oryza sativa
  Clone ID: PAT_MRT4530_55773C.1
atgccggtgcagtggtcccacatgcctgcagaggttgagcggtggtggagcatcggtgcgtcagccattgactcgcaggtgatgagcagcggcggcggtcagtcacgcttagcggcggctggtccggtgctagccttctcccggacctgtgtgttggcgctggcggggctgatgcagcttgagattgaaggagggtcattgccttcttgctcaaatccctcttcttcctccttccctcaagatccagcgggcaagggtattggagcccccatgctagatctgtcacaggtgaattaa

SEQ ID NO: 53587 - DNA, 2178 bp, Oryza sativa
  Clone ID: PAT_MRT4530_55774C.1
atggagaaatatgtgcctgtgctcttgagcttcgcaatgcaagtggtcctattctttgcgggtagatttcacgtgcacatcactgacaagttcaccagggtcttaatctcatcaacttatctaggggcagatatcatagcaatctatgccctcggtggcctctcacgacaagagggtaacccccaatcaattgctttcttttgggcgccatttcttcttattcatcttggtgggcaggacacgattactgcttttaaaatggaggacaagaatgcatggttgacacgttcagggaaacttctgttctatgctgttctggctgtttttgttttcttcaattctattggaagacacaaggagcttctacttgcaggaatatttatgtttgctactggatttatcaagtatttcactaggtcatggtctctcaagtgggggagctttgaaagcattgagaactccactattcgacacatgtatgagatacaattgccagaagcgagcaacgggtcgaatatgacctattacgattatgttctcactgctttaaattccatgttacaaatccatgatatctttgctgcacgcagtctcaggtctactgctaactctgagagtgaagatgaagaaatagtagaatcggaagaagctgctagatccgtgagagaagatgaagaagcagtagaattggagaaagccactaggtctgtggatatagatcaagaaatagtagagcagaaggaatataaaatattaattaaagatgatgaagtagtagaaccgaaggaaaataaaatctcaactgagaatgatgaagctatacaatccacaggaaataacacaccaattgaaggtgatgaagaagtacaattggagggagatgaaatatcaatcgaaaatagaaaagcagaattggagaaaattataattgaaactataataaagcccgaattaagtttggtgcagcttcagctcggcatgatgtatgatgacctctacacaaaggcacttcttcttagaaaaaagggaggtattgcacttcgattcattgctatatctacctcaattgttgcttttgccctctttctttcaacagagaaacggcggtatagtaaagttgatattgcggtcaccatgtcactattcattggagaacttctccttgaagtttgcgcagtgcttattttcatgatgtctccatggacgtgggcatggttgaaggttcgaaagtacaactggcttgcctgtttttcatggtatcttttttccagtcgcattggatggccagagaataggccacggtggtctaattcaatgggacagtacaattgcgtgaacaggttggtaggcatcagcccgccaacatcatgcacacccaaaattatgacctatttgagaaacatagcaaacaaagttggtgctaaggagatatcttggataaacaagctgatacacactgggtatgtcaagacggatagagatactatggaacgagttgtgtttggcctttatggcttaatgaatgaagtcgatggtcaggatacagaatacctagaatggagatatgttggctcattcctggaacagatacaagatgttctcaccgcagactttggtactgctcttctcatgatgcatatggtcacagaggttttcctcaggcaataccctgggaatcattccttggtggatgtctgcagaaaactgtcaaactatatgatatatcttttggttaaccacccttccatgcttccactcaataccagtgcaatatcctcgattaaaactgcggaacgtatgttccagaggaggactaatgacatctctgatgttgagcattacaaaaatatccatgactcgttactagtgggtgaccagcctgaaggagatggggtacttgacgagctggtcgaaatgtgggtgagagtcctcctctattccgccggcaagtcaagggcggagcttcacgtggaacaactggccagtggaggggagctcatcacctttgcttggttactcatggccaaaaatgactgcggtgactccaggatgaaaaggattcaaatcacaaattttagtcctcgtgatgaatctgacgattgctatgatctccctatgaaggaaggccacgctttccatatcgtccatcgtagtgaagtcgatattcagcgtgattga

SEQ ID NO: 53588 - DNA, 1682 bp, Oryza sativa
  Clone ID: PAT_MRT4530_55775C.1
gcttatgaagaattcaggtgcggtgaaatataaaacatatcttagttttactcccgtataagagtctgttatttaagatagtttgaaagattgagcaccttaaatggttttctactgaatacattgcccagctttcttcgctttgagtagaagagaaagagtagaacagaactgttcagaaagaattagcaaaacgaagcatatcagagctttttttttcttttcaagaacaaatatggtttttctattccttttattgcccatttgctttcatcaaaatacagggtggacgtatattattttgtctattgcagctatatacatttgaaaggaaaaaaaattaaagacgagattttgtcaatgcagcaggtttgaagctggcgattccggtgatctctcttccggtcaccaagctgttgatgtcataggtgccttcgtacgagaagattggctccagatcacagaacgcctttgctaccagaaagtcagccaaaattccgtttccacccagtagctcacggccaagagaaaccacctccctagccttcttggatgtccatgccttgcctaaactagcatggcctggtgtcattttgcctgattcatacagcttgcacaggcgccagccgacaagaagcatggcttggatgtttcctagcatgcgaacaagcttttcttggttgagctgaaaagctgccaacggaactccaaattgctttctttctttcaaataccgatgacacatgtcgaagacccccatggatatcccaattggctgccatgccaccataatgcgcgacatagcaaggaccttgtttatgtcttgaaatgaattgattccagttaatctatcttcgtcagggacaaatactttattcagaacaatgtcggcattctgaaccattctgagtccaattttattttcaatttttgtacatttcaaaccaggagctcctttcttgacaataaatccatttagttgatttgtatctgaatttctagctaagatgatgagcacatctgcaaaagtgccgttgcctatccaacgcttttggccatccaaatgccaaccgccaggcaccttggtcgctgcagtccttaatgaacttgcatcacttccataatctggctctgtcaatgcccagcaaccaattgttctaaactgcgttaatgatggtaagtacttctgcttttgagcctctgatccacaaagtgctatttgcacagaaaattgaaaggacaaaaatagtgagctcagaaaatagttgtcttggtcagtctttgttgtccctcctgccaagccaagagttgcaagtttgggaatggcatggaagggaaattctgctttctcccagtactctgtcataatgggtgcaatttctctctccataataccacggactttcttcctaagtgtcttctcttcatcagtaagcaaatcatcaaactggtagtaatccgatacggcgggtgggaactgggacgccgtcgtggcctgcgggaacgcgagcgcgacgtccaacgccggcagccccaccttgccgcctccgccgccgcctgccaagctccccatctccgccggcggggatcggatcgagctcgccgcagccgcccgctcgctcgaggacgatggcgagatcgatcgatggatatggaggaggtagaaaagtttggaggatttg

SEQ ID NO: 53589 - DNA, 1161 bp, Oryza sativa
  Clone ID: PAT_MRT4530_55776C.1
atggcgccggcggcgccatttccacgtcgtcttctactctcgctcctcctcggcgtgctcgtcgtcgccgtcgtcgcggcggccgacgtcgagtcgtcggccggcggcggcggtggccgccggcattcgccgcggcggacgcgctactcccgcgtgttcagcttcggcgactcgctcaccgacaccggcaacgcggccatcctcccggccaccgccggcgggcccttcacgcggcctccgtacgggatgaccttctaccaccaccccaccggccgcgcctccgacggccgcctcgtcatcgacttcctcgtgaaggcgctggggctgccggagccgacgccgtacctcgccggaaagacggcggcggacttccggcgaggggtgaacttcgcggtgggcggcgcgacggcgcttgacccggcgttcttgaagagcaggggaatgacctcctccgtgccagtgtctctcagcaacgagacgaggtggttccaggatgtcctgcagctgctcggcgcatcagcgcacgagaagcacacaatcgcggcaagctcaatcttctatttcggcgagatcggattcaacgactactctttcgccctctccgccggcaacggcaccgtcgacgttgcggcgagcttggtgcccgacatcatcgccgtcatccgttcggccgtcactgccgtgatcgccgccggagcaaggacggtggtggtcgccggcatgataccaattggatgcgagccggagatgcttgccctcttccccggtggcgcaggcaactactacgacccggcgtccggctgcatcacgcggttcaacgacctcgccgagctgcacaaccgtgagctgcagcgggcgctccacgagctccgccgagcccaccccggcgccaccgccgtccgctatgccgacctttacggtccagtcgccgcagctgtcgcttcgcccaaagaatacgggtttgggagctcgccgttggcggcatgctgcggcagcggcggtgagccgtacaacttcaacgccaacttcacgggattctgcgccacaccagggtcgacggtgtgcgcggacggcccatcatcgtcggtgtcatgggacggaatccactacacggaggccaccaacaagctcgtcgcccgtgccatcctgacacgaccgtga

SEQ ID NO: 53590 - DNA, 386 bp, Oryza sativa
  Clone ID: PAT_MRT4530_55777C.1
tagcacacgcgcaccaacgcatcatacatcgctacatcccagcgagatagctagggagaaagataagaggaaaactaaggccgagccaggcatgggttgctatcatctgggcaagttcgtgtcgaaagctctcggaaaatgcaacgtgcgcgagagggggtggcgggaggagaggctggactacaccatggactacccgcccggcccacccacggagacgtactacatgcggccggtggcgcgcacggacaccttcagcgccgccaacttcgtctacgtgatcccgactgcagagccggcgcaccagcaatcccccgagccccattcacagacaccgccggcgacggcacagcaacagcaacacgggcccgagcacgagcaccacc

SEQ ID NO: 53591 - DNA, 562 bp, Oryza sativa
  unsure (1)..(562): unsure at all n locations
  Clone ID: PAT_MRT4530_55778C.1
gtgttattnttgggcaccccgggtcaaccactggatgttccggttgtntnnggtggganttnggngnggataccatttcacaccgggaacagnnaggacntgnttaccccaggtngaantnaacnttcattaaangggaacaaaaggggganttccaccgggggttccgccnctttnagnactagtgaatcccccgggcatccccgaattcggcaggaggggagttgggantngagacaanatgcacangtnatcnnctcgacanatagtgtnanngtgcatngaatgtagaannantttcngngttcantgggctttnggtgcaattagtagacgagtttaggagangtttagnnttttagtngaagtgnngtantaatnttttgnccnttgagtntngntggtgattntggagaacaatccganaatcctccgaaaagnctgtaaanatatttatgtcaagaacaagatcagtaccagattcngagcatnttntgagtatantaagannaaaaaaaaaaaaaaaaaaaaaaaaaaaaaaaaaaaaaaaaaaaaaaaaaaa

SEQ ID NO: 53592 - DNA, 846 bp, Oryza sativa
  Clone ID: PAT_MRT4530_55779C.1
atggtgcgcatggctggtgtggatctggagtggtcacacaatgtaagcggggccggcctgggggaaggcggaacgttacattatcttaggattatataccagcgcggaggaatacccggattatataccggcgcggaggaataccctttggccggtcaggcgtcacgcttccagagccaacttggtgcaaggtcactcaccggtattcagcggtacgcttgtctttttcccttcccgagcaaatttctccgcgtggcgagtcacgcactattctccgactccatccttcgatttcctctcagctcgcccccagtctccctctcggcttcttcattcaccaccctccacaactacaaccatgcgagcacggagagcagggtgctagcgaacatgactgcagtgacggcgaccatcgattaggagcggcctccggcgatttaggatgtcggcgaggatggcatcgaaataaggaccaaatcccatcgacgagcaaacccgctgcttgattgctccatccgtcactggccatcagctcagccacctctctgcctcgccccctccctctctcaccctccacatccagccactgcagagctctgagacatcccctgaagccgagagatggccggctcgagcggaggcgcaagggggcatccatctccctccactggcgtcgcttctcgcctcccccctcatcttccattgggcgccgcatgtccaggcagagcaggtcggtagatcacgccatcaccccctccaggaggttttttcttgtgatttttttgttggatttttctccaataatagcagcccggattcttctggataagatcacatgttttgtgt

SEQ ID NO: 53593 - DNA, 357 bp, Oryza sativa
  Clone ID: PAT_MRT4530_5577C.1
atgcgcttgaaccattctgaaaggaatcctattggtctcaccgatgatgaactcagtggggtcggggttgccgactgggccgagaaagtagtggttttcatgcgacaagctggccttgtgttttccatcaacagcgctgcgtcgcttcgctgctcaaccgctgttggctcggcgctggcggcgcccaagaagctcctcaatggcagggtctccatcgaggagccgcgcgccggcgacgtcggcgaggagtgcgacatgtttgacccgctctacgttggcttccgctgctccgagaacggccgccccgacgacccctacaccaagtggcgctggcgctccttgcgctgcttccattga

SEQ ID NO: 53594 - DNA, 435 bp, Oryza sativa
  Clone ID: PAT_MRT4530_55780C.1
atgggcccagggaggtgtcgatgctaccaattttggtcgttaacaggaggtgacaggtggcagcgaggcgggaacagcgcgagcgttgatggggaggtgtgggcgtgcgtgggcgtcaatggggtgaggcgggagaggaggagggcggtgacggcggccgtagtggggaagcacggcgatagcccggcggagttccgcggcggcaaagatgggcccggggagacggcaggcggcagcgaggcaggaacggcgcggacccctgccgccgtcatgctgccgctgcggcgctgtcctcgccgacgcgccagcgaattcatcctcttgctcgccgtcgccgcgatcgctttaatttccagtgatccgtcagcatcaggaaggaaggagctggcacgagtcgccacatgccattctgaagtgaatttgctgaaccggtaa

SEQ ID NO: 53595 - DNA, 271 bp, Oryza sativa
  Clone ID: PAT_MRT4530_55781C.1
gcacgagggcaaaaagctgtgcattgaaaagaaagaataagctgtaaaaactcattttgtgtttcccatcaccgtcaatcccagtttccagtaaatacacgatccacaagggttgcaggtcaaagcaaccacttctgctgtgtgaggtactgaggcaggcagtctccttcactatctgtctagctatcgccaaatgttcgtcgtgagtcgcagggacaaccccaggtcctgggcagcatcggccacggcctgatcatggggcgaaaggcca

SEQ ID NO: 53596 - DNA, 456 bp, Oryza sativa
  unsure (1)..(456): unsure at all n locations
  Clone ID: PAT_MRT4530_55782C.1
ctctctcctctacctctcggcgtggtggtggtgagcgagagggattgggatagataggcacgcacagggtaggggggacgacgagacgagggatcaatcagaatttagtcacgcacccaggaacaccaagaaaaagaaaaggaaaaaccttttctttctttcttcactttggttgcgttgcgtctccaatccagcgtgcgttgagtagatagatggtaatgccgcccacgaatccgtggcgagttcttgcgtcgcagagtggcaatctgtaggagtttctctgggggtttgttttttttttttttaacggaagaacagaatcaaatcgaatcgaatcgaaagagaacgtaaattaatctgtggtttcttggcggcggatcgatcggcggcgatcggccggcgatggcgccgccgtcgatggattactgggtcggcttcttccgcggngccggggac

SEQ ID NO: 53597 - DNA, 273 bp, Oryza sativa
  Clone ID: PAT_MRT4530_55783C.1
atagagatccaatatgagcttaattcggatagggatccggataggagtcctacgggccttggaggcccgagtgatggatcctatatattcgtgaggggtgtgaccggcggaggcattgcatcactgtgggagtacggtgaggagaacgcacgaggaggagaaggtcgagccggtgcgatcgactacttcctctacatcgatgcgcggtacttcgcgagagttccttcgacttctcagcgttttcttctgctgcacagcgcgtcgagtggtaac

SEQ ID NO: 53598 - DNA, 395 bp, Oryza sativa
  Clone ID: PAT_MRT4530_55784C.1
ccgccgtggatcgtggtaagaggacggatgatcgacgatgtgattatcctgtttctggttattctggatgatggcgacgatgaggatgatgtgatgatggggatgaagaggagggatcagggacagagcacacatgatgatggtgatgatgatagggtcattgttaggtacatttgggaggggtgcaaaaagagggggtttcaggttcgatgggatggacagacgtgtcaaggcagtaggtccaggcaggctgtggctaggctctgcacacggagttgcacaaaggggaaacagaaagatgtaaacgttttcctgctctgattctttttcttctcattccaccctggtgagattgggatccatttcagacaggtgaaaaaaaaaaaaaaaaaaaa

SEQ ID NO: 53599 - DNA, 1556 bp, Oryza sativa
  Clone ID: PAT_MRT4530_55785C.1
cgagggcgccacgcgcgcgatgtctagtctcggagcagcgacaccgccacgtatctggcggccttgctgttgttcgccgccgcgacggcctcgtcgacggcgtccgacgagcggcagagcagcgcggcggtggccgccgccggcttcgccttggcgcggcgcggctgcgagagccgccgcccgcggctgtcgtagtggatggcgcccgggaagctgagcggctcgcaccgctcccccatcagtatcgcccgccgccacagcccttcgccaccaccgccgccaccgccgtcgggcttcccggtctcgccaccaccgccgccgccgccccggcggagcaggcgcgcgcggaggaggcggcgggtggcgcgcgacacgcggcgcgcgcaggcggccacggcgctggacgctttgctgaggaggccgccggccattgatgttggtggagagcgccccgccgcgccgtcggcctccgctggtgttggaacttctcccaaaagaaaaagattacactgagggactactctcctatacttcaaccccagcttccttccaaatcgccacttccttttgattgaaccaacaggaaacggctgagcgctgctggttctccagaacatgaagatggcgagcgcgacgccgacgaagacgaagcccacaaccatctccccttcgccttccttcttccacgacacctcctcgatccgccacgccgccgccttctccgcgtccgccgccgccaccagcgcgtacacccgcctccgctccctcaccgccacggccgccacggcggcggcggcgccgccgtccggctcggcctcgtcgcgctcggcgcacgacgaccacccgtcgttgctgccgacgaggcgcagcgtggcgccgccgcccaccgccaccgtcccgtcgctccgcaccgccaccgcggccggcgaggggggcgtcagggctcccgacacggcccgcgcggcgccgtcctccatgtcgacgcggaggaggcggcccgtgctgggctggcccacgagcaggaacccgcggctgacgtgcgcggcgagggaggcgagcgggtcggggccgccgtacgccggcgagggggggagcgccgcgaggtcgccgtcgggggacaccttgtagatccgcgcgcccacggtgaggaaggcggcgccggagtgcgggtccaccgcgacgccgcccggcggcgccgcggggtcagggagcgtggcggagaagagccgcgcgtggggccgcggtgtgcggaggtcgtaggcggagacggagcccggggacgccacgaggaggcggcggcggcggtcgtcgacggcgacggcggaggcgccgcggtgggacgcgatcgactcggtgaccccggcgtcggagacggagaggacggcctcgccgccgccggcgacgacgaagtgctgcgccgtggggtcccaggcgagggaggcgggggagacgccgcgggctggggtgaaggtgatgacgtggcgcgcggaggcggaggcggcggcggcggcggcgaggaggaggaggagaagcgggaggagggaggcggcggccat

SEQ ID NO: 53600 - DNA, 322 bp, Oryza sativa
  Clone ID: PAT_MRT4530_55786C.1
cgagtcatgcttcgatttgatccgcgcgcggagaagacgaagcgtgagagagagggcgcggatttgcgccggttgaagatggtggatctagcaacggccccctcccttacaaagcgctgagcaggacacatgctctcaggtctgcgagctggagagcatatttcagtcctccagccatgaacaggcagatgatgacaatgccaggaaccaagccctagagtttctaaatgagctgggctgacttctacatagagcaaacataatatctaaacacgataaggctcctctagcatcctttaacatatggcgatccacaaatctt

SEQ ID NO: 53601 - DNA, 403 bp, Oryza sativa
  Clone ID: PAT_MRT4530_55787C.1
gcaaaaacttgcaagaattgcccctccggtattggttcacaaaaaacagagctcccaacttcacttcacaagatctacttcgacgggggctacaaagtatataatggtataagacaactcaggcccaaaacaatttccagctttttacgacacggataggttcaaaacttaaggtttgactacaaaaagacagtttcaaacaatttttaacattttgggctttggcacccaaatcatttgtagggggtgctcaacagtttgttaaattcttttgggaccaaagaggaaattatcaccgccattctgcacgggtgcatttgcccgaggaacataaggtatttctccaacttaatttataaaaccttccttttgggcccccctgggtttaccatgaaggggggga

SEQ ID NO: 53602 - DNA, 612 bp, Oryza sativa
  Clone ID: PAT_MRT4530_55788C.1
atggccaaggcagtgatgatgctccccgtcctcctctccttcctcctgctgccattctcgtccatggcgctgacgcaggatttctgcgtcgccgacctgacctgcagcgacacgccggcggggtacccgtgcaaggccagcgtcggcgccggcgacttcgcctaccacggcctcgcggcggcgggcaacaccagcaacctcatcaaggccgccgtgacgccggccttcgtcggccagttccccggcgtgaacgggctcggtatctccgcggcgaggctggacatcccccgtcggcggcgtcgtgccgctccacacccacccggccgcctccgagctcctgttcgtcacccagggcaccgtcgccgccgggttcatcacctcctcctccaacaccgtctacaccaggacgctggcctcctgcactaccagtacaacgccggccagtcggcggcggtggcgctcgtcgccttcagcggccccaaccccggcctccagatcaccgactacgccctcttcgccaacaacctgccgtccgccatcgtcgagaaggtcaccttcttggacgacgcgcaggtgaagaagctcaagtccgtcctcggcggtagcggttaa

SEQ ID NO: 53603 - DNA, 285 bp, Oryza sativa
  Clone ID: PAT_MRT4530_55789C.1
atgttgaggaagtccgcggcacatctcgccacggtggcgcccgagatcggttggcttcgccacggcgcgcgtacgtgcatggcaacggatcgagttggcggtgctcgcatgctccgtctacgtgtttatcctggcttggggcggcccgtgtttttacgcaatactaggaaaagcattatcgcaagcgatcaaaaagggtcttcgcaggcagggcggccgtccgcctgtaagccaacgattatgaagatcgccgatcttcgcaggcgggtggccgtccgcctgtaa

SEQ ID NO: 53604 - DNA, 3084 bp, Oryza sativa
  Clone ID: PAT_MRT4530_5578C.1
tcacggagtgcccgggcccccgaggccggcgccgctaacgacgtcgtcccagtccttgccgccgacgtcgtcaccgtcgtccccgctcccgctctcctcgtccgaggcaatcccaaaggtgaaccgaggggccgacccttcgaagttagagacgatcgcgtcggccgcctcccggacttgctcccgagcctttgcctcggtccccggggggaaatcctcgagtgcgcgccatgggacgaagtcggggtcgcgggcttggtggctcgcaaggaccagttccaccgcggctcgcgccaaggaagccgatgacgattttacggtctcgccgacctcctcctccagcctctccagatccgccggttgtgtgggcgggagcttactatcccggcgcacggagatgccgactgggcgccccgcgcgctccagccgatcgacggcatcggagagctgcccgggtccgatctcattggtaaggcggagggccgccctctccccagcctggtcttgcaccaagcgctctaggtcggcaagagtgctctgagccgtggtaagctggctcaccaactccgcgccgccgggctgcccgcccgccgccaggtccttctcccgggcctccagctcagaagccctcgccgccatcaccgcacgctcggcgcgagcactctccagatgccaagcctcgcgcccagcgacggcctcctcacgtttcgcgagctgctcgcccagccggcgcgaggccaccacacggcggttcacctcggcttcgcgcttggcgagtgcggcgtcccgttcccggcatgccgcttcccggagccgtagctcctccacgccgccggccaaggtgaactcccgctggtctagcaggcgcgctcgctccttcaacgcctgagcccgccactccagctcctgggctcgctgcgcttgctcctggctgcgcgcgtcctgctcgcgctggttccgatcgaggacctcgattcgccgacgaatcgtggcctcaaactcctgcgcggagcgggcacgcttatctaaggccttgcgctcagactcgaacgccaccgtccgagcctgcagcgaggtgttggcttccgatacccgccgctcttgggcggcagccgcatcgaggacaccgcgggcgtccttaaccctcttcgccaggtcctcggcataggcctcgtactgtaagcgtgtcacacctagtgaatttccgtgcgtgacaaagcggatgtcgcccagcgcttcatccaggacacttgaggcaatcagtgccgcctgccgctcttcctccgtctcctgcatgacggagtcccgcgtctgctcgcgcgcctggatttcatccagttgggcttggcgcattttgcgtcccacctttaccatgtcgtccatggcgcggcgcccctcatcaacccgcgcgcggtccgcagcgagctgtgcccactctgcctccagggccgcttgctcttccgccagggcttgaacttgggagttgagcccctcccggacggtggaatcggcggcgacgagcaccccccgcttcgggccctcgggtagattcggcctcgggctcgggctcgggcccgcccccagtttcggcctcggcctcgggctcagggccgcctccagcctcggcttccgggccgcgacctccctcggcccccgctcccgggtggcgctccgcatggacctgggcctcggagtcgcccccgggagagacgttgccgccgctatcgctcgcggcgggtcaagtcccggctgtggtgaacccagggcagacccggtgtgcggcccgtgggccccgccgggatgctgtgaaggtcccgcggccctggatcggccgagcccaggccgctctggtcgttcggactttgtcccctgcgaagggtcggaccccgagatcccctgggaaggaatcatgctgcggggagggcggttgaaagtccacttcgggggctcgatgaagctcccccgacacggctccgtttgacctatcttccagagtcgcttcttcttccgtccagcctcaggcgcggcggggcgcttgtggcccgccggcggtcggtccgccacgcgctcggcgccccctccgcgcgggggagggggcggtcgcgattcggacatcttccgcttccctttcgggtcgctggccgagtcgaccccgggtccgcggctcgggccgggagccctggagctgccacccccgccggggccactggtccgactcccgcctgcggccgcgccgccgctacccacgccgacaacgccaccatcggcgccgccccggcgggactgacccctgctggcgccgacggccgacatcacagccagaatactctcccggtcgcgatcgctgcagaggggaaggatcccgtctggaatcagtgtttgctcggcagtgtccagacccagcacccgacgaatcaccgtcttcatgtcctcctcgccccaatcccagcgctcgcccacatgcgtgcgcatggggtcattgggtccagtgtactcccacgcgccacgggcttgatcttggaggggcgcgatgcggcggcggaagtagtcgccaaagaccattgcccctgtgaggcccaggcttcgcaggcccgggtggtccggcagcgcggtgtagaaccagtccttcttccagtcctcccatttcttgcggagataactctcgatgtattgccccgccgtgcctggccggggctggaagtaacatccccccaccaacgcaccatgcagcagctgtgggacgaagaaagactggaatagccgcatcgtcggccgcaccccgatgaacatctcgcacaaatgcacgaagatggctagcgtcatcacggcgttgggtgcgagatgcaagacatggatttcgtagaaatccaaaacctcatggaagaatccggagaatggcgggatcaaccccgccatagcaaaggacaggaggtgcatggatcgctccgggtaccgcggccgcggccgcgactcccccgttctcacggcggcatcttccggcttgatcttgtgggggagactaaggtgcctatccgccgtaatgcgcgatgccggaagcactgcgtcgccggcatcttgagccat

SEQ ID NO: 53605 - DNA, 1057 bp, Oryza sativa
  Clone ID: PAT_MRT4530_55790C.1
gaagctcaaacactgtgtactacgcaacacacacataggcacagttagtgcacgtacatcttgctgaatttgcttgagctcgtacgtgcgtagtgtggtagccatggccaaggcagtgatgatgctccccgtcctcctctccttcctcctgctgccattctcgtccatggcgctgacgcaggatttctgcgtcgccgacctgacctgcagcgacacgccggcggggtacccgtgcaaggccagcgtcggcgccggcgacttcgcctaccacggcctcgcggcggcgggcaacaccagcaacctcatcaaggccgccgtgacgccggccttcgtcggccagttccccggcgtgaacgggctcggtatctccgcggcgaggctggacatcgccgtcggcggcgtcgtgccgctccacacccacccggccgcctccgagctcctgttcgtcacccagggcaccgtcgccgccgggttcatcacctcctcctccaacaccgtctacaccaggacgctgtacgccggcgacatcatggtgttcccccagggcctcctgcactaccagtacaacgccggccagtcggcggcggtggcgctcgtcgccttcagcggccccaaccccggcctccagatcaccgactacgccctcttcgccaacaacctgccgtccgccatcgtcgagaaggtcaccttcttggacgacgcgcaggtgaagaagctcaagtccgtcctcggcggtagcggttaagttcgtcgtacgtctctctccggtcgagttggtcgccgccgccgccgtcgtcgtcgtcgtggtggtcactccgtgtgattgattaatttgcatgcatgcacttctgtcatgggaatgtgtctgatttcttttttcatgttatgcttaatttgttcatgtcaatttctttcagattaattaagtggtggttcaaataatctctaggtgtgtcactgtaatttgttggaacgaaagactaaactgtgcatcgatccaattggtcattttttttttaaaaaaaaaaaaaaaaaaaaaaaaaaaaaaaaaaaaaaa

SEQ ID NO: 53606 - DNA, 651 bp, Oryza sativa
  Clone ID: PAT_MRT4530_55791C.1
atggtatatgctctgtgtgtgctggcgccaacgtggatggataatgccgccgcgaaaattctcattaaaaactcgcgggccccaaccatagccgtgcgccccaattttcgtgtaaaacgtcggctacgtcaaccgtcaaaatctccttttctcctcccgttcttcccttccttgccgtcgaggtcaaatcgaatctcccgtagagatcaacggcacacacgaattgaacaacgtacgtacactcatcaggctgacgaataccaacggtgtttatacaaccgcgagatcgcacgcagaagcagacggggatcagggagggacgatattttccatggccggggaggggatcgcgatgcagtacaaaagggtgatcttggaacacggacgcttcacccgatttcggccgtccaccgcgcggtgccggatgtgcccggacccgacagcggctgctgtgctgccccctccgcgcgggatcggaaagcgacccgtgaggcggcggtggccgtggaacggcgtcgcccacacacccaagagcaaaatcctagttacgtcccacaggaaaccgggccagccaaccggatagggctatccgcttcctcttactatttgtttgcttcctcgcgacctcgctttgtcggcgagttttcagac

SEQ ID NO: 53607 - DNA, 172 bp, Oryza sativa
  Clone ID: PAT_MRT4530_55792C.1
cccgacccttcttaacctcctgtagcaggagagcctcaagtgggtgttcgtccgggatcttggactggggtgtcgagaaacgacgcgcgattagggccctgattcctcctcagctgctggcctccgaccgggtccgcgccgccggcggccaccagctcgccaaggagctctc

SEQ ID NO: 53608 - DNA, 177 bp, Oryza sativa
  Clone ID: PAT_MRT4530_55793C.1
atggccgagctcgttctcgagctcgccggtggcaaacggcggcagatctcggtgtgcaacataaggagaaaatgtaaatgggttcaaggcgaggctataggtggtattcttgcaagcattgatagcgatgaccacgagcagaacgactcggagacggcggggagcctcgggcgatga

SEQ ID NO: 53609 - DNA, 219 bp, Oryza sativa
  Clone ID: PAT_MRT4530_55794C.1
atggccaccatcgatgagttactcctcccttcttcctccccctctcccttccattccgagcttaaaattaaagacgactctgtggctgttgaattttacagtcaacaggagcaggacggtaactacaggagcatcgtgcagcatggcactatataccttcattttcaatcctgcatggcgccgtcaagaagatatgaagtaacttttggttggaattaa

SEQ ID NO: 53610 - DNA, 439 bp, Oryza sativa
  Clone ID: PAT_MRT4530_55795C.1
ttggccttctcttgctggctaatgcagggcaagagttgcacgaggatcccctccccgcacggcaggacggcgagaagccgagaacctcacagcgccggccggaaacgcgggcttggctcgccgtcggcggcggtcggcggcgagaggcgagagcgagggcggtttgccgattcccgcgccgcagttcctcgaatcccgaattatcccttctcggcttctcccagctccaccaccggatccctctactctccacgggcggagagcgcgccgcgggagattcccgacgaggggatggccggtccggccgcgagcgcggtgcctctccacgcaggctcgactccgcttccgaggcgcaacccggctgcagtccgcggcctgatgagacctccgcttctgatggtggccaaggcgcagccttgcgttcttcgccggtttactc

SEQ ID NO: 53611 - DNA, 1452 bp, Oryza sativa
  Clone ID: PAT_MRT4530_55796C.1
gggcggcgctgtcacagtgggttgtggtgtctcctgatgcggcttctcccgcggctttgcatggccaccggcgacatgcgcggcagccgccggcgagggagacagcagcaatagcgtgcagtaagcagcaggcagcggcggtgtcgtcctcctcgtcgactgtctcgacgtcgtcttccgccgcggcggccgcggtgtcggagtgcgtcgtcgtcgatgtccctcccttcgctgccgtcgctgtcggatgtgacgggcagcacgagcgcaagcctcgccgcgtcgttcgcccatgttactactctgtgccctctgtccacggcggcggcggcggcatcggctgccgccgtcgcggcggcggactactcggttcacggcggtggtggtctcgtcgtcgtcgtcgccaggccggcggctgtggtcctccacgacgtgttcaccatggaggcgacctccacctccgacatggcggatgatacttcggcggccgggtcggtcaagtgcgtggcgcaccttcatggcggcaaggccgccgtgacggggcaccaggacgggaggctgcggctgtggcggatgtcctcccgcgcgcccgaccggctccgcctcgccgccgcgctccccaccgtctccgaccggctccgccggttccccgtcccgtccaaccacgtcaccgtccgccgccaccaccgtcggctctggatagagcacgccgacgccgtgtccggcgtcgcggcctccgccgacggccgcctcctcttctccgtctcctgggacaagacgctcaaggtgtgggccgtcccgtccctccgctgcctccagtcgctgccggcgcacgacgacgccgtcaacgccgtcgccgtcgcgcacgacggcacggtctacaccgcctccgccgacaggcgcgtccgcgtctgggcgccccgggcgccggcggccgggccagacagggcctcgcgccgcccgggcaagaagcccgcctaccacctggtggccaccctgtcccgccacgcggcggcggtcaacgccgtcgccgtcgggtgcggcggccaggtgctctactccggcggcaacgaccgctgcgtcgtagtgtgggagcgggaggacagcgcgagccacatggtcgcggtcggcgcgctgcgcgggcaccgcagggcggtgctctccgtcgcgtgcgcggccggggacgccgccgacggcgcgctggtggtcagcggggcggcggaccagacggtccgcgcctggcggcgcggcgcggacgggcgcgggtactattgcgtcgcggtgatcgacgggcacgggagcgcggtcaggtcggtcgcggcggcgctcgtgacggcgcagaagaagcgtcgcgccgacgacgacggcggcgacgaggagtggagggtttgcagcgccagttttgacggcgaggtgcggctctggtcgctgcgggttgcggcggcatcgtag

SEQ ID NO: 53612 - DNA, 219 bp, Oryza sativa
  Clone ID: PAT_MRT4530_55797C.1
atgacaaggtgcaacggttgtgtcgcggtggtctacggcgggtccacacgtggccccagcggcgatgacaagctcaacggcaagctgacggaaatgatgagcgacggtgaaacaggcaggtgtcagtggcatcaaaacttggagttcctcggccggctgggccatctccagtcgctccacctctctggcaatcggcttgatagcaagaccccgtcctag

SEQ ID NO: 53613 - DNA, 440 bp, Oryza sativa
  Clone ID: PAT_MRT4530_55798C.1
agctggtgcagtcgcacgaccagcgtccgcgctttggccgcaagcggctgggaccatggatgacatcggcggtgctagcggcgtggagcggcggggcggcagcgcggcagggcacgacgcaggcggcgccagggcttgacgcggcggcaaccgggcggctgcgcggcgcaggcgcggcagggctgacggcggcaacgaccggccggtcggccacgcgcgagcgcgggaaagagcgaaggcggtggcgggttttgggcggcgacggcggaaagcggcgtcggcgcgagagagagaaaacgagagagagagagagagacagcgaaagagaggaagaggacgagagagcgagagaacgtccgagagagggaagggagagagagacagcgctctctctctctctctcggtggtcacgtgcggcgcacgtggagttggagggagc

SEQ ID NO: 53614 - DNA, 152 bp, Oryza sativa
  Clone ID: PAT_MRT4530_55799C.1
ttggataaaaagcccaacaaccaggggggaattttttggatttacccaaacaaggaaaaccctttaggattcccaaaatcagccaatataacccgcattgcattaatgccccaggtacaaaaaacctaaaaaactttttacaaccaaaactt

SEQ ID NO: 53615 - DNA, 2353 bp, Oryza sativa
  Clone ID: PAT_MRT4530_5579C.1
cccgggctgcaggacgaagcggtggctgtgcgcagatcggagttgcggcagcggcggcggcggcgatggcgatccggaacttctggtcgatggccgcggcggccgtcgggttccggctcgttctcgtgctcttcggcggggacctccacctcgcctcccgccccgaggtctccacccccctcacctccatccgccgcctggcggaagggtactggctgaagcaggcttccatgtcgccctactccggttcaatgtatcatggttcccctttgcttctattggttcttggtccattgactaacaaaaggtctgttggacatcatgatcatatatattgcagtttgatttttgtggccgtagattttatagctgccatgcttatccgagcaactggtcgtagactccaaatagcacgcaacagaaacttgaagtcacttgagctcacagaggcagtgagtaattcagttaacgtaagtgcaggagatattgcttccctcatatatttgtggaacccctgggcaatagttacttgtgtgggttcatgtacttcacctatcgagaatttaatggttgtgataatgatatatggagcctgttcacgtcttgctcctcttgctgcctttggatatgttatggctacacatctctctctttatcctgcaattctcattgtaccgatcattcttttattgggatatggtccagatgctcctccaacaaaagtatttcgtataaaaagctcaagtgccagtaaaactgacgtatcagacaatgataaaagttctagctcaagagatgttcaacaattcttgtggaaaccagttttccacttcatattgtggatgcttttctggacattttatgtgttgctattgagcagcatagttctaaataaggtgggtggtcttcaggagatgtttgaaaagacatatggttttatccttaccgttaaggacctatcgccaaatattggtgtattatggtacttctttgctgaagtctttgactttttcagaagcttcttccttatagtcttcaatatgaacattgtttttatggtattaccattggcaatccgtctgaagcatcgtccatgcttccttgccttcatttacacagcaattgtcgcaatattgaaatcgtatccatcggtcggagattcagctctttatcttggtcttttgggcctatttgctaatgaattagcagagatgcaattcactttcttcttgttttttggatatatcggagtctctctccttagccctgtcatgcacaacctgtggatctggagggtatctccctctcccatccttcccctctcttagtattgtgtgccactgatactaacatgacaataatttcaggggactggcaatgcaaatttctactttgccactggtttggcttacacttgccttcagaccgtgttggttgtagagagtgtaagttcaatgataaagcatgacaggaagctaagattacttgttacagcttgatttcattctctctaagttcaacaactctgacgctttagtgtttttgcttgtcctcccggatacaagcgtgtttttttgggcagagtttggagtatatgtagtttattatttttgtagtatatgtattgttacgattgttatttgtaccgcccgtgtttgtaaaatatggaccacaaatcatgtaacccagtagactactagaaagacaccaggtttccccctcgaactgtgcccttttgatctggcgtggtgagattggtgattggtacattacatttgtaccatcagtttgtcaggtcaagacaaattaacatggcatggactggtacctttgttttcggttgctaaattaaatagtacaagtactttggttcgttcttttttcccatcctggtaaatccaaggtctcagttattcagatgttgcagtttatatatttattactaacatttgtctgctctgcagggctttttaccctttaattcctttacagagatatattcattattggggcctcgggggtcccaggtccatcgataccactaccgtgctaataataagtgtactgagcttcattcatggtcacaccaacaaaatctgtgtagttgctgcaggtactgttttagtcagcataagcgatatcgctaaccaccaacgcttcacttatatacggaattgggctagctgctagcaagcttgttggctgcccaagtgccatcctctccaagcagtttctgttagttgcgaaaagccatgcttgtgttatgtcagtccttgcgttgttacacggctcgtattttacttacgtccgtttgagatgctaggacgcttattaaagtgtaaaagattgctct

SEQ ID NO: 53616 - DNA, 224 bp, Oryza sativa
  Clone ID: PAT_MRT4530_557C.1
cccactcccaaaaaacccacctttaaccactttaaaacaaatgggcaaaaccgacaggagaggaatttcggggaactgataaactcctaacccacattttttttccacgggctggcctaatgccatcacacccaattcggagtactaagaagaaaacacccccttcatgatgggaaattttttaccacccctgccaaaaggtacctaccccgtagcccaatttt

SEQ ID NO: 53617 - DNA, 510 bp, Oryza sativa
  Clone ID: PAT_MRT4530_55800C.1
ctagttctagatcgcgtgcggttgcccttttttttttttttttttttttttttttttttaagccaagaacgaatgtgtcatcatcatctaaataaaattgacagtaaattacatcagtagcatcatgaaaagatcatgtcttgtatgaaaccaaaaccaaatcgaaagaacagtacaacagtctggataatcacagctatggctacaagcaatgaaatggccgtaccaaaagctgcctgtccattcagggaaatggagaacgaatcattgatgagaagatgagaagatgatgccaaatgcccaattacactaacactgatggtgatgtaaaaaaaataaatgtaaggtgtaattacaggtgcagcaccgccatggatttcagcttgctggacatggcgtaggtgtccgcggcggcttttttccgcgcgagccggctccaccggtggtcgttggtgtccgagacccggcacgccgtcacgaagtcgagcaccttgccgaagaccctgaaca

SEQ ID NO: 53618 - DNA, 462 bp, Oryza sativa
  Clone ID: PAT_MRT4530_55801C.1
atgccacgagcggcaaaccacgccggagctgaaaatatctggaatctccagcgtgccaaggatgcagatgagaaggtccgcaggaagctgggaccaatcaagaccgggggtcgaaggattgacaaggagcagattggaccgctcatcggcggtaataagccagccatgggaagacccaacgatgtagcgggtacggaaaggagggtccggcatggttacatagtagttcttccccgtggtgaggctgtgcagggtgaccacgctaggatcacggtcgccggaagagaacacgaggcagggcccagggttactggagcaaatgccaaggcggcgggcctccagaaagctggcatgccaggcgcggcaaaccacaccggagctgaagacatccgggacctccagcacgccgaagatgcagacgagcaagtccgccggaagctgggaccaatcgacaccggagat

SEQ ID NO: 53619 - DNA, 517 bp, Oryza sativa
  unsure (1)..(517): unsure at all n locations
  Clone ID: PAT_MRT4530_55802C.1
ccggccgggaaatccttaattcccaaatcgggcaaaccctaaccgagtgaggagaggacgtgcggcgcggcgacggctcgggcgtgcggcggcgactacattgactgcggtgtgcacggccacgtcggcccgccaatccgccatggcgctagcgccactgcccactgagctgaaccgagcgctgaggagcaggcgagcagcctgcagccaagcccctcctgggctcctaacctccttcaccggtagtccggattagcgtcgagcacgttctgaaactaaaagacgcagtataggctacacagacgttctgaagctgagaggaatgttcatgggagacatggatgtactgtacgtagcagagatgaccaagataggagtggncaatatgcgctggaaaaattgtcacttgtgcggctttagacccacacgctggcacgcactagttcccagcttgatcgggtttctcaccaacttctccatttctttacgactccctactccgaactcaaacaaaaac

SEQ ID NO: 53620 - DNA, 2613 bp, Oryza sativa
  Clone ID: PAT_MRT4530_55803C.1
atggaggaggcttctgttacaggggaattgttggagcaagaagctccatcttcttcaatctccggtgtcgattggtcccagcttccggcggacttgctcgtctgcatcttcggcgtgctggaggtcccggatgtcttcagctccggtgtggtttgccgcgcctggcatgccagctttctggaggcccgccgccttggcatttgctccagtaaccctgggccctgcctcgtgttctcttccggcgaccgtgatcctagcgtggtcaccctgcacagcctcaccacggggaagaactactatgtaaccatgccggaccctcctttccgtacccgctacatcgttgggtcttcccatggctggcttattaccgccgatgagcggtccaatctgctccttgtcaatcctgcgactcaggctcagatccccatgccaccaccggagacaatagcgaatgtcaggatacgttgcaatggtgagggagtgccacatggctatgatctttttaaattggatatgtcatcacaagattttgatactgaaacagagccagatgatctttcctgggaagaaggccggttttacttctacacgagggttgtcctgtcagcagatccatccagtggaaactgcactgtaatgatcctgcacttgctacgtaatctccttttctttgcaagggtgggtgacactcattggacctggatcaatgttaatgagctatgttggaactatcatgatgttttgtacaatgacgatgatagattgttctatgcaatccgaggcaatggtgatgttcatgctatcaatacaaatggaccctctccaatattaagggttgtcttagacgccaagagctcacttgtcgattgtgccaagtacattgttctgtcagaattgggtggtcttcttcaagtatggaggtatcatcactatgttaataataataaggagaggaggaccagtgaattggttgtttataaggttgatcttgttgaacacaagcttgttgaacttaaggattttgaaggccatgcattgtttattggtttcaatagctccttcttcctacgagaagaagatttccccatgttgactccaaatagtgtctactgtacagatgatacagttacttatatttgtcattcaaggtttggctttcgagaggtttcttcttctgttaccggtgaattactagagcatgaagctccaccttcgacccccggtcttgattggtcccagcttcctgcggaccttctcatctgcatccttggcacgctggagattccagatattttcagctccggcgtggtttgccgctcgtggcatgccagctatctagaggcttgccgcctcggtatttgctccaataaccctgggccctgcctcgttttctcgtccagcgaccgtgatcctagcatcaccacacttcacagcctcaccacggggaaggatcactatgtaaccatgccggaccctcctttccgtacacgttacattgtcggatcctcccatggagcggcacagatcaccatgccgccaccggagacaatagcaaatgtcaggatacgttgcaatggtgagggtgtgccagatggctatgatctttttacaatggatatgtcatcacgggattttgatactgaaacagagccgaatgatctttcctgggaagaaggccgattttatttctataagagggttgttctgacagcagatccatccagtagaaactgcacagtaatgatcctgcacctgctagatgatttcctttcctatgcaagggtgggtgacaatcattggacctggatcgatgttgatgagctatgttgctgctatcatgatgttttgtacaaggacgacgatagattgttctctgcaatccgagccactggtgatgttcatgctattgataccaatggaccctctccaatgttacgggtcgtcctagacaccaagaattcactcatcaataataccaagtatattgttctgtcagaatcaggtgatcttcaagtatggaggtattataaacacgtcaataacgacaggaggaccagagaattgattgtctataaggttgaccttggtgaacaaaagcttgctgaacttaaggattttgatggtcgtgcgctatttattggtttcaatagctcgttcttcctacgggtagaagatttcccaatgttagctccaaatagtgtctactgtacagatgattcaatggaatatatttattgtgtgaggtttggtttccgagaggttggtgccttccatttggatgatagtagcttcactgatcagcttattggctcacggttgaattggccatctcctatttggttttggccatcatttactaaaaactggaaggaggtcgaaaacaacagcaacacgctcgccgccgagtccaaggtcaacacctctgatgacaccacgtccgccgccatgctggtgatctcaggctggggcctcatgaaatcggataccaacttcaccaaggtcgacaaggccacccagtctatgcacatggtatttgggtgtgaaactacaggaaactgggtagatcattgccattgtctggtgaagattgcagaggggaaatttatggcttag

SEQ ID NO: 53621 - DNA, 503 bp, Oryza sativa
  Clone ID: PAT_MRT4530_55804C.1
tatgctaggggaagggagaaaaagcaaaataaagaattgaagctagagaaactacggcggctaagaacaaactccaagcagcgggaagaggcctagccgcgctacactcccaacaagtccccaaaaacggcaacgccagctaaaaccacatatggctctccgaacgaatggactccagaaccactgagacgaaagagagtgcggagtcgaaaaccctagaatttcgttccttccacaactgccaagataccagaagcaccagggagtataagccggcgcggagatgctcaggtaagaaggccctggagaatggctaccaattctggaaccagctgccatgggggagagagggcagcccagctaggaggcgataacacccggaaccagacctgtcgagcgaacatgtagtcgaggaggatgtggttcgctgtctcaagatcctcgaagacgttggggaacggcgaagaggagatctggagccaaggatgccaccaagcggccat

SEQ ID NO: 53622 - DNA, 264 bp, Oryza sativa
  Clone ID: PAT_MRT4530_55805C.1
aaacaaatatgtgcagattgatctggctctagctttagaaatacaattacatattacatatatttgagctatccaattttaagagtttttcagctcatctgcaacagaaaaagatctaaagtataaaacccgtcacagatttttttttctttttaatgaactggcaccggtgtgtcaatttcattgaatatagtggaaaaaaagaaggcaaaaattacacgaaacccatcatccggaaaataagttgcaacttgttgatatgag

SEQ ID NO: 53623 - DNA, 1362 bp, Oryza sativa
  Clone ID: PAT_MRT4530_55806C.1
atgcgggtggtggtggaggaggaggaggccgaggtgatgtacccgtcgacgccggggaaggtgaaggtggagcagcggtcgtcggcggcgatgagccggcaggttcaccggtgcttcgcgtcgacggggaccatgttcctgtgggcgctgttcctggtggcgatgacggcgacgtacctgagcttccgctccctcgccggcgacgccgcggcgtcgtcgtcgcgctacttcccggcggcgtcgtggggcgggctgcactgggagcggcagatcagggcgtcggcgtcgccgcggcggccgcccgggtcggcggagggcgccgggctgtccgtgctggtcaccggcgccgccgggttcgtcggcgcgcactgctccctcgccctccgcaagcgcggcgacggcgtcgtcggcatcgacaactacaactcctactacgacccgtcgctgaagaaggcgcggcgcgccctcctgggctcgcacggcgtgttcgtcgtcgacggcgacatcaacgacggccgcctcctcgccaagctgttcgacgtcgtccccttcacccacgtcctccacctcgccgcgcaggccggcgtccgctacgccatggagaacccctcgtcgtacgtccgctccaacgtcgccggcctcgtctccctcctcgagtcctgcaaggacgccgacccgcagccggccgtcgtctgggcctcctcctcctccgtctacggtctcaacgacgccgtccccttctccgaggcgcaccgcaccgacaagccggcgtcgctctacgccgccaccaagaaagccggcgaggccatcacccacacctacaaccacatctacggcctctccatcaccggcctccgcttcttcacggtgtacggtccctggggccgccccgacatggcctacttcttcttcacccgcaacatcctgcaggggaagccggtcaccgtctaccggggccgtgatcacgtcgacatcgccagggacttcacctacatcgacgacatcgtgcgggggtgcctggcggcgctggacacggctgggcggagcacgggcgggggcgggaggaagcgcggggcggcgccgtacaggatcttcaacctcgggaacacgtcgccggtgacggtgccggcgctggtggcgatgctggagaggtgcctgatggtgaaggcgaggaggcacgtcgtcgagatgcccggcaatggcgacgtgcccttcacccacgccaacatcagcctggcgagggagcagctcgggtacaagccgacgaccagcctcgagatggggctcaagaagttcgtccggtggtacctctcctactacggctacaacagaggaactcacgcattcaggagccgcttgtga

SEQ ID NO: 53624 - DNA, 2780 bp, Oryza sativa
  Clone ID: PAT_MRT4530_55807C.1
tttttttttttttttttttttcctttaacacgaagatgccaatgacggctttcattaacaaatgaaattctggtacatgtacactgcccaaatacaacactctttacaagatatctatctatatgtacacgttatttacaatatgtacatggcactgcttacggaaggctcaccaaaacgggcaccacccgacgtagttttggcacaagttttcatgcgaagtcgcttgaagtataagcctctgaacctgaaccttcacggataaaccaggttccacctctcgagtgtctcctgaagccagatgctcgttaccatgttgggtggagcttcccgcccccgacaacgatgatccggaagagaaatcgcgccctgtgagcttatgactcattcgtgccatcacagctacggcacgctcattcaaaacctcgttagcatcaccgagttgattgaccgcctgtagcagttctctctcccgagctccccggggtggttgcatgagctcccgattagcagcttcttcgctattgacaactgtgtgactgtgagcatttccatagtttgtaacttgagggacttcattgaaattgaacagacgccaattgattaatgggtcatgcacaaatgcctccatcatagccataacgctatccttgtttgttcgaagtacttgcatcacattttcgcaagtggttctgaaggtaccctcaataccactaacttccatggctttcacaagcattctagtcaagcgaaatggaaccttttcgggaaacttttcacgattcattgaagcctcaaagcaatcgccaaagtcaatatgtaatatttttccactataacgatctaacataagattacttggatgccgatctcctaaaccaagcaaatagccaaccatgctcataacagccagacttctcgtataatttgtgcgccgctcaagccatacttcagaggttcggcttttaagccagagaacctttgcaaggtcatttccttcactgttttctagggcatgctgaaatacttctactttggcgatgaggggtaagtggtcataatcaggtgcaaaactcaacatacatcggtgctcctgatttaagaaaatcttcctggcatctctatattcacggatcagggcatgaagtgtgtcacaatttggaacccatccaattaaaccactgttaggagacaaaggtatgacagcatatctttggattgacagatctttctctgaagttttcctagagttctccagcagagtattcaccaggccaaaaagctgcattacacgctcatcctgccgtaaatcttcatggcctttcagcaagaatgcataatcgttgccatcacttccatgaacccacggttttgttggtctttgtttagatgttataacaatcaattgaggaacaaaatactcaattgtcacaagtggtgcatctgcagaataagttcctggtacagcaagctccaactttcgacactcaaaagctcgggtgacacagagtgcaaatccaaagttgtaagacttggaagctgtttgtctattcttctgaaaacatggtaatacaaatcccatgccttagttaactcagcatcctctcctgtagcccgatattttaaacagcattcgtgggcttccagtaattcatgaccataagcctgaatgaaagtattttcttttattgtctcaggacccctctcgagcattgcatgcaatggttcaagcactgcaagcattccctcaatattgtgctcaccaaaatacatcctgctagcttcctcaagagcctcatgccacatctcatgccacagaatggcaactcgtatcagttcctttgaaacaagctgtgcctgatcaacaagacctccactatgttggcggatcttatcgacgacctcttgcgccgctcgttgtcttaatatgcttattgatttgcaagcaaccaacagaggatacatcaatgcctgtggatgatcctttccaattcgaaccagcaatgactgtatcagttctctcactattttattatttgaatggatccttgcaattatctggggaaggacaaccaaccacatttctatattgacaagtgaaaagcctttctgcagtgccatttgaacctctgaggtagccccatgattaaaccaaagagtcaagagacgaaggatatcctgtaagctatcatcaacaccttttgtcgtggatgcgcaagcaatagagtagaaatacccagttactgctgcaacaacatattttcctgcaatatctggtcgaccacgcaaagtatagcgggacatgacttcagtgttgaacaaggcccataagtgccatgccttgccccagtccttggcattaagtgtggcatttttgtaagagaccaatatttcttgaatagaatcatcgtctaacccaggtgataatgctctcttccagctagcaagtgtcaaatagacgcgagcaataagtggtactccagcatttgatgtggcaacctggcttgctaatgttccagaataactatttgttgcggtagcaagctgcacagacaaatcctgtagcctgcaaaacgcgtcccttcgtttaagctcatctccaacagcatactggtacttcagggatgccatgactacttgaggatgtccatgatacagcgtcaattcaggggaagattctggatccaactgtaagagtttgactaaggtagatttagcctgactaatgcggccactcttccagcaagtttgcaaattttatccaggtgtctctcctcgtg

SEQ ID NO: 53625 - DNA, 328 bp, Oryza sativa
  Clone ID: PAT_MRT4530_55808C.1
atgttccagaaatcagttccaactgtgctccaggacgtcgccggcgaccccaccctgccccgcaccaagtccgtccggtgcgccgcctgcggccacggcgaagctgtcttcttccaggtccagtatatcaccaggaacgtgctcatcgtcttccttgcagccggtgatgctgtggctgatgttgggattgagattgttcgcaaatgtggttgccttcctcttgcaatcaaggttattgctagagttgtatatcctgaagatgcaaacatttaccgtgatgatcttacaaggatgtggatcgctgaaggctttatagaggaccatggag

SEQ ID NO: 53626 - DNA, 588 bp, Oryza sativa
  Clone ID: PAT_MRT4530_55809C.1
atgctgctcgtcaacctgtactcgcggctcacggcgagcaccggcgtcggcgtcggcgtcgacgacgatgacgacgacggcagcggcgggtatggggttctcgacggcgcgtgcggcggcacgctcgccgtgttctgcgccctcgccgtctccgtcgtcgtctggaaggcgtgcgcgttcgtcgccatggccgccgcgctcctcgccatcggctggcgcgtcgtggcgccgcggagatcagtggggcgcgcgggcgcgggagcccccacgccggccgagtgcgggctcacggccgcggcgatcgacgcgctgccggcgtcggagtacgagcgcccgcgcggcggcggcggcgacccggcgtgctcggtgtgcctcgaggacgtccgtggcggcgagacggtgcggtggctgccggcgtgcgggcacctgtaccacgcggcgtgcatcgacgcgtggctgcgctcgcgcacgacgtgcccgctctgccgctccgacctgtcgtcgcggcgaggaggcacggcgagcgggcgcccgcggccacggctggtgacgcacgagtcgttgctgccgccattgccttccgtttaa

SEQ ID NO: 53627 - DNA, 2316 bp, Oryza sativa
  Clone ID: PAT_MRT4530_5580C.1
atggctcaagatgctggcgacgcagtgcttccggcatcgcgcattacggtggataggcaccttagtctcccccgcaagatcatgccagaaggcgccgccgtgagggcgggggagtcgcggccgcggccacggtacctggagcgatccgtgcacctcctatcctttgctatggcgggattgatcccgccattcttcggattcttccacgaggttttggatttctacgaaatccatgccttgcatctcgcacccaacgtcgtgatgacgctggccatcttcgcgcatttatgcgagatgttcatcggggtgcggccgacgatgcggctgttccagtctttcttcgtccctgaccgcgaccgggagagtatcttggctgtgatgtcggccatcggcgccggcaggggtcggtcccgccggggcggcaccggtagtggcgctgtcggcgtgggtagcggcggcgcgaccgtaggcgggagtcggaccggcggccccggcgggggtggcagctctagggcacctggcccgagccgcggacccagggtcgactcggccagcgacccaaaagggaaacggaagatgtccgaatctcgaccgccctctcccccgcgcggagggggcgccgagcgcgtggcggaccgaccgccggcgggccacaagcgccccgccacgcctgaggttggacggaagaagaagcggctccggaagataggtcaaacagagccgtgtcgggggagcttcgttgaacccccgaagtggactttcaaccgccctccccacagcgagattccttcccatgggatctcggggtccgaccctttgcagggggcaaagtccgaacgaccgaagcggcccgggctttgccgatccagggccgcggggccttcacagcctcccggtggggcccacgggccgcacaccgggtccgaccctgggttcaccacagccgagactcgacccgccgcgagcgatagcggcggcgtctctcccgggggcgactccgaggcccggatccatgcagagcgccacccgggagcggggggcgagggaggtcgcggcccgaaagccgaggctggaggcggccctgagcccgaggccgaggccgaaactaggggtgggcctgagctcgaggccgaggccgaatctacccgagggcccgaagcggggagcgagaggagtagccgctcctccttgcacttggggcgccctcagggctggccgcgtagaaggcgagctgagagcggcccccagtctcgcaggggatccagcagcactccaccgtccgggaggggctcaacgcccaagttcaagccctggcggaagagcgagcggccctggaggcagagtgggcacagctccctgcggaccgcgcgcgggttgacgaggggcgccgcgccgtggactacatgcgtcctagatgaagcgctgggcgacatccgcttacagtacgaggtccatgccgaggacttgacgaagagggttaaggacgcccgtggtgtcctcgatgcggctgccgcccaagagcagcgcgagtccaccttggctgcccacgagagaatggcggcggaggcggagccctcccttcgccttcgtgaggaggccgcagccaagcgtgaccggaccactctcaccgcgaaagcttcggtggcccgtcacgcggaggagctacggctccgagaagaggcgtgccgggaacgggacgccgcactcgccgagcgcgaagccgaggtgaaccgccgtgaggtggcctcgtgccggctaggcgagcaactcgcgaaacgcgaggaggccgtcgctgggcgcgaggctcagcatctggagagtgctcgcgccgtgcacgcggcgatggcggcgagggcttctgagctggaggctcgggagaaggacctggcggcgggcgggcagcccggcggcgcggagttggtgagccagcttaccgcggctcatagcactcttgccgacctagagcgcctggtgcaagaccaggctagggagatcgcggccctccgccttaccaacgagatcggacccgggcagctctccaatgccgtcgatcggctggagcgcgcggggcgccgagtcagcatctccgtgcgtcgggatagtaagctcccgcccacacagccggcactcgtgctccggctggacgggctggtggcggatctggagaggctggaggaggaggtcggcgagaccatgaaatcgtcgtcggcttccttggcgcgggccgcggtggaactggtcctcgcgagccaccaagcccgcaacccggacttcgtcccatggcccggactcgaggatttccccccggggacctag

SEQ ID NO: 53628 - DNA, 174 bp, Oryza sativa
  Clone ID: PAT_MRT4530_55810C.1
atgccgagcttaagccgcaaaactgagcgacccggcagccttgatatgagcggtggatgcggaggtgacctcgggccgggagtggggtgcattaaatcattggagctgctggcggggtcaatcatcaacgagcttttggctgatggattgataaacgtcatcggggtcatctga

SEQ ID NO: 53629 - DNA, 437 bp, Oryza sativa
  Clone ID: PAT_MRT4530_55811C.1
gactgctgtgatcacactcaagctcaaactcaagctatgctgatcttaaactagacatccatatgtagtatctatcgtggctactacattgctgcgaggagcattcacacctgtggtggtgtatgagacagaattgtaatactataattgataaaatgttaaaaataaagtcatgcattatcatgcgtgacaggagatactagaacttatataaagttaaataaaattacctatttggctatgcggataaagaataactaaataaataaataaataaattgcaagcaattgcgttgctgctatgtactgaaaaagtttcttataatatcagatctgaatgctaaggacatacctaaagatgggctttcttttattgtgtaccctctccaatgtactgttgggaatcctttttgttgatttaatcatattgagaaaac

SEQ ID NO: 53630 - DNA, 1301 bp, Oryza sativa
  Clone ID: PAT_MRT4530_55812C.1
tcggccaataacatcattcagatacaaggacaaacaaacaactcctcctcatcaggccgacacccatcctccccaccccccaagcggcggcgagaccaaatcccccacttctctctcaatctctctctctgctagggtttatccctccgcgccgccgcccccggaagacgagagagcgccatggccggcggtcccgcggcggtgtcgttcctgaccaacatcgccaaggcggcggcggggctcggcgccgcggcctccctcctgtcggcgtcgctctacaccgtcgacggcggcgagcgcgccgtcatcttcgaccggttccgcggggtgctcccggagaccgtcggcgaggggacccacttcctcgtgccgtggctccagaagcccttcgtcttcgacatccgcacgcgcccccacaacttctcctccaactccggcaccaaggacctgcagatggtcaacctcaccctccgcctcctctcccgccccgacgtcgtgcacctccccaccatcttcacctccctcggcctcgagtacgacgacaaggtgctcccctccatcggcaacgaggtgctcaaggccgtcgtcgcgcagttcaacgccgaccagctcctcaccgagcggccccacgtctcagccctcgtccgcgacgccctcatccgccgcgcccgcgagttcaacatcatcctcgacgacgtcgccatcacccacctctcctacggcatcgagttctcgcaggccgtcgagaagaagcaggtggcgcagcaggaggccgagcgctccaagttcctcgtggccaaggctgagcaggagaggcgcgcggccatcgtgcgcgcggagggagagagtgagtccgcgcggctcatttctgaggccaccgccgccgctgggacagggctgattgagctgaggaggatcgaggcggccagggagattgctgccgagctggcccgttctcctaatgttgcatacgttcctgctggggacaatggccggatgctgctcggcctcaacgctgccgggttcggccggtgatccgtcactccaattttacccctttagttgcccaggcatccgctctgtgttacattaaactggaatgatggtatggggaattatgttatctgctacttttggtaatatttagtctggatgtctttgaacggaatgtgctaatctttgtgatccaaataagttctgggtctaagactcatttatgttttaaacaaaaacaaaaaaaaaactcgagactagttctctctctctccctcgtgccgattcctgcagcccggggatccact

SEQ ID NO: 53631 - DNA, 444 bp, Oryza sativa
  Clone ID: PAT_MRT4530_55813C.1
atgggggagggtggcggcgtacttggagaagcggcgtacttggagacggcggctcaggccgtagttgtccaaggcggcggcggagaggcagcggcgaagaggtcgaggcagtcggtggtggtcggggatcccagcgtcgtggatcccggcgtcggggaggtcggggtcggggaggtcggggaagtgaggaggcagagaggacgaccggcggcgagggcgacggtggagagggcggagatggtcgagagagtgagtgaggaggcggcggtggagagggaggcggcgagggcggcggagagggcggagatggcggcagagagggcggcggagatggtggagcagagggtggcggagaggttgaggcggcgaggaggacggtggagaggagggcggcggatctggatcgagagagtgaggagaggcggcggtcgagtgagtgagtga

SEQ ID NO: 53632 - DNA, 504 bp, Oryza sativa
  Clone ID: PAT_MRT4530_55814C.1
atggagcgcggagtggcggcggccagagtaggccgacggagcagagcgggcgagcggcgcccgatagctgatggggaaagttttttttcccaacaaggactagtatctacccatgggtataatatgtacacccggggtcattgtaaacgatctcatagatcaatacaactactgtcggcgcatcaccactctctttaccgaggtttttacttatcattcggcggaacttggcacttgacgcgaggctgcatcggctttcgatctccagcgaaggggtcagccctacgttctgccggccctggcaattgtattggctacgtcgacatcgttcaaggctgcatcgtttcgacctcttggattgctttggttcggttgatatatttgcctaccaatttatcatatatctatgttaatttagtcttagcatatcgatctacctctatcggctgcttctcgctttacggtatctgtcggtatcggctaaatcgtcttgctagattagat

SEQ ID NO: 53633 - DNA, 334 bp, Oryza sativa
  Clone ID: PAT_MRT4530_55815C.1
ggaaatcccaacgcaattttacattggggaccccaaggggaattggtataaggccatagtttataacatttcataacaaaaacaaaataattaacccttaaaaaaaaccacaggggcccagacaaaaaacccttttttttttaaacccaaaatttttataaaaagaggtgtaaaaaaaaaccttaggggcgccgcaaaaaaaagccttgaaatttttaaaggcccccagagaaaaaaaaagggggagcctttttggggccaaccacagtttaattaaaaggttattttcccaggggggggggtttgtttaaaactggagaaattgcccgggggg

SEQ ID NO: 53634 - DNA, 239 bp, Oryza sativa
  Clone ID: PAT_MRT4530_55816C.1
gcgtcgggcactacctacagggagtaccggggggacactcacggcgcgcgcacggagcactcgacggtgtacacaaactcgcatctggctcataaaccagccctagctcatggacctgagcagttcaccgctaatggtcgtgaacacccgatccacatactactgcgactagctcgcatggctcgccatggtacctggcagcatcggatgcgtcctgttcacacatagcgtgtatatcg

SEQ ID NO: 53635 - DNA, 424 bp, Oryza sativa
  Clone ID: PAT_MRT4530_55817C.1
tttttctttggctcttcagagttttgtccatctctatcttcagagttcttcagagtttgcttaccatatgatcgtgatcaggtatcggaattctctttatttataactacaatgcaatcgctcattttacccgtaacaattaccaagagcttgtttagttgacaatagagatatcaaggcatatatggctgtttgtgttacacaagataccgatgaattttgtagtgatgcccttctattgggaattcataaatgctgccttgatgagatactacagctccaataagtattttttaatgcctagaggttaatgaaacgtatagcatatggtccgcagggctaaccaacagtggatcatcccaaacgaaaaaaaaaactatgcatgtctctccacgcgcattatttttcaggtaacatacatgag

SEQ ID NO: 53636 - DNA, 1160 bp, Oryza sativa
  Clone ID: PAT_MRT4530_55818C.1
agactggttaaaaaatgttcagttttcacttttcagcgcatcactagttgagtagttgatccttgtaaacagtttatattcacatcaacaactatatcagagagggtcgatttgtgtgacctatccatgctatttcatcgagaatgaagtttgtctaatcagggtgtgctaaactgctaatatacttgacagaaatgcagacacccccccaaaaaagagaagaacagataactaatactggtatgtatggtcactatacatgtgtgctgtcatgttaagggcttgaagcatagcctctcctcgcttgtttacagtgaagacgcacatgccaccattgttcacatcaatggaacgaaacctctcaggaggaagacctagcgcggtgcagatgagtgcgcgcaaaatagatttgtgagtaacgaccaacatattttctcctggagtaagcaagatttccttccaagcttctcttgctgttccccataacttccgaactgggtatatgccattgaccttgaaatttgaaggatcctcccgccatctggtgtacaactctggatattccttcttagcatccgcattggtcatgccctctaagaagaatagatgagcctcttttaaagaatcaagaaatataagaggctcctcctttcccttccatataatttcggcagttgactttgcccgtgagataggactagagaaacaaacgtcgaatttcatgttcgcaagggcatcgcgacatttctctgcctgcttggcaccagtttctgttaacacggacagatttgagcttccctgtacgcggctttccgcattccaagtgctcaaaccatgcctgacaagagtaatcttcttcggcagagttagcatctcattcgtaagcgatgttgttgctcctctgaagccgtaagcagcaccggtcacggatgcctcattgtcaggaggggtttctacagatacgttgctcacaccactatgagctgatctgatggtagcaacccggagtttgccggcgcgcttgcagaggcgcggcggagcgcggggtggtggagccagccggaggcgaacacggccgccggcgggcagggacgggaggcacgccgccggcgaaggctgcgtcgccagcgaagcggagcccatctctcgcgtggacgcgt

SEQ ID NO: 53637 - DNA, 368 bp, Oryza sativa
  Clone ID: PAT_MRT4530_55819C.1
ttttactctgggaaggagcacactgtgccaaatggttattctttgatgcaggagaatactcttcacgacaatactcatgccctgagttttgctgttcaaggatagtgagactgataccccaaccatgggcccttcgatgtgaataagtatcagacgattagaaacgagggtagcaagaagaatgaggttgctagcaatgtggccaacaacacttctaaggctgacacaaaaaataattcgaagaaaaataagtgttgggatgacacacctgatgacaagaagaagctgaatttcacagactcaactgatgacagatgggatgaggtgctagaccaggtggatgccaagcagggggatagcatgatgga

SEQ ID NO: 53638 - DNA, 2457 bp, Oryza sativa
  Clone ID: PAT_MRT4530_5581C.1
atggctcaagatgctggcgacgcagtgctttcggcatcgcgcattacggcggataggcatcttagtctcccccgcaagattatgccggaagacgccgccgtgagggcgggggagtcgtggccgcggccgcgatacccggagcgatctgtgcacctcctgtcctttgctatggcggggttgatcccgccattctccggattattccacgaggttttggatttctatgaaatccatgccttgcatctcgcacccaacgccgtgatgacgctggccatcttcgcgcatctatgcgagatgttcatcggggtgcggccgacgatgcggctgttccagtctttcttcgtcccgcaactgctgcaaggtgcggtggtggggggatgttacttccagccctggccaggcacggcggggcaatacatcgagagtcatctccgcaagaaatgggaggactggaagaaggactggttctacaccgcgctgccggaccacccgcaacttcggcttcccgctggccctctcgaacgatccgccacgtggctagcggtttcggagttgggcgaggagtacgacgcggtgcgggatcgcctcaggggcctgcgaagcctgggccttacgggggcaatggtctttggcgactacttctgccgccgcatcgcgcctctccaagataaatcacgtggcgcgtgggagtacactggacccaacgaccccatgcgcacgcatgtgggcaagcgttgggattggggcgaggaggacgcgaagacggtgattcggcgggtgttgggtctggacaccgccgagcaaacactgattctagacgggatccttcccctctgcagcgaccgcgaccgggagagtatcctgggtgatgtcgaccgtcagcaccggcaggagtcggtcccgccggggcggtaccggtggtggcgctgtcggcccgggactcgacccgccgcgagcgatagcggcggcggcgtctctcccgggggcgactccgaggcccggatccatgcggagcgccacccgggagcagggggcgagggaggtcgcggcccggaagccgaggctagaggcggccctgagcccgaggccgaggccgaaactgggggcgggcccgagcctgagaacaaggccgaatctacccgagggcccgaagtggggggcgagaggaacagccgctctcccttgcacttggggagtcctcggggatggcctcgcagaaatggggctgagagaagcccccagtctcgcgggggatccagcagcactctatcgtcccatggactgaccgcaactttttcttctccgactctagcaagtatgaagccgctcctgcaggttgacgaggggcgccgcgccgtggacgacatggtgaatatgggacgcaaaatgcgccaagcccaactagctgaaatccaggtgcgcgaggagacgctggactccgtcatgcgtgagacggaggaagagcggcaggcagcactgatcgcttcaagcgtcctgaatgaagagctaggtgacattcgcctacggtacgaggcccatgccgaggacctggcgaagagggttaaggacgcccgcggtgtcctcgatgcggctgccgcccgagagcggtgggtatcggaagccaacgcctcgctgcgggctcggacggcggcgctcgaggctgaacgcaaggccttagatgagcgtgcccgctccgcgcaggagtttgaggccacgattcgtcggcgaatcgaggtcctcgaccagagccagcgcgagcaagacgcgcgcagccaggagcaggcgcagcgagcccaggagctggagaggcgggctaaggcgctggaggagcgagcgcgcctgctagatcagcgggagtccaccttggcctcccatgagagaacagcggcagaggcggaggcctcccttcgcctttgtgaggaggctgcagccgagcgtgaccggaccaccctcgccgtgaaagcttcggcggcccgtcgcgcgaaggagctatggctccgggaagaggcgtgccgggaacgggatgccgcactcgccgagtgcaaagccgaggtgaaccgccgtgaagtggcctcgcgccagctgggcgagcaactcgcgaaacacgaggaggccgttgccgggcgcgaggctcggcatctggagagtgctcgtgccgagtgcgcggcgatggcggcgagggcttctgagctggaggcccgggagaaggacctagcggtgggcgggcagcccggcggcgcggagttggcaagggctctggagcaagtcccggaggcggccgacgcgatcgtctctaacttcgaggggtcggcccctcagttcaccttcgggcttgcctcggatgaggagaacgggagcgaagacggtggtgacgacgccggtggtgacgacgccgatggcgaggactgggacgacgtggtcagcggcgccgacctcgggggcccgggcactccatga

SEQ ID NO: 53639 - DNA, 2544 bp, Oryza sativa
  Clone ID: PAT_MRT4530_55820C.1
agtctcgagtttttttttttttttttttagtagtgcgagtacgatctttttcgatatgcaaggccatatcattacaagcactataaacaaaccctcactgcacagaggagccatgttcaaaatataagttctcagagttctaagcactgggtattccagtactactttagtaagactaccaacagacaaagagcatgctgaaactaagtttaaaatcacgaaaacattttacagcatgctaaaattcttagctggaagcgaactagtcagagagatcatgaccccgcagccattcacctacattaggaactgttctactggcttttttttttctgagcagatcaatgcatgcaacatcgaatggatcacttcagaattcagataatcctgccgacataaacccatccatgactaggaattgctagtaagatcgctgtcattgtctccggcagtatctgcttccttcacttcctgaatcatcttgaggacttgccaggcagttggccgactttcaggcgaggatcgaacacaggcagatgctatgtcaacaatcatagagagacgttcgacgtccactccatcgtccctcgcagactggacataggtctgaagattagttgcaaccaatactgagtgctgaagcggaggcttcccactgataagttcaaggaggaggatgccgaaagcatatatgtctgactttggagttagccttctgttggacttcatgttttctggtgctctataagcagcatcgtctttgacttctgatgattccaaaaggaatgccaagcaattgtccgtaagacaagcctcaaagtcagaaccaagcaggacattggaagacttgatgtttccatgaacaagtcgggatgcttggtgaatgtaagcaaggccctgcccgatgtcttcagctatctttaggcaggaagtccagtgaagtggttttgctcgagatgaccttgaaccatggatgagagagtagaggctgccattgggctggtagtcatagacgagcagccgctcctccttcgcctggaagaacgcccggagcgagacgaggttgggatgccgcagccggccaacggcgtccatgttctgctcgaacgcctctgcctccagcgccgcggcgccgatcttggccgcgtccagcctcttcacgatgaccacgaggcggccgtcgagcaccgccttgtacgtcgtccccacgctcccgcggccgagcacctccgccgacgcgcgcatcagctgctcgaggctgtagctcgcgccctcgcccgcgcagaacgttaggcagccgctccgctccagccgccgcgccttctcctccggcatcatcatcgccgccgtctcctcgtccggcacgcactccacatagccgagatcggtgttgtccctgctcacctccgacatggccgcgctcttcttggggctcgggtatgccgcggagctcggccgccgacgcttcttgccccttttcattgcaatcatggcacaaagtagaagcacggccacgaacgctgcggcggtagccgcaacggcgatggcggcccgcctcctcagtttccgcgaacgcggcgtggatgaatcgggcaagctgatgtcgtcgcgttgcggtccgtcgccggtggccgcggcgctctgcaccgggggagcagcggagccgttgttgccaggaccgtgaaagaagaggaggtgggagccccggcactcacggcggagaacctcgccgcagagctctggattgcccgcgaacgcggcggcgcccatctgcgccatgacgggggtgaccggcacgggcccggagaagttgttgtacgacacgttcagcagcttgagcgaagactggttccacgccgggagggagccattaaagtggttggcgtcgagccgtaggaacgtcagatgcgggaacgcgacctcaatgccgggagggagcgcgccggagagcctgttcccggcgaggtcgatggagcggagccggcggagcgacgcgaccgaggcggggaacggcccggagaagcggttgccggcgaggaagagcgccttgaggttctcgagcggggagaggtccgggatggggccgtggagcgcgttgctcttgaggctgagcacccggagctcgacgaggcgggagagcgtggcgggcgcgaacgtcccgttcagcccggacgactcgagcaccaggcgggtgatctggccgtcggcgctgcaggagacggccgggtgcgaacacggcgacaccgccagagggaaccgcagatgcgcggagggatccgccttggcgaggaatgccgcaagcagcgcccccggggtcgccgtcgagaccagcgtggcgggcggtggcacggcccgcaccggcgcgcgaggagggaacgtgggctgcgagtgcgacccgccgcctaccgccgcgggcggcggccgtacggcctgcaccgggggaacagcgggcagcgtaggctgcgagtacgacgaggcgacgtcgccggcggcataggcggcggcgacgagcacgacgaggaggaggcggaggcggtgccgcat

SEQ ID NO: 53640 - DNA, 336 bp, Oryza sativa
  Clone ID: PAT_MRT4530_55821C.1
atgtctatgatacatgagaatattcttgtaccttctactgtatataacatcgtgcaggaaagaaaacacaattttgaagaaaacaagaatgaaccacctaaactagctgaacagagcgtttcagagcgtttcaggatttatgaggaacaaatgatgctactcaatgtttgctcgtttgctatttcttcatgtgatctctcctatgacgacaattgcaacaagaaaccgaggacggtttccagacaagaaggggaggatgatatgaccatcaagtatatgcatacaaccaagcatgagaaatataaatcattgccaaaaaatacatccgatgaatag

SEQ ID NO: 53641 - DNA, 960 bp, Oryza sativa
  Clone ID: PAT_MRT4530_55822C.1
atggagagtggcgtctatactgttctttttagtgacaaggaaaaggaggggatggagagctttacaaacggggacgttcgactattgaagcatgaacgcagcatcattgcggaggatgatcttgacaaccggtggcaggcagccactggagaggctgtttctgaggtcatattcctcagcaaacacactgctgtctccaaccgtcctgcgcttactgtccatccaatcggtgtgccacatctaagagaagatgagacgccacctcaaggagggagaccaggatgggcagctctgcccaatcctcgaattggtccatggctccgtttgatgcaaaagattgcggtagaccaaggtcttgttccagagtttgagattacactggaagctactcaccatggaccagtcaccaatacaccaacgatgtttgttgagataggaagtactgaagaatattggtgtcggcaagatgctgctcaggcgattgccctagttgagtcattttctctgttctcttctactgtgtatatgttctttgtacttgatttccaagaggaactaaaggttctttggaaaggtctagggcttgatgaaggaaatactgttggaagttggcagggtaatagtgaaaaagttctacttggtataggaggtggtcactatgctcctcgccatatggatattgtcatcaaagatggcatatgggtgggtcatctgctctctggttactcattgcctatggaagtgtcacctcaaggaaatggaaaaagttatagtgatgttggtggaatgtggaagcattccatcaaagtttcatatgatgccacgaaggcagcatttcctggtggtcaagttatagcacatcttgatcaaaagagcttcaagggctggcaaaagaatgctatcatgagctacttgcaggagctgaacataaggataggaaaacctaatgatttcatctaa

SEQ ID NO: 53642 - DNA, 228 bp, Oryza sativa
  Clone ID: PAT_MRT4530_55823C.1
ctattgaagcatgaacgcagcatcattgcggaggatgatcttgacaaccggtggcaggcagccactggagaggctgtttctgaggtcatattcctcagcaaacacactgctgtctccaaccgtcctgaaaaggtacttaaggtgtgccacatctaagagaagatgagacgccacctcaaggagggagaccaggatgggcagctctgcccaatcctcgaattggtccat

SEQ ID NO: 53643 - DNA, 280 bp, Oryza sativa
  unsure (1)..(280): unsure at all n locations
  Clone ID: PAT_MRT4530_55824C.1
ccattaatacngccacacttttacacacttgggataatttttcaaagacgcatgacaccccaacgaccncatcacactatttatttctacacacatagttcttgtatccacatctcttcaatctttatcaatcccaactcatttttttataatacattttatatcaaacacaaaccatactcatattgttatcatcttatactctactattttaaattttttataattntcccgcggcgaagtgttcggttgcttcgtgaacttcacttttgccgcactt

SEQ ID NO: 53644 - DNA, 164 bp, Oryza sativa
  unsure (1)..(164): unsure at all n locations
  Clone ID: PAT_MRT4530_55825C.1
gagaagagagttttgtagcgagctcggcgagatgaatgccaaccgagagaggcattcaccaacgagcaagagggnagtggattggttggttaaagctccgcatcttggctggaaatctcgctctctnctctgcggtgggtggccggagaagtcgccgccggtga

SEQ ID NO: 53645 - DNA, 2392 bp, Oryza sativa
  Clone ID: PAT_MRT4530_55826C.1
gaggctcctccccctcctccgtttctcccccaaaatccgagccaaatcctttccccgattgcaggcggcggcggcggcggcggcggccgggattccacttcacccgcggtcctgcccggccgccgattccccgggtcgcgccggcaccggcgcctccgcccgtcgtctcgacggcggcgagcgcggtgaggcgcggttttggaacgcgcggagggagtatccgaatattcttgctaggacataatataatggtttgattggagaagcaaattagaaaatggtagagcatggcaagcaactagctatccctgcaaaggtgatgcctttggacaatgcagtgttcactgaagtagaagctgatgaacttagctgccatggcactccggcacactgtgcagagcatggccaggctagccttgtgctcaaggatgaccaggaatgcagtgccagccatgttcatggcaatggccctgttgaagaatcaaatggttgcatgccaaaccagaggatagatgagcatggacagattgattttgggcattcgctgcagttggttttgttctcgcggcagtggggtctcgctgaaagccttgttgctctagcagaccatcagttaatgctggattatggtttgtccgttgctcttgatgccatttggttcttgcggacggagcaggatcttcaaggtctcaaccatctgataggtaagattgtagaatcaggggcgaaggattttgccagggcaatcctcaggacttcattgctcgcatcttgtgtcgttgcctgccaaagcaaggcgcttactttaggtgatagcaaggaaatcatagctcagagattacatgatcgtctacaagattgtcctggtggtgaacgtttacaaattgaggcaggtgccaaagtgcagaagtttatagaatgggcattgcagtgcattcatctgcatcgttgttctgaagatacagagtgttacaaagcaaactgcagcactcaccaagaggtacagttccatctatcagcgtttaaagccttcttggacatagctggtgacaatctcagtggcaagattttcactgaggcattcgatgcggcctgcttcccacttacactattctcaactttatttgaacctggatggtcttctgggagttcagcagttgccatacaagggcttttgtcattgctggtggaaggaggtgctgagaatgtaaatcagtgttttctagaagcttcacgttttggaagtactgagcttgtacgcattctgctaaagattgctcatcagaacagcttggctgtcgatgtcgatcttgctctagtctatgcttctcactactgcaaatttgaaacgatggcatgcttggtggatgaagggcatgccacatctttcctttgtcccttagtaaaagcttctgagcgtggttgcttgcaggttgtccagtggtttgtcaaccggcatgtttcagacattgagatgtgccttgctgtaacaaccgctgcctcttgcggccacttcgcagttgccacctacctgcttgcgcatatcccccggcatgtcctcgaagccctcagcccacagattctcaaagctgcgaggggacagggtagtgggtcttttgaaggtgtttccttccttctccgttcaaacttcctcaacgatgccgccgctacgtatgcagttgcagacagcattgcgaccacgagtacgatggatattccccaagacctggttgattttctgaaagagcagtggtctcaggccgcatttgctgaaggagtagaggctggggaagatcattttgtgaacatcaccagggttctgaggagaggggcgtctccgatccgcctgcatgacctcccggagcccatggcactcgctatcgcgtacctgccgctgtaccgggcatgcgcgagtgcaagagggcagctgctgccgcagagactgaggggggaactggtcgaggcggttggccggctcggcgttccggtcaacatggaaaacaacaggagagatttcctggcggttttggagcattacttcccatcattcataactggagcttgagaaacctcatggaattttacccagaacccaaatggtttagctgttgacacagtagaatggagccaaatgagccttcactgtgttagttcactatgtcagagagaggagtttgttgtcgagattgtatagagcattttgcggttgcgatgtgagaagacataaatgcttggaaacttttttttttgttttttttttgttgctgtcataggtcagcgttggcactacaactgcaccataaaatgtgatggtatgtttttcagttgcttgtgatggtatactgtcatttctccacaactgtatatagaacaggaccctttgttttcctgt

SEQ ID NO: 53646 - DNA, 189 bp, Oryza sativa
  Clone ID: PAT_MRT4530_55827C.1
atggccgacgctctcagtgtggcagtgaccagtggtgggcaggcagtggctagtggtggcaaggcaaggcaacaagcaatgcaagatcccatctcaccccccatttgcctttctctatggtcaccggagtcagcagcgtgtagtgtgtaccgcgctgagaaaggctgtaaaagcacaaaggtaaagtag

SEQ ID NO: 53647 - DNA, 203 bp, Oryza sativa
  Clone ID: PAT_MRT4530_55828C.1
aagaaatactccagggacgaacgagagagcttgcctagctgcacagatggacccttgcgcgacggcactgctaaacaccacattccctccgttacagggagtgacatccagcgctggactgcggggcccaagccggtcacgggatttatggtcaagcccagtcaagaagaggccaacgacaacgaggatgcagaacccaacgc

SEQ ID NO: 53648 - DNA, 3076 bp, Oryza sativa
  Clone ID: PAT_MRT4530_55829C.1
atggatatgcctacgccatccaaccgtgctggctgcaatggcaacaccggcggtactatgggcccttcagatgatccttctggtgcagcagccacgaacattgattgttcctcggagatttacagcccttcggtggccgaccaactattctcgctgccaaatgattcagctgcacaccggatgtttgctatgtggccatccatgggatcatcgccgtgtgctgctggtacgagtgaagatatgccgctcgatgcatattctggggtaggggaggcagtggaagaacctgctcaaataatgtccgtgaatccaactgaagcagagacaacgggcaagagttctggtgagcttggtacggacgatggtgcccattaagggagtagcatggttccagtggaatcattaggcagcggtgctcttgccgaagtctggacacctcttaagcaggaggttcatgttgtgctgagaacatgtgcgcaaccttttctactcgaccaggttcttgcacgcgatcgagaagtatgcatgcagttggtgtttttagtgaaagaagaacatagactagagacagggactccagggaagaactccatctctgggtcagcagaatgggcctcggatgacctctactataataggccagagtatttgaggatggagcatgctctccatcacgagatacgtgggtcacttgcaatgccaatttatgaccccagcaaggattcttgctgtgcagtgtttgagcttgttacaagaaaggagaagcctgatttcagtgcagagatggacaacgcagtgaacttgaaggctacaaaaggttctagcaatcagaagttttatacagagaaccagaaatttgccttcactgagattttagatgttctcagagctatttgccatgcacatatgcttccactggcccttacatgggttcctacatcaaatggtattgatggtggttatgttgttggaaaggatggtgccagtttttcacaatcagggaaaacaataatacgcatccatgaatctgcatgttatgttaacgatggaaagatgcaaggttttcttcaagcatgtgccagacgtcatcttgagaaagggcaaggcattgcaggacgagcactcaaatctaatttgccatttttctcgcctgatataagagagtacagtattgaggattaccctcttgcacaccatgcacgtaagtttagtctgcatgctgctgttgccattcgtctaaggagcacatacactggcaatgatgactacatactagaattctttctcccggtcagctgcaaaggcgatctagaaccccgcgtccgaacagatgttgctgaataacctctccagtacaatgcaaagaatatgcaaaagtctgcgaacagtttatgaagcagaagttgataatgttaatgctggtactgcagctgtgttcaggaaaaacaatgagagttgcttgccaactggacacacagaaagttcttcacatggtgatcaatcaatcacaggagcttcattcgaggatacatctttagctaacaagccaggagtcatggaacctgagttggctgagcaggtacagcctagttccataggacatgcagagaaaaagcgcagtacagctgagaagaatattagcttggatgttcttcgtaagtacttctctgggagcctaaaggatgctgcaaagagccttggtgtttgtccaacaactttgaaacggatatgccggcatcatggaatttcacgatggccatctcgcaagataaacaaggttaatcgttcattaaagaagattcaaactgtcataaactctgttcatggtgtggacagatccttgcaatatgatcctgctactggatctcttgttccagtagtttctctgccagaaaagttgacattcccttcttgcgatggtttgccaactccatcagtcggaaaaactgtggaagagaattctgacctaaaatctgaagaagggtgttctttgcctgatggatcgcaaagacaaagttgccagttgcagatctctgatgtgaagaaaagtaacgaggatgaatttcacattggcagtggtaacagtgatttttatggtgcaaatgccacagcaaaatctaattctgaggtcacacaaggtccattatgtcccactggtgcttttagtgctttgcatctcaagggaacagattgcaccaatccttctagctctctccgcccaagttccgaaagcaccagaaatcaaatagttggaagaaactcaccatctatacaacaagaagatcttgatatgcttgacaatcatgaagccgaggacaaggaccacatgcacccttctacctctggtatgactgactcttctagcggcagcgcatcaagccaccctaccttcaaacagaacacaagaagtgctcttaaagatgcagccagtcctgcactgacagttaaggcaacctacaacggagacactgtgcggttcaagttcttgccatctatgggttggtatcacctattggaagaaatagcaaagagatttaagctgccaaccggagcataccagctcaagtacaaggacgacgaggatgaatgggtcatcttggcaaacgattcagatctccaggagtgcgtcgatgttctcgactccatagggtcgcgaatcgtgaaactccaggtacgagatctcccttgcatcgtcagcagctcgggaagcagcacctgcttgcagttggcggcacatagctcataacatggtagggaatcctgggctcctgtcacccaaccctcaactgtaccatattacagtaggctagtctttgttgtagcaacagccaatagggtttgtattatgtatgcagtagggtatattatgcagtttagctagcatcaacggtggagtcatcatcccacacagatcagatcatattctcgcaagaaacaatgccattaaggtcttaagtttgttgaacacgagtacatgacaataacctgttgtcatgatggtgtacagagcttgtgaatcgtggtcctggctctctgttgtactccctccggtttcattttaattaatgttttagac

SEQ ID NO: 53649 - DNA, 202 bp, Oryza sativa
  Clone ID: PAT_MRT4530_5582C.1
atgaggagattgagtggggcggaagatgaaccagccatgaacgagcagatcctttcaacgtggctggggtggacgctctacacccgccacctagagcgaagggttgttcgcgcccgtggtgtcatcaaggaggtctgcctgatgaagaggatggcgaggatgatgaaccaggggttgcttgggtcaggagctcgacttctag

SEQ ID NO: 53650 - DNA, 248 bp, Oryza sativa
  Clone ID: PAT_MRT4530_55830C.1
gcggggccccccatcaggcctcggattaaattggaaaaaaccgaacatagggggccaaaatcacaagggaaaaccacagggagcaaaaggtatgagggcgggggaataaaaaaaattgataacagaaaggccgggggaaaactttgcccacgcttaggaaaaaacagcccccaaaagagagaaacaagcgggggggcggggaaaacagctcccctggggttaaccttctgggggcccaaaaaataaaa

SEQ ID NO: 53651 - DNA, 614 bp, Oryza sativa
  Clone ID: PAT_MRT4530_55831C.1
gctgacaaaagtgaagatgccactgccagatttggtgagtgcggctttggcactggaccaatctaccttggatgttgatcaagtggagaatctcataaagttctgtcctacaaaagaagaaatggaacttctcaagaattacactggagataaggaaaatctgggtaaatgcgaacagttcttcctagaattgatgaaagtgccacgaatggagtcaaaactgcgggtgttctccttcaagatccagtttggttcgcaagtcgcagatcttcgaaaaagtttgaacaccatagactcttcatgtgatgagattcgaagttctctcaagttaaaagaaatcatgaagaaaattctcctccttgggaatacattgaaccagggtactgctagaggtgctgcagttggcttccggttggacagtcttctaaaactaacagatacccgagcaacaaataataaaatgacacttatgcactacctctgcaaggtacttgctgcaaaatcatcacagcttctggacttctacatggatcttgctagtttagaagctacatcaaagatacaactaaaaatgctggcagaagaaatgcaagcggttagtaaagggctggaaa

SEQ ID NO: 53652 - DNA, 4216 bp, Oryza sativa
  Clone ID: PAT_MRT4530_55832C.1
atcggagccgatcggtggccgcgtgaggcgtcagagcagctcgcccggcgaggggggcgcaggagaggcggaggcggcggcggcggcggaggagaagggggaacacatgtttcagtgttcgactgctgcttctcaactgattccatgggtgaggatgagtacagggattacttgagcggcattgttgcgcagctgcaggactactttccggatgcatctttcatggtgtccaatttctggtctggggacaagaggagccggatttcagatatcctgtctgagtatgacatgactgtcatggactacccgcagcagtatgaaggatgcccactgcttcagcttgagatgatccatcatttcttgaaatcctgtgaaaattggttatcagtggaagggcagcacaacatgcttttgatgcactgtgaaagaggggggtggcccgtgcttgcattcatgttggctggactgctgctatataggaaaacatacactggcgagcagaaaactctagagatggtttataaacaggcccgtagggactttatacaacaattctttcctttgaatcctcagtcttcacatatgagatatttgcactatataacaagacaaggaagtggtccagaaaagcctcctattagccgacccctcatcttggattcaatagttctccacgttgttccgaggtttgatgccgaagggggctgtaggccatatttgcgtgtacatgggcaagattcaagttctagtaacaagagcgccaaagtactttatgagatgccaaagaccaagaaacatctccagcgttatgggcaggtaatgctaactcctataaaagttggtgctttttgccgtgttcaaggagatgttgttcttgagtgcattcatattggtgataaccttgaccatgaggagataatgttcagggtcatgttcaacactgcgttcattcaatccaacatccttggcctgaatcgtgacgatattgatgtgtcatggaattctaataatcagttcccaagggacttccgagctgaggtaataaattcagctgcctctggattcagctctcctagaactttatccagtgtggatgaggatacccgcttaggaactataccaaatgtagcactgcagaatgctgatgtcaagattattaccgagagtacagtaatcgtggacaatgagctggtgatctatgaagagaaaactatagttgataatggaaacctaacgcaggaagtgaaaaatgttgtcaatgaagagagcactacacctaaattagatagatctgttatcgagagtgtggactcacaagataacaaaaatcacaagatggaggtcgctaaagctgctgatacaactgatagcaaaatggagcaaactaaattgaaatctgggatgcatacaaataacaaattcaatgttggcaaagatgcacctcttgtatcatcaggtgcacaagctgtgccaaaaattcaagctgcacctccacctccacctccaccacctccaccctatgcttcttcaagttccttatcaatgcacatgggatcagctacaaagcagcagccaccgccgccgccaccaccaccaccactgccgccaccgccacctcctccagcttcatcaggcttgtcaagcattcctcctcctccccctccacctccacttatgtcttttggagcacaaacacgaacttttgtccctcctcctccaccccctcctccacctcctaggtcaggtgttggtgggaatactccacctgcacctcctcccccgcctctaaggtcaactgttcctgctatttctccacctccgccaccacctcctccaccactgaaaccaagttctggtgctccatgcccacccccacctccaccgccaccgccacctccccctccctcagccccatcctctcgagcattttcaagtgctcctccaccgccaccaccaccgcccttgttacgatccgttccacctcctcctccaccaccgccaatctcacactctaatgctccaccaccacctccacttccagctgcacgctttaatgctccgccaccgcccccaccacctccaacaacacattttaatgcccctcctccaccgccaccaccgcctatcacacgttcaggagcaccaccttccccacctccaccccctagccctccacctccaccaccacctccaggtgcacgtccaggtcctccacctcctccaccacctccaggtgctcgcccaggtcctccaccacctccaccccctccaggtggtcgtccaagtgctccacctcttcctcctccaggtggccgtgcaagtgctccacctcctccaccccctccaagcacacgtcttggagctccacctcccccgccaccacctggagctggtgggcgagcacctccaccaccgcctgcccctgggggaaggctcggtggtcctcccccacctccacgtaaatcaactttaaagccattacattggatcaaggtgactagagctttgcaaggaagtctatgggaagaattacagcgaaatgatgactcacagagtgtttcggagtttgatttgtcagagctggaaagcctttttccagcagctgttccaaaaccgaatgacagctctaaatctgattcacgtagaaaatcgcttggttcaaagccagaaaaagttcacctaattgagttgaggagggcaaacaacacagagatcatgctgacaaaagtgaagatgccactgccagatttggtgagtgcggctttggcactggaccaatctaccttggatgttgatcaagtggagaatctcataaagttctgtcctacaaaagaagaaatggaacttctcaaggtaatacaatgtttggccttccagaattacactggagataaggaaaatctgggtaaatgcgaacagttcttcctagaattgatgaaagtgccacgaatggagtcaaaactgcgggtgttctccttcaagatccagtttggttcgcaagtcgcagatcttcgaaaaagtttgaacaccatagactcttcatgtgatgaggttcatttataatcgggattagttttttagcaatcaatattgcttcttatgtaatttatactaagtcgaattcctgttttctaaaaaatatctgcatcatcagattcgaagttctctcaagttaaaagaaatcatgaagaaaattctcctccttgggaatacattgaaccagggtactgctagaggtgctgcagttggcttccggttggacagtcttctaaaactaacagatacccgagcaacaaataataaaatgacacttatgcactacctctgcaaggtacttgctgcaaaatcatcacagcttctggacttctacatggatcttgttagtttagaagctacatcaaagatacaactaaaaatgctggcagaagaaatgcaagcggttagtaaagggctggaaaaggttcagctcgagtataatgcttcagaaagtgatggtccagtatcagagatttttcgtgagaaactgaaagaattcactgacaatgctggagctgatgtgcaatctttgtcttcattattttctgaagtgggaaaaaaggctgatgcactgattaaatatttcggcgaagatcctgtacgctgcccttttgagcaagttatctccaccctcttaacatttgtaacaatgtttcggaaagcacatgaagagaaccgcaagcaagctgagctcgataagaaaagggctgaaaaagaggcagaagcagaaaagtctaaagcacagttggctagtaaaaatcagctgcgggatgaagaaggcctggaacaaccgcatcgtcggtcgcaccctaatgaacatctcgcacaaatgcgcgaagatggccagcgtcatcacggcattgggtgcgagatgcaaggcatgaatttcgtagaaatccagaacctcatggaaaaatctggagaacggtggaatcaagcccgtcatggcgaaggacaagaggtgcacggatcgctccggatatcacggccgcggccgcgactctcccgcccgcatgacggcaccgtccgacatgatcttgcggggaaggctaaggtgcctgtctgttgtgatgcgggaggaagggagcactgcgtcaccggtgtcttgggccatggcaaccggcggagaggtggcggagagcatggggcgcgagacggaatggggtggcgagaatgttag

SEQ ID NO: 53653 - DNA, 318 bp, Oryza sativa
  Clone ID: PAT_MRT4530_55833C.1
atggacccctcctcctccgccgccgccgtgctggccgccatctcctccgcgggcgcgacggtggctggccttcgctggcttggcgaccgcgtagaatcacatttggtagaggtccacggtgtgtgcgtgttggtgtggttcatcgaggccagggatatggacgagggaccgatgatgaacgtggtgttcgacacgggcgatggtgatctggtggtgctggcgttcaacgctcgagcaaggaagtgtgctgggatgcagcagtcagatccttttctgcccattgtcaaatgggatggcaagccagttggtgatgaatga

SEQ ID NO: 53654 - DNA, 633 bp, Oryza sativa
  Clone ID: PAT_MRT4530_55834C.1
atggacggcacgacgagatggcggttctcagtgttcgctattgagtcagctatccggtgcagtaacaaggtcaagcaggtctggatagtggcaggggtgcgggatcttctatgcgaaggagaaggcggcgccatgaggtggtcgcacgtggaccggcgacgagactcgacgctgaggcagggccggctggtggcgcagtggtttttctatggagcggattgctactcgatgagatggatgcacggcaatggcaatgacaacattctgaaccatttgactcttatctttcctctcacttttctctccatcggatcgacgccgggccgacgacgcctatttgctgcacggctcgtgctggcccctggcacgccgccgtccaactccaccacctcctacaacatcaccatgacgctgtcgctgcgcaaccccaacctgtacccaggcatcagctacgagcccgtcgcggtggccttctccttcaatggcacccgcttcgtcgagtccgccaccatgccggcgttctaccgtaccataagccgaggaagacggctacgttccacgtcacggtgggcagcattgacaagcccttcagcaagctcaccgcagcgggggtggtggcatttggccggctag

SEQ ID NO: 53655 - DNA, 501 bp, Oryza sativa
  Clone ID: PAT_MRT4530_55835C.1
atgagtatgtcatgtattgaactgagcgcacgcgaccagtgtccctacgatgacggaccatttttttggatgacgattgaatatgatacgaatttgaagtcggacaacctcatgacccatgagcccatttatcgtagagcccggccggccggccaatttaacgcctacgcggccactggcgtgcgtggtctccggccagcccgtgcaagcgggtcgagcgagcttgcgaccgtggacaacaacaacaccacgtgccggcagcttcaggagtacgtgttggtacgtcttttcacaatttcactgcaccagcgctgcgcacttgtacgtccaccaccgcgtaccggcgtactcctacggtgctacggcactgagcaacagtacgtgatgccggtcgttaccctgatctgtggcacccaatcacgaaaacgttttacatattcgccggtactgaacagccgtggtacagagtatacgtacccaagtgactcaaaagttttccct

SEQ ID NO: 53656 - DNA, 839 bp, Oryza sativa
  Clone ID: PAT_MRT4530_55836C.1
agatgatctctccgcacgccgtcctgtcagtcgcgacccactccatcggtcccaaccctctgtcttcttctacccgcgtactactccagtgtgagagcagagagctctgagctcagctcatccccagctgcctacctacaattgcggtgggtgcggcggccctcctcctccctcccgcgcattacaacagctacgctacggccccacccaactgctcttcctacgcgcggtcatcgtctgcttcttgttaattcgaccggcggtgatggagtcagcggcggcgttggcgttggttcttgcggtgctcctcctctcctccaccctcgcggcttcagatttctgcgtgtgccggtcggagcagccgacggcgctgctgcagaaggcgatcgactactcgtgcgggcagggggcggactgcacgtccatcctctccagcggcggctgctacaacccaaacaccgtcgccgcccactgctcctgggccgccaacagctacttccagaagttcagggcctccggcgccacctgcgacttcggcggcgccgccaccctctcctcctccgaccccagtttctctggatgcactttcccttccagtgccagtgctgctgggacaactggcttgagccctggagtcggcaccggcaccggcaccttgagccccggaggcggcatcggaaccggcaccaatggcaccgggatggggagcgccctgagcccgccgggcacgagcaacttcgacggcgcggccgctctagagtatccctcgaggggccacaagcttacgcgtaccagctttcttgtacaaagtgtccctatagtgagtcgtatataagtag

SEQ ID NO: 53657 - DNA, 513 bp, Oryza sativa
  Clone ID: PAT_MRT4530_55837C.1
atgctgatggaggtgccgcggggagcggtggatgcagcgggcaaggcgaggcagctcagggacttctccactaggattggctcctccagggtggccagatcttctccccaggctcgtacgttaccctcaagttcaggaccttgtcagctgcgtcgccgcaaggactccacagcctatgaggagagggggcccgaggagaggctagtggtgggggccgcctcatctccttcacgagaccagcactacgttctctccccaccccaccattgcgtcggcgccacgaaggagctttgtgcggagttggccacgtcgacaacaccatcaaggatcagcagtggtggatccaccatggggtctgtggggtctctagcccatggtgggatccgcccctgcctgataccacgtaccataggcgtgcgtgatacctcgtcaccggcgtcactcctctgcaaccggagtagcacatcacaggctggtacctggtaccagtatggtaccagctgcatggtttga

SEQ ID NO: 53658 - DNA, 814 bp, Oryza sativa
  Clone ID: PAT_MRT4530_55838C.1
aactgaaaagtggatttgacattcatcaaaaactgacaggccatcacaaatgcagtcaagtatatagcaatgtgcaagattgatctttctatatgtcggataaaagaagatacattgtacttcatgcttatacagaacaataacgtcaaacatccgcgatcagtccaaatccacaatcccaaaattggagagaaggatcttcacttgttgaacaaaatccgagccggttgcgtactctgttagcatccctactgcaaacccaaacatagcccatcttccattggaaatctcattcttgcccaagaacccaaagaagggaccctggtcagcctcgtccagcttcttctgcttgaagtaatcctgcagatccttggccaccttcctctggtactccaacgtcacggcccccgccgccgcgggcgccgccacagccaccggcgccgcggcctgcttcggctcaggatcctgcgacggcggcggcgacgacgaaggcgcagccggcttcaccggggtgggcggctgggacagcgtcggaggtgtggacagagtcggcgtcttgggcggcggcgacagcggcggcgcggcgggtctcctgggcgccccctccgccttggagctcctgatcacggcgaacgacgaccggcatgcccggtggcgaggaggcgagaccgcgacggccgcgacgcctcccaccttcaccttgatggaagggatggagggagccagagacattgcttcttgtctgcaagggagagaggaggggcttccccttgctttgttcttggaaggaaggaaatggagggaaggaaatgcg

SEQ ID NO: 53659 - DNA, 3621 bp, Oryza sativa
  unsure (1)..(3621): unsure at all n locations
  Clone ID: PAT_MRT4530_55839C.1
ttttttttttttttttttttcaaagacaaatttattatgaaaatatattcaattagcagcttcatgatctaccggcaatagctcaacttcattcttgaaagatattccttttctgcaattccttattgtgtttaacctttttattgcattttccatcctccattcaagactttcaggatgcttatatgaaggaacaatgcccctatcttctatatccttcagaagtttctccccatcctgcattgtccctgttgcatacatagctccagtcagtgtgatgtacgttgtaatgttcggcagaagtcccttcgatttcatctcttcataaagatctaatgcatcacaaatacacttcttgttgcataaaccagtaattaatacattataagtgacaacatcaaccttcagcccacatgactccatcaactgctttaagtggaaagcatcatcaatcttgaattctttacaaagaccatgcattagggtagtaaatgtagcaatagttggcaccatgcctgcacgcattatgctactgaaaactatgatggcctcttcaacctttccacatttacaaaggcctctaacaattgaactttcagcaacttcagatggcacaacaccaagagctttcatgtcctcttttagctcaaatgctccatcaatgtctccaaccctgcattttgcattgatcaatgcaatataatgtgtatgctttggttgaagcccgctttctaccatgtcatgtaaaatttcataactctgttgcaaccaattttttctgattaatccatttaccatggcaacatatgttttactactgggtgacatatgtaaccacttcatatagctgaaaagttgtaaagcattagacatcttagatttctcactgaaagcctttatgagtatatcaaaagctaaattatcaggaaaaactccttctaagaccatcttctccaagaatttaactgcaatctcaatcaatccgtactcacaaagtccaaagatgagtaagcggtatgtcacattatctggtttgatcccttctttcaccatatccctgtatagatataaagttcttgacaattgtcccttcttgatgtacccatgcattaggatgttatagctagcagagcttggatatacctcattctcatgcatgttacgcatcagtctttctatttcatttatctgtcctccctttagatatccattcatcattgaattgtacgcaatacaatctgcatacaagccttccttgcatataatctcctggaacatgtaagaagcagccttcacttgaccttcatttactaggccattcaacaaacaggtatatgcaatggtatcaggaaccagtcctttctctaacatcatctgcaacaagatgagtgcaggcacaaccttacctcttttgcaaaacccatccagaagaatggtgtaggtataagtatcaggtaaaatgttccttgtgaccattttctcacataaatccagagcttcatctagggttccatgtttgcagatccctacaagtagtgtattcaaggttttctcatcaattgcacaagctttctcaagaagatagaccataaactcttttgcttgtaccaagtggcctccctgacataatcctctgagcaaactcccataagtgcaaatatctggaggccatccatgtctaaccatattatcataaactgaaaatgcctcaagtacattacctctctggcagtaactgtctattatgcagttaaaggaagcaacatcaaatgatatcttcatcctagacatgtattgtttgaattgctcagcctctgcaatcattccctcattgatcaatgctgaataagtaataacatctggatcaattccatccgcaagcatgcactttaaaatttgtttagccttagaaacctcccttggtctcacaccagtgatctgcatttcataaagaactctgcgggcttcatctgttctcccatttcggcagtacccatcaatcaatgctgtgtaagtagctacacttggtttcaaactttgtctcagcatttgattgaagatatagatagcaagatttatcttaccttcaccaaaaaatccatggatcaaagtattataagaacattcatcaggtgttaagttaacttccctcattctttttagcaaaaggtatgcacgtgcactcctctttagtttacataatttatctatcatgatgttataagtatacagatctgcctctatgccattcttctccatatcatctagaatacgcagggcagacttacaccttcccttcttaacataccagttaagtatagtattataagtaacagcattaggtaagcgacaattcttcatcttttgtagcatactttcagccttactaagttttccctgagtgcacaaagaattcagcacaatgttgcaagtggtaacatctagagggaacttccggtccagactttctttcaaaaacaaccaaacatattctgacttgtttattcccacgagagcattaaggatgttattgcacgaaaataatgaagccttaaatccacattcatccataaagaaaattgctgcagccgcatcaagtacttttccttccttcacataagcattgacaagaagatcaacagaaaagaggttggtgggatcacaacgtgaaatggtccgcaaaagggagctaaatatggcactacaggaaaagcctgtcagggcaaggtgcctcaacactgacatcgcttgtgatggcatttgagcttggacaaggatgtggacagccatgcaataaatatgggtaattcggtccaaacctgattgttgaacgatagagtccagcatcctcaaggccagctttccatgtgccttgtcaagcttcccagatttgtatgccatttgactcaaggtttcccatcgctgcatagctaggacagtgatgatgctgctctcaactccatgaactgaggtggcggcgggcagcacgccggcgccgagtggggtgtgcgcgggcggcctcgcgcgggcggggaggcgggaccagtacgccgggctggaaaccgcgtccctggactggacgatcctgcggcggtaggaggaagacgccagcgacgacgccgacatggcagtaggcgtctcgccgccgcccgcagagagagagccaccaggtggtcgaagttcctggctcgctcatccaaatcccaccccccacgccgatagcttcgccttcctcaacaggcggcgatgcgaggaggaggaggagagaggcggaggacaatcgggaagggcggcgtgggggttggcgacggccgagggccgacggcgagagcggagagcgccgaggccgatggatttggagaattggagggacctgagctgagcgccacgcgtggctgcgagggctcccaactgagccgtggaccgtgagcccgtttgtttgcgatgatcaaggaattcaggacgggccaaaaccgatgtggaatgccacgattgttggcccagtcccgttttgaggaaggctagtacagggttgctaaaaatttcttggaacaagttttgtttaggttccttctcttgacatcgagtttgaattacggtaagatataacgtgtncctaat

SEQ ID NO: 53660 - DNA, 2709 bp, Oryza sativa
  Clone ID: PAT_MRT4530_5583C.1
tcacggagtgcccgggcccccgaggccggcgctgctaaccacgtcgtcccagtcctcgccgtcgatgtcatcaccaccgtctccgttcctgctctcctcgtccgaggcaagcccgaaggtgaaccgaggggccgacccctcgaagttagagacgatcgcgtcggccgcctcccggacttgctcccgagcctttgcctcggtccccggggggaaatcctcgagtgcgcgccatgggacgaagtcagggtcgcgggcttggtggcttgcgaggaccagttccaccgcggcccgcgccaaggaagccgacgacgatttcacggtctcgccgacctcctcctccagcctctctagatccgccgccagcccgtccagccagagcgcgagtgctggttgtgtgggcgggagcttgctatcccagcgcacggagatgccgactcggcgccccgcgtgctccagtcgatcgacggcatcggagagctgcccgggtccgatctcgttggtaaggcggaggccgcgatctccccagccaggctgcccacccgccaccaggtccttctcctgggcctccagctcagaagcccttgccgccatcgccgcgcactcggcacgagcactctccagatgccgagcctcgcgcccggcaacggcctcctcgcgtttcgcgagttgctcgcccagccggcgcaaggccacctcacggcggttcacctcggcttcgcgctcggcacgcctcttcccggagccgtagctcctccgcgcgacgggcctccgaagctttcgcggcgagggtggtccggtcacgctcggctgtggcctcctcacgaaggccaagggaggcctccgtctccgccgccgttctctcgtgggcggccaaggtggactcccgtataggcggatgtcgcccaacgcttcatccaggacgcttgaggcaatcagtgctgcctgccgctcttcctccgtctcccgcatgacgatgtccagcgtctcctcgcgcgcctggatttcagccagttgggcttggcacattttgcgtcccaccttcaccatgtcgtccacggcgcggcgcccctcgtcaacccgcgcgcggtccgcagcgagctgtgcccactctgcctccagggctgctcgctcttccgccagggcttgaacttgggcattgagcccctcccggacggtggaatcggcggcggcgagcacctgcaggagtggctccatacttgccggagtcggagaagaaaaagttgcggtccacccccgggacgacggagtgctgctggatcccccgcgagattgggggctgctctcagcccaccttctgcgcggccagccccgagggcgccccaagtgcaagggggagtggctgttcctctcgccccccgcttcgggccctcgggtagattcggcctcgggctcgggctcgggcccgcccctagtttcggcctcggcctcgggcttagggccgcctccagccttggcttccgggccgcgacctccctcggcccccgctcccgggtggcgctccgcatggatccgagcctcgaagtcgcccccgggagaaacgctgccgccgcgagcgatagcattcggactttgtcccctgcggggagggcggttgaaagtccacttcgggggctcaatgaagctcccccgacacggctccgtttgacctatcttccggagccgcttcttcttccatccagcctcgggcgcggcagggtgcttgtggcccgccggcggtcggtccgccacgcgctcggcgcccccttcgcgcgggggagagggcggtcgagatttggacatcttccgcttcccttttgggtcgctggccgagtcgatcccgggtccacggctcgggccgggtgccctggagctgccacccccgccggagccgctggtccgactcccgcctacggtcgcgccaccgctacccacgccgacagcgccgtcaccggcgccgccccggcgggaccgacccctgccggcgccgacggccgacatcacagccatgatactctcccggtcgcggtcgcgtcttcgtgtcctcctcgccccatcccagcgctcgcccacatgcgtgcgcatgggatcgttgggtccagagtactcccacgcgccatgggatcgatcttggagaggcgcgatgcggtggcggaagtaatcgctaaagaccatagcccctgtgaggcccaggcttcgcaggcccctaaggtgatcccgcactgcgtcgtacttctcgcccagctctgaaaccgccagccatgcggcggatcgttcgggagggccgccggggagccgaagtcgccggtggtccggcagcgcggtgtagaaccagtccttcttccagtcctcccatttcttgcggagatgactctcgatgtattgccccgctgtgcctggccggggcccgatgaacatctcgcacaaatgagcgaagatggccagcgtcatcacgacgttgggtgcgagttgcaaggcatggatttcgtagaaatccaaaacctcatggaagaatccggagaatggcgggatcaaccctgccatagcaaaggacatgaggtgcacggatctctccgggtaccgcggccgcggccgcgactcccctgccctcacggcggcgtcttccggcatgatcttgcgggggagactaaggtgtctatccgtcataatacgcgatgccggaagcactgcgtcgctggcatcttgagccat

SEQ ID NO: 53661 - DNA, 337 bp, Oryza sativa
  Clone ID: PAT_MRT4530_55840C.1
ggaaaacacatcaccttttttaagcgggaacagatctggggaataacccccattacatatccaagcaaaagacccatccttaaaaagggggggttaactgacctacaaaagcaaccttcctgaaataccctaccatcagaaaaaggagcaggtcaacagggatctgggggaaacccgagacgactgttaccctgggcctaaaaggaggggcagtcggttggacaaaccgtaaacccccttggggtggctccacggaaacggcccaagaccgaggtttgacgctgacccgtaaatttgggggggggcgtcaccggactcagcaaaggacccccagggg

SEQ ID NO: 53662 - DNA, 192 bp, Oryza sativa
  Clone ID: PAT_MRT4530_55841C.1
acaaattaccaggatgacttggttatgagtatggaaaatattcagaacaaaataaatccatatatttgttgcaactccacaatgtccaaaaatatcacttgaagctaaaaccagaagcgattcgaacatatttgcattcaccttccatcatatgtgactccggttatcgttggagaaggggtgagtggggaa

SEQ ID NO: 53663 - DNA, 564 bp, Oryza sativa
  Clone ID: PAT_MRT4530_55842C.1
gaatccgcacaaaggagcagctgtaatggagaaagaggaatactattaaggttggtagagaaactatgagatctttcatgatctctaaagttcttccagctattagaccatgttggccccaagaagatgcaagaagaacaatatttattcagcaagataatgctagaacgcttgtcccaatcgatgacgaacagtttggtgcagtagctcaaatgggtcttgatattcgtctcgtgaatcaacctccaaattcccgatatgaatagtttaaaccttggcttcttcgcctcacttcagtccttaacatctactagggtctctacaaacatcaaggagctaagagagaatattcacaaggaatataatgactacaatccaaacactcttaatagagtgtttgtgacactacgaagctgctacatggacgtaatgaagactagtggagggaataagtagaagatccctcacatgaacaaagagaagctagaggcatgtagcattcttcctaaagcactttgttgtgatcatcaactctatgagagagccatacagcttatagttgac

SEQ ID NO: 53664 - DNA, 507 bp, Oryza sativa
  Clone ID: PAT_MRT4530_55843C.1
cacggagaagcgcgggaaatcacacctcgtcgcagccaagatctcctccagtccaaacgcatcaaagattccaagatgtgctctggagatgatattgatggagacatgagggttgaagcaacacaacacagggatataaggcgctacaagtgtgaattttgcacggttgttaggtccaaaatatgtctcatccgagctcacatggttgctcatcataaggaagaactggacaaatcggaaatctacaagtcaaatggggaaaaggttgttcatgaaggtgaccacacctgccaagagtgtggtgcttctttccagaagccagctcatctgaagcagcatatgcaaagtcactctgatgagagatcgttcatttgcccacttgaagactgccctttcagctacattaggaaagatcacttgaaccgtcatatgcttaagcatcaagggaagttgtttacctgctctatggatggttgtggtaggaagttcagtataaaggcaaatatg

SEQ ID NO: 53665 - DNA, 377 bp, Oryza sativa
  Clone ID: PAT_MRT4530_55844C.1
gtcttctttgtctccctcgaacccgacgacgacgctccgtgtcggctctcactgatcgctcggagaagcccccggaaggctacgaccccccgccatgtgacacgcccttccatctccacgcctgtccaggcctacgtataccagagccaggaaggatctgtgacggggctccagatatccagcggcgatgcgcaggtcctgcacgagaaggttaagtcacaggaaaagtcgcccgagaacccaggcacaaggtgctacatgtctggtaatattcaaacggacagcaactacttggctgaaaatgatggaggcgcgcggcagcggactcccgggaaaagcataagccgcagggtccgcctcaaccctgactaggacca

SEQ ID NO: 53666 - DNA, 1703 bp, Oryza sativa
  Clone ID: PAT_MRT4530_55845C.1
ggagaagcgcgggaaatcacacctcgtcgcagccaagatctcctccagtccaaacgcatcaaagattccaagatgtgctctggagatgatattgatggagacatgagggttgaagcaacacaacacagggatataaggcgctacaagtgtgaattttgcacggttgttaggtccaaaaaatgtctcatccgagctcacatggttgctcatcataaggaagaactggacaaatcggaaatctacaagtcaaatggggaaaaggttgttcatgaaggtgaccacacctgccaagagtgtggtgcttctttccagaagccagctcatctgaagcagcatatgcaaagtcactctgatgaggatatagattcttaactgtgtgaagcattggatcccaaagaactccaaaatgcgatgaggcatatttaatcttgtctggactagtaacaggttgggatgaccaccttgtgaagctccaacaggattgcctcctcacgctctttcaggagagatcgtacatttgcccacttgaagactggcctttcagctacattaggaaagatcacttgaaccgtcatatgcttaagcatcaagggaagttgtttacctgctctatggatggttgtggtaggaagttcagtataaaggcaaatatgcaaaggcatgtaaaggaaatccatgaggatgaaactgctactaaaagcaaccggcagtttgtttgcaaggaggagggctgtagcaaggttttcaagtatgcttcaaagatgaagaaacatgaagaatcacatgtgaaattggactacgtggaagtagtctgctgtgaaccaggctgcatgaagacattcacaaatgttgaatgtttgagggctcataatcaggcttgccatcaatatgttcagtgtgatatctgtggggaaaaacacctgaagaagaacattaaaaggcacctacgagcccatgaggaggtgccatctactgaaaggataaaatgcagtttagagggctgtgaatgctctttttccaataaatcaaatttaaccaaacatataaaggcgtcccatgatcaagtaaaacctttcgcatgtcgattcacggggtgtgaaaaggtgtttccatacaagcatgtcagggacaaccatgagaaatccagcgctcatgtatacactcaggcaaacttcacggagatggacgagcagttactctcgtgtccgagaggtggacggaagaggaaagctgtgactgtcgaaactcttacgcgcaagagggtgaccatgcacggcgacgcttcgtcgttggacaatggaactgagtacctgcgctggttgctttctggtggggatgatgattcgagccaaactcattagccgtatcatctttgcatctgattgtgatggtcatggtgtcaatggctcaatgctttgtcgtaaaggggtgtgctagcccactcacgttggtagttagatggccgtggtgtttttgttgtaagtagttggtctgaatttagaaagtgcagcagttttagaggaagcctactagtagtatatatttgtagcataatggcgcagtttgagttgtgagttgtaagtattttgattctttactgttttgaccactgttcttggaacctcaaaattatttgacttgttgaatgcaaaaaatgatgtgattacaagttttggttcttcttgaaaaggttgtacctgaaa

SEQ ID NO: 53667 - DNA, 403 bp, Oryza sativa
  unsure (1)..(403): unsure at all n locations
  Clone ID: PAT_MRT4530_55846C.1
ttgcagggatttcnccnagtttgggggggncngttacncaattccccncctatttcttcctannggntntctnangncntccttntcccgagnagtncactgaaattnccttctntggacnagctncgtctnctcacggatnatacncngagaanatctttgcgngngatggttggtgtctgggacgntngaacggccngcgcngggcggccnttactcggatgggagcncctncttgactatctcntcgctnagggnggccatctgggcgtcgngcgccnagacngcntccncctccancggcccnaggnnggcnagnncctcatttatctgcggnttnanccgncagacggtcgagtgtantttctttttntntnncnagtcccctcctnaannaacatgg

SEQ ID NO: 53668 - DNA, 1796 bp, Oryza sativa
  Clone ID: PAT_MRT4530_55847C.1
atgcctcgcaccgccgccgccgccgccgccgcgccgccgccgctgctgctgctctccgccgcagccgccgccgccatcgccatcgccgtcgccgtcgcggcccccgacggccacctagtcgccagcctcccgggcttccatggcgccttcccctccaatagctactccgggtacgtgacggtggacgaggggagcgggaggccactgttctacgtccgggagacgtcggagcgcgacgcggcggccgaccctctcgtgctctggctcaacggcggcccgggatgctccagcctcgacggcttcgtctacgagaacggccccttcaatttcgagcgtggcagcgatccgggtggcctcccaaatctggagctcaacccctacagctggtccaaggtttccaacgtggtgtacctcgactcccctgctggtgttgggatgtcgtactcgttgaataaatcagattacacgacaggtgacctaaaaacagcggctgatgcacacaccttccttctgaagtggtttgagttataccctgagttccagtcaaatccgttctacatgtcgggagagtcatttgcagggatctacattccaacactagctgatgaagttgtaaaagggatagaaaaggatctgaagccaagaatcaattttaagggatatctaattggcaatggagcaactgatcaggactatgatttcaattcgtttgtgccgtttgcacatgggatgggtctcatctcaaccgaattgtttgaggaactcaaggacctgaacaagtacaacatccttgctccctgctaccatcaccctgaaattcaagaattagagttcaagaacagcagcttgccatcaagttttagaaagctaggtgagacagagaagcgatttccagtgagtgaacaagtacaacatccttgctccctgctaccatcaccctgaaattcaagaattagagttcaagaacagcagcttgccatcaagttttagaaagctaggtgagacagagaagcgatttccagtgagaaagcgaatggctggccgctcttggcctctccgtgctcctgtgactcgtggacgcatgacgatgtggcctgaacttggtggtagatcactcccctgcacgagcgacgaacttgctaatgcatggctggatgatgaagatgtaagagctgccattcacgcggaaccggaaagcttaattgggtcatgggaactgtatactgcaggaatagagtactaccatgatactggagacagcatggtgaagtaccgacaagaagttcacagccatgggatatcgcgcacttatttacagtggagatcatgatctctgtattccctatgtcggaacggaagcatgggttagatccatgggataccgagtaattgatcattggcgaccatggtactttggagggcaagtcgctggatatacacaaggttatgaacacaatctcactttcctcaccataaagggagctggacacactgtcccggagtacaagcccaaggagacgcttgcgttctatagccactggttgtccgggaagaagatttgacatcaagatcaactcgtcgtaacagttttgagcctccgaatgaaaaaaaaaagttgtaatctgtaatctcaacaggcagacaagtgcatttgtccgtaatctgcatctagggatgtgagcagtcccagtactacccccataaaaaccttcctgataatttatttgctacatgtgatagcataaaattcaaaaaaaaaaaaaaattacattccaaaaaaaaaaaaaaaaaaaaaa

SEQ ID NO: 53669 - DNA, 573 bp, Oryza sativa
  Clone ID: PAT_MRT4530_55848C.1
cgggcaggttattctgggcagggaagtagctgttgtatttgcagaggagaacagaaagaagccttctgagatgagatctcgcgacagaataagtggcagcagaggtcgttcctatgaccaaaggtactctaggtcaccgcgatactctcctcctccaaggggccgctcgccttaccgcagcccgagctactcaaggtctccttcgcctcggtatgcaaggcgcaggatgagggagaggtcctactcaccagttgagagcagatcaaggagcaggagcccggtcgaggaaggatacggtggtggatccacacggagagagaggtcgctctctgtcagtgaatgaggtctagagcgctaccggtaatcttcaactagtagtcgctatggctttgcgaaccatatgttactgtcgtgctgtagtggtatcaataacttggcaaatgttgtgtcattacgcctttcctggaagattgcaaacatattaagttacaacgccggtgaattctgctcactttggagttgttcttgctttgtgtgttgttttcctgtggattctgtagaaacccccttgat

SEQ ID NO: 53670 - DNA, 1037 bp, Oryza sativa
  Clone ID: PAT_MRT4530_55849C.1
ccggccggggtgcgctctcccgtgccgattcggggctcgtccggaagcttctagagcggtagaatccaaaactccagaggcgaacgcgatgcgacgagacgagacgaaccgaagaagcattccctccctccgctcgagcccctccgttttgatccgattcgctcgcgattgatatggggagaggctacagttacagcccatcaccacctccaagaagctatcggagaagggccagcagcccaattccccgtgaccgttatggtggacgtggtagagatctcccgaccagtcttctagtcaggaatcttcgtcgggactgccggccagaggaccttcgtcggccattcggacaatttggtcgtctcaaagacatatatattccaagagattactatagcggtgaaccgcgtggatttggatttgtccagtactacgatcctgatgatgctgccgatgcaaaatactacatggacgggcaggttattctgggcagggaagtagctgttgtatttgcagaggagaacagaaagaagccttctgagatgagatctcgcgacagaataagtggcagcagaggtcgttcctatgaccaaaggtactctaggtcaccgcgatactctcctcctccaaggggccgctcgccttaccgcagcccgagctactcaagcctaccagcttcaaactactgttgcatttcacaatgacacgcttgaaaacatgtctgtcttggcaggtctccttcgcctcggtatgcaaggcgcaggatgagggagaggtcctactcaccagttgagagcagatcaaggagcaggagcccggtcgaggaaggatacggtggtggatccacacggagagagaggtcgcgatcaccaacccggcgccgctctccttccacgacgacgtcgtcggcctcctgccccggcctttccgtacgagtgcccgctgctccgtcgccgcgctggtgcccacgcccaaccctagcgtgttcgcgctccacgtatttcactcggatatcgggagatgggcatccacccagg

SEQ ID NO: 53671 - DNA, 189 bp, Oryza sativa
  Clone ID: PAT_MRT4530_5584C.1
atggcgacgacgatggtaggggcacggctcgacggtggcggggacgtcaatggcgcgtcggatccagccgcggagcggctggaggcgttgctgtcggcggcggtgacagcggcgtctatggcggctggcgacggcaatggtggttgtggcagccgcgacagcgcctgtggtggcggcggcggtgactga

SEQ ID NO: 53672 - DNA, 540 bp, Oryza sativa
  Clone ID: PAT_MRT4530_55850C.1
atgggcgccggggaaggggatgccgccgcgggcaacaaggagaagggcggcggcggcggcgtggaccggacgtcgctggacggcgtgcgggacaagaacgtgatgcagctcaagaagctcaacacggcgctcttccccgtccgctacaacgagaagtactaccacgacaccatcgcctccaaggagttctccaagctcgcttattacagcgatatatgcgtcggggcgattgcgtgtcgcctggagaagaaggaaggaggagcagtctgtgtttatatcatgacgctgggggtactggcaccgtatcgtagtcttgggatcggatcgaagctgctgaaccatgtgatagatctgtgtgagaagcagaacatccctgagatatacttgcatgttcagacgaacaacgatgatgccattgctttctacaagaagtttgggtttgaaattacgaagacgatagaaaaatactataaaaacatcacgccgccagattgctatgttcttaccaaatttattggtcaggctgctacaaagaaatga

SEQ ID NO: 53673 - DNA, 197 bp, Oryza sativa
  Clone ID: PAT_MRT4530_55851C.1
tccacacttacttacacgcgtacgtcatcactcacttagctcatgaactcttactccatgtgtgacaagcgcagccactgcgactgtgctgacacgagctattgcgtgaagataggtaccagctatagcagccacatagatgaagccgacaacagccacttagacgaggtctgcaactgcgaggacaactgctgctg

SEQ ID NO: 53674 - DNA, 800 bp, Oryza sativa
  unsure (1)..(800): unsure at all n locations
  Clone ID: PAT_MRT4530_55852C.1
atctatctctctctacccaccatcccgtctccccctccgtcgnccctctcccccgcttccncgcgcctcatcctgtcgtccttatgggctccccccgccgctcttcttctttgcgtcctcccaatgcccccttncgcctttcctcccgtacnggtttccctttctatctctcctcgtgtccttctttgtccccctcgttcgtttcctcctccgcctccgcctgcgccctcccccggatccgccgccctcatccctcccctccgccggatctgctaggggagggagggaaggggaggggagccaaagggagagggagggaggggccactcgccaccatcgtcgaccgccgccggatccaccgcccccatgcctcccctccgccggatctgcaaggggggggaggggccccgcgccgacatggacgcccgctatcgcccgattactcccaccaccggatccgccgcccccatccctcccctccgccggatctgcaagtggaggggaacagaagggagagggacggaggggccgctcgccaccgtcgtccactgccgtccccatgcctcttctccgccagatgtgcgaggggaaggaggggccgcgcgccttcgtcgtcgcccgtcgccatgctgtcgcctccgcctgcgcccgccggatccgccgcccccatgcctcccatccgccggatctgcaaggggagggaggggagctgaagggagagggagggaggggccgccgcgcgctatcgcccggcaccgccgctgtcgtcgccgccgccgccaccgccgccgccgtcgtcg

SEQ ID NO: 53675 - DNA, 116 bp, Oryza sativa
  Clone ID: PAT_MRT4530_55853C.1
tatctatcgaatacaattacgttccgcccctgggagagataaggccgtgatgcccatttaaccctcacaaattccatcatcacttcttttcataccgaggcaatagatgttatttt

SEQ ID NO: 53676 - DNA, 2181 bp, Oryza sativa
  Clone ID: PAT_MRT4530_55854C.1
atggcgatcaccgcggccaccgccgccgccgccgccacgccccacccgtggcaggccgacgcctcgccgcgtcgccacgccgcgtgccccgctctccgcgggaggaggcgcctccccgtcgtcaggtgccagtcgtccagcgtcgacgacaagcccaagtccaagcggggcctgctcgacaacgccagcaacctgctcaccaacctgctcagcggcgggagcctcggcgcgatgcccgtcgccgagggcgccgtcaccgacctcttcggccggccactcttcttctcgctctacgactggttcctcgagcatggctctgtgtacaaactcgcttttggacccaaggcatttgttgttgtctccgatccaattgttgctagacatatcctgcgagaaaatgctttctgttatgataagggagttcttgctgaaattttaaaaccaataatggggaagggtcttatacctgctgaccttgatacctggaagcaaaggagaaaaggttagaaagttataacccccgggttccatgccttattcatagatgctatggtgggagtatttactaagtgttcagagagaacaatatttaagcttgaagagcttattgaaaggggcgaacatggggaaaagtataccatagtggaccttgaagctgagttttctaatttggctctcgacataattggcttgggcgtgttcaattttgattttgattcggttaccaaagaatctcctgtgatcaaggcagtatacggaactctttttgaagctgagcacagatccactttttacattccctattggaatcttcctttaactagatggatagttccaaggcaacgcaagttccacagtgacctcaaggttattaatgattgccttgatagtctcataaaaaatgcaaaagagacaagacaggaagctgatgtcgaaaagctccagcaaagagattactcatcattgaaggatgccagcttgctgaggttccttgttgatatgcggggagctgatgttgacgatcgccagcttcgagatgaccttatgacaatgcttattgctgggcatgaaacaactgctgctgttttgacatggtctgtttttctactagcccagaatccctccaagatgagaaaagcacaggcagaggttgattctgtactcagcaatgagacaattaatgtggaccagctcaagaaattggagtacataagactgataattgttgaagctcttcgcttgtatccccagccaccattgttaatcaggcgtgctctgcggccagataaattgccaggtgggtacaatggtgcaaaagaaggatatgaaataccagctggaaccgatatatttctttcgatatacaacctccatagatctccatacttttgggatcggccagatgagtttgaaccagagagattttcagtaccaaaaaaggatgagagcatagaagggtgggctggttttgatcctgaccggagtcctggtgctatgtatcctaacgagattttagcagactttgctttccttccttttggcggaggaccccgcaaatgcgtgggagaccagtttgcactcctcgagtcgacagtagccctggccctgctattgcaaaagtttgatgtggagctgcgaggatcacccgatgaagtggagatggtgacaggcgcaacaattcacacgaagagcgggttatggtgcagagtgaggagaaggacctgatcatccaccagttggcaccaaaagctgtgcttgtgccgtgccgcagcgggatgcatgcagtgcaggaaacaagaagcacacaggaataaatgcatcgatgcagacaacaaccaatacaagggtaagtaaagccagctactcctactccttagttcttttttcgctcatgatgtgatggtgtatagaagtatatactattcgattatttgtacgatgcatacgcatctgtgcgtgcctctttgacggcgaaaaatcgttggggttgaactggaaattgtgctgagttgttacttcatctcaggctgaaacagcacgtttttgcgacctttttgtggtcagcaaattcgctgtcggccaagctgtatgaatagtatggatgatccagtccattttaatcaaatctgcacagacaatgaaagctagttacttttacatgttttaagcttccccggccgc

SEQ ID NO: 53677 - DNA, 566 bp, Oryza sativa
  Clone ID: PAT_MRT4530_55855C.1
ccggaattcccggctcgacccacgcgtccgctcgcttttttcttcgctccgattctaggtcgagcacctgtcagctgtgtactagaggctcgacccgctgtgtgactccctgcaggtgctctcgcatagggctgcgctagagaagtccgacatggtagactcggaggcacgatcttcagagcggcgtactagcttgtgctatgttccgatatgcacaggcggaagaaccacttcctgcggtccttcgataccctgtcgatgtcgacggaggacgtagaggggatcatgcacccccccccatgtctcgccgtactttcgctcacattgctgctctgcgcctgcttcacatacatcagaccaaatcagctcctgctattgtgctactggattagcagttactggaggtgttcttgatgcagaccgagttgctccgtttgaagtatgggagcaatgcttcacagcgtctgctgagctagtactccgatcatgatgacgccgcgaaccatcaggttaattatactactagcgacattgcattggatgctgataatcatagccccgatcct

SEQ ID NO: 53678 - DNA, 516 bp, Oryza sativa
  Clone ID: PAT_MRT4530_55856C.1
atacatttcccagattcacatttggctcaggtctagcacgccaaatgggcagccaaaatggctcctatcttttgtaccagattatccattgcttaacttcatgcttactacagcaatctatcttcttctatcataccgggtgtttgagatcacaggtgtactgaagggagcttttattcccagtagagacaacaatcggctatatcaaaattttattgcagggattgccatatctgcatgcctgtatttctgctcacttattcttgtgaaaattactattgtataggtagaattgccaagtaaatgaccttgatagaaggtcgttcctgaaaattgtgtgcttggtatctggtggtaagatattcagctcaggcctcaattccattttgcatttggaggtaaagatacagttcccatgaaggacctgccgatcttttagttgggaattgaattgccagaggatgtaggtatagaagtcaaattttgatttatcatttcccccatttaaaacaccgt

SEQ ID NO: 53679 - DNA, 467 bp, Oryza sativa
  Clone ID: PAT_MRT4530_55857C.1
gaaaaccaaacaaaaaaacaagccaagaaaaggccacctcagtgagagagggaagggagggagggagggaggagggagagatctcctgctgcctcgcgatttccggcggcaaaaaggttcgattttgatccccgtctccggattcgcccagccccgatttgcccttgcggcgcggcctcgctggtttctgcaagtgatagagaaagatcccgattttaacagtggcagttcgtggcccgcccgcttctgcttctggttttgggcgattcggcggttgctggactggagggagtcgcgggtgcagtgttctggttcggatctgagcgggtgttgggtgttttcaactctaattcgggcgagcaatgagggttcttgatgcgtgacctgatgcgggaggcgtattgggagaagatctcttgaagtttttttttttttttggttttggtttgtttggggggttccttgga

SEQ ID NO: 53680 - DNA, 354 bp, Oryza sativa
  Clone ID: PAT_MRT4530_55858C.1
aaaaagaggggttttttcttttttattcaaaaaactggcccgtaaataccaccaaaacaattgcttgcaatttatttattaagtttttttttatccccagccccccctaaaaggtttctccccaattataaaccttttgggacctcttgttttggattggagtgaatccccccaactcatttcctttattttgctggaccctttgaccctttttttttgaaatccaatttccttttgttaaaacattttttgggaaaccccggaaaatggaactttttcctgcaatggggtttaccataaagttaggattggtcttgaatgcaatgaaaccccatccttttttttgcggcccct

SEQ ID NO: 53681 - DNA, 1131 bp, Oryza sativa
  Clone ID: PAT_MRT4530_55859C.1
atggcaagtttggatctaaatcaaccttttaattgggatgaagttgaggatttggagggagaaatacctgatttgaactacgattacatttggtatttagagagtgaagatgaagaaggtggccacgaagatgtcaacaacgcagccgccagctgcggcaatgatgatggcggcggcggcagaggtggtgacaatgatgatggcgacggcggcggcggcggcggcgcaggcggcaacaacgatgatgatggcggcggcggcggtagagcacatgccggcatggatgctggcagcggaacacatgacgttgatcaaaatgattccgtcataggtatcaatatcaagaagaggaggcactaccctcctgatataaagcgaaccatatatgccaagttattagagaaatcaaatcctggcatgatggagggtgtgacaaagtcagtcgctaatgaaatgggggtgccgttgagagttgtccagcgcgtatggcgacatggacttgaagcttttgagtccaagaagaagaactacatcattgaaaagatgttgcccgccatcaaagaaaaatggcctattgaggaacacgggcttcccatctacattcaacaagacaatgcgaagacacacattgctattgatgatctagaattcttagccctgcagtcattgtttcataagtcatctccatcaagcatcgaagagattgagacaaatgagaacttcgctcatgatcgtcaattcaaccgtgttgtcatcacaggtttctgcatccatcgttgtcctcgcatcgtcgacgagatggcgtggacacgaagcgatcacgcgcagccgaattccatctctgcttgctgccgcatgcgctgtcaactcccgacctttgtcttgccactcgccgggcactctgccatcttctctgccatatccatcgcgctgctcgccggcgctcgccgatgtgttacaactaaagcaaaaggaagggaagtacgtgttgatgaaactaggattggtaatggcggaggtggtacatatgatggtgaaggtgtagtaggttgtattggtgacagtataggtggtacaaatgatattgaatgtgaaggtggtatggacagtggattcaaagacttccgatga

SEQ ID NO: 53682 - DNA, 2490 bp, Oryza sativa
  Clone ID: PAT_MRT4530_5585C.1
tcacggtctcgccaatctcctcctccagcctctccagatccactgccagcccgtccagccggagcgcgagtgctggctgtgtactcggcgccccgcgcgctccagctgatcgacggcatcggagagctgcccaggtccgatctcgttggtgaggcggagggccgcaatctccccagcctgatcttgcaccaagcgctctaggtcggcgagagtgctctgagccgtggtaggctggctcaccaactccgcgctgccgggctgcccgcccgccgctaggtccttttcccgggcctccagctcagaagccctcgccgctatcgccgcgcgtccggcaacggcctcctcgcgtttcgcgagttgctcgcccagccggtgtgaggccacctcatcgcggttcacatcggcttcacgctcggcgagtgcgacgtcccgttcccggcacgcctcttcccgaagccgtagctcctctgcgaggcggtccgctgaagctttcgcgacgagggtgacccggtcacgcttggctgcggcctcttcacgaaggcgaagggaggcctccacctccgccgccattctctcgtgggcggccaaggtggactcccgctcgattcgccgatgaatcgtggtctcgaactcctgcgcggagcgggaacgctcatccaaggccctgtgttcagcctcgagcgccgccgtccgggcccgcagcgacgtgtcggcctccgatacccgccgttcttgggcagcagctgcgtcgaggatactgcgggcatccttgaccctcttcaccaggtcctcggcatgggactcgtactgtaggcggatgtcgcccaacgcttcgtccaggacgcttgaggcgatcagtgccgcctgccgctcttcctccgtctcccgcatgacggagtccagcgtctcctcgcgcgcctgaatttcagccaattgggcttggcgcattttgcgtcccaccttcaccatgtcgtccacggcgcggcgcccctcgtcaacccgcgcgcggtccgcagcaagctgtgcccactctgcctccagggctgctcgctcttccgccagggcttgaacttgggcgttgagcccctcccggacggtggaatcggcggcggcgagcacctgcaggagcggttccatatttgccggagttggagaagaaaaggtcgtggtctgcccctgggacgacggagtgctgctggatcccccgcgagactgggggctgctctcggcccctgcggggagggcgattgaaagtccacttcgggggctcaatgaagctcccccgacacggctccatttgtccttcttccggagccgcttctttttccgtccggcctcaggcccggcagggcgcttgtggcccgctggcggacggtctgccacgcgctcggcgccccctccacgtgggggagagggcagtcgagattcgggcatcttccgtttccctttcgggtcgctggtcgagtcgtccccgggtccgcggctcgggccgggtgccctggagctgccacccccgccgggtccgctcgtccgactcccgcctgtggtcgcgccactgccacccacgccggcagcgctaccatttgtgccgccccggctggaccggctcctgccggcgccgacgaccgacatcacggccaggatgctctcccgatcgcggtcgcaacagaggggaaggatcccgtctggaatcagtgtttgctcggcggagtctaggcccagcacccgccgaatcaccatcttcgcgtcctccttcccccagtcccagcgctcacccacatgcgtgcgtatggggtcgttgggacctgtgtactcccacgcgccacgggatcgatcctggagaggtgcgatgcggcggcggaaatagtcaccaaagaccattgcccctgtgaggcccaggcttcgcaggcccctaaggcgatcccacaccgcgtcgtactcctcgcccagctccgaaaccgccagccatgcggcggatctttcgagaggactagcgggaatccgaagtcgcgggtggtccggcagcgcggtgtagaaccagtcctcccatttcttgcggagatgactctcgatgtattgccccgccgtgcctggccggggctggaagtaacatccccccaccaccgcaccttgcagcagctgcgggatgaagaaagactggaacagccgcatcgtcagccgcaccccgatgaacatctcgcacagatgtgcgaagatagccagcgtcatcacggcgttgggtgcgagatgcaaggtgtggatttcatagaaatccaaaacctcatggaagaatccggagaacggtggaatcaaccccgccatagcgaaggacaagaggtgcacagatcgctccggataccgcggccgcggccgcaactccctcgccctcacgacggcgccgtccggcatgatcttgcgggggaggttaaggtgcctatccaccgtaatgcgtgctgccgggagcactgtgtcgccagcgtcttgagccat

SEQ ID NO: 53683 - DNA, 276 bp, Oryza sativa
  Clone ID: PAT_MRT4530_55860C.1
ccaatctacctacttggaagttggaacgacgctgatgatatggacctgaggctactctgatgctagcgaagaagacaagccgtccagtgcagccgcaaggctggaatgcgggacgaacaagatgggcaacgcgactggagaccgctgcacaggcacgcaggggccgaggggcgcgcaaaggggcagcaacgaacacgtgcacgatcaaaagagagggggcgcggaagggcccggagacggggcgcccaagcggcaagaagggggggcaccctacaa

SEQ ID NO: 53684 - DNA, 768 bp, Oryza sativa
  Clone ID: PAT_MRT4530_55861C.1
atggcaggtttggatctaaatcaaccttttaattgggatgaagttgaggatttggagggtgaaatacttgatttgaactacgattatgtttgctatttagagaacgaagatgaagaaggtgggcacgaagacgttgacaacacagccgcccgcggcgacaatgatgatggcggcggcggcggtgacaacgatgatggcagccgtggcggcaacaacgatgatggcagcgacgacggcggtggcagcggcggcggagacggcgacaatgatgatggcggcggcggtggcggtggagcacacgccggcacaggaaccttggagttgaaggccatgatatcggtcacgagggacgctatccgaagctacctcattgaaaagatcttgcccgccatcaaagaaaaatggcctatcgaggaacgcggacttcctatctacattcaacaagacaacgcgaagacacacattgctgttgacgatctagaattcttagccctgcagtcgttgtttcataagtcatctccatcaagcatcgaagacattgagacaaatgtgatcaaagcatatgaagaatatccggtggataaatcaaatcgtgtgtttctcacacaacagggttgcgtgagagagattatgcgtgcaaaaggagggcaacattatgccatcccacatctgaagaagggaacattggaaagtaatggtctgctgccaataaggttgcaatgtgataagcaaatctatcttgatgcattggatttcatcaatgcatag

SEQ ID NO: 53685 - DNA, 2420 bp, Oryza sativa
  unsure (1)..(2420): unsure at all n locations
  Clone ID: PAT_MRT4530_55862C.1
atgctgccccccgcgcccacccgaaacccgggagcctgcaggttcatacccctcctcccaccaaaaccgcttctctctcccgccgccgccgccgcctcctcccgcggtggcctctgcgtcgccgccgcatcccgccgcgatttcctcctcctagtcccctccatcgccgcggcctccaccgtgctccagtccctcccgctatccgcctccgccgcggacgatgagaagcaggccgcgtcgcccgcgccgggccctgcagcggctccggctccaacctccgcgggagagcccgaggcggaggcgctgtcgagggtgtacgacgcgacggtcatcggggagccgcaggccgtggggaaggacgcgcggcggagggtgtgggagaagctgatggccgcgcgggtggtgtacctcggcgaggccgagctcgtgcccgaccgcgacgacagggtgctcgagctcgaggtcgtgaggaagctggcggcacggtgcgccgaggccggaaggagcatctcgcttgcgctcgaagccttcccgtgcaacctccaggagcagctcaaccagttcatggacaggagaattgatggcaacaacttaaggttgtacacttctcactgggcaccagagcgctggcaggagtatgaaccccttttgaactactgtcgtgataatggagtcaaacttgttgcctgtggaactccacttgaggtgtcaagaactgtccaagcagaaggaattagaggcctttcaaaagcacaaagaaagctgtacgctcctccagctggctcaggcttcatttctggttttacatccatctcaggccgatcattgatagacaagatttcagcaattcatggctctccatttggcccaagctcgtacctatctgcacaggcaagagtagttgatgactataccatgtcccaaaaaataatgaaagaaattactaatggatatccttcagggatgcttgttgttgtaactggttcaagccatgttatatatggttcacgtggaattggagtccctgctagaatatctaaaaagatgcaaaagaagaaacaagttgtagtacttcttaatcctgagaggcaaggtattaggagagaaggtgaaatccctgtagctgatttcttgtggtactctgctgccaagccatgcagtcgaaattgctttgaccgtgctgaaattgctagagttatgaatgcggctggtaggaggcgagaagcattaccccaggatcttcagaaaggaatagatcttggcgtggtttctcctgagatactgcaaaacttttttgaccttgagaaatatcctgttatggctgaactgattcaccgattccaaggtttccgtgaaaggttattagctgatcccaaattcctgcatagattagctattgaagagggtatatcaattaccaccactctcatagctcagtatgagaaacggaaaggaaggtttcttgaagagatcgactatgtccttactgatacgattagaggttctgttgttgacttctttacagtgtggcttcctgctcctaccatttcactcttatctttaggtgataatggttctggtgagagtttggagcttctcaaaggacttttagggtcacttccagataatgcatttcaaaagggtattatggggcagagctggaacacaaaccagaggtttgcctcagtgctgatgggtggaattaaacttgctggtgtgggattcatttctagtattggagctggagttgcttcagatgttctgtatgctgctcgtcgagttttgagaccttctacaagtgttgaaacagcgcgcagaagaacccccatatggaaatcggcgactgtttatagttgcttccttggaacatcagcaaatctacgatatcaggtcattgctggtctggtggagcatcgcctaggagaatatctgatggcttactataaccagccgcttcttgctaacttgttgtcctttgtttcacggacaattaattcatactggggaacacagcaatggattgatcttgcacgggctacaggcctgcaaactagtaagaaagagctgccatctccagagatttcaaacctacctgacatgccactgttagaatgtggcacaacagaagtacaaaatatggatgatagcaacaagcaacagccaatgaagtaaccgtacatagccaatgactccttggcctgtttgattgtggccattcaacacagggacaacttttgttttgatcacccgatactgttcaggtatatatacgggaaagacttcgtacggcagatngaagctcgtcgatatttttgtttcccaatctttatggccaggccaattttaacccttcgagagtatatatttgtacatcagtgaatgaaacaaatcaagtncgaaacacgtnaacaattacncgc

SEQ ID NO: 53686 - DNA, 2306 bp, Oryza sativa
  Clone ID: PAT_MRT4530_55863C.1
tttcctttttctcctcttcctcccccccccgcggcgcggccttctcctccgcggaggccactccacccagtccccctcccccccgcccttcgccgccgccttctccggcgaaccggtggccacgcgcgcttcccaacgtaccgtggcggtccggccgtcacccatttgagttgggagcacggtggcaatggggattgcggaggtggccctccacagtatgccgggggcattcgccgcccactccccggcatccaatttgcccctcgcggccgacgccgcgaggggcaggaggaggaggagcgccaattcgttgcacagctccagggcgctccaaggtccggtcaggtttccggggctgcgggccgccgtggagtgccagtgccagcgcatcgatgaccttgcgagggtcacggaagggaacggggcgtgggttaaggatgcggtggacaaggcaagccatgctctcggtgatgtgagggtgcctggtcaggctgtaggtggcaatgggagcgtaaacgggagcgccgccaagcctccgccccagcggcggaaggcgtcttctgtggaggatgaagcttgggagctcttgcgggagtccgtggtttactattgtggtagtccggtcgggacgattgctgccaacgacccgaatgatgccaatccgatgaattatgatcaggtgtttattcgggatttcataccatctggcatcgcgtttctattgaagggagagtacgaaattgtgcgcaatttcattttgcacacccttcagcttcagagctgggagaagacaatggactgccatagtccaggacagggcttaatgcctgctagcttcaaggtgcgaacaattccactcgatggagatgaagatgcaactgaggaggtcttggatcctgattttggggaggcagcaataggccgtgtggcacctgttgattcaggtctatggtggatcatattacttagggcgtatggaaagtgttcaggagatctgacagttcaggagagaattgatgttcagactggaattaaaatgatattaaagctttgtttagctgatgggtttgacatgttccctacattactggtaactgatggatcatgcatgattgatcgtcgaatgggaattcatgggcatccacttgaaattcaggcactgttctattcagctctcctgtgcgcgcgtgaaatgttaaccccagaagatggatcagctgatttaatacgtgctctaaacaataggcttatcgcactgtcctttcatattagagagtactattgggttgacatgcagaagctgaatgagatttatcgatataaaacagaagaatattcctatgatgctgtgaacaagttcaacatatatcctgatcaggtttctccgtggcttgttgagtggatacctcctaaaggaggttacttcattgggaacctgcagccagctcacatggacttccggttcttttctctggggaatttatggtccatagtaagcagcttggcaacaactcatcaatcccatgccattttggatctgattgaatccaaatggtctgatttagtggcagagatgccattgaagatatgctatcctgctctagagaaccaggaatggaagatcattactggaagtgacccaaagaatacgccttggtcatatcataatggaggatcctggccaacattgttatggcagctcacagtagcatctatcaagatgaacagaccagagattgctgcaaaagctgtagaggtagctgagaggcgaattgctatcgacaaatggcctgaatactatgacaccaaacgagcacgcttcattgggaaacagtctcgtctttaccaaacctggtctattgctgggtaccttgtggccaagcaactgctggacaaacctgatgctgctagaattctttcgaacgacgaggattcagaaattcttaatgctttgagcacaaacaggaaaagaggcaagaaagtgttaaagaagacattcattgtatgagttcttgaagcaaaagatccatcacttggttctttaagttagcatttaagttataggaaatatcttcctgtatatatacacgaaaggatatgtttggacggagagatgcctgctgttggatgctgttattgtagatgcatctggcttttgcaagaaagcacttgcctgggcatttctcaactgtatccctttcattaatttttgtacactagacttgcctcttgtagtttaccatatactccatttgacatgacaaattctgtgccaagcagtatgatcccatactattgacctcccc

SEQ ID NO: 53687 - DNA, 307 bp, Oryza sativa
  unsure (1)..(307): unsure at all n locations
  Clone ID: PAT_MRT4530_55864C.1
tccgaatcccggtcgccacgctccgctatttatccacttcaagttaaagttacaagaaccagacatcaaatgtctgcgtgaagtgcactgcggtctgcgatcngcgtgctgngaaagattacctgacctgctgagagatcaccaccaccacactactgcaccactgtctaggtgttgcactgagaagggcactctgaggggntgcaggcactgaattgcgagctgccatgctgcactgtgctcagctgangtcacccctgcactgctangcangcatctatactgatgcatcacacctgctcatata

SEQ ID NO: 53688 - DNA, 376 bp, Oryza sativa
  Clone ID: PAT_MRT4530_55865C.1
aaaaaaaaaaggaaagaaggccctggtttaaacctttaccaacggaacactacaattagttggcaactactacgggaaaaaaaacaaaccttggggggactttcctttccctcatttaaaaaaaaaaatccgggagcattttaacaaaaggggaagcttatacagaggaggggggtaacccataaacaacccagatgatacctttttatacttggggcaggcatccaacaaacaacagttttggaataacagcacccagcttaggcgccaactggagtagcatgcataacgccattgacgttgccaccgggtcctttaccttggaccgggcctctcccacgggcttaaccaaaaccacggccttggggcggggcgg

SEQ ID NO: 53689 - DNA, 458 bp, Oryza sativa
  unsure (1)..(458): unsure at all n locations
  Clone ID: PAT_MRT4530_55866C.1
aaaaactgatcatgaatgagcctggggctgttgaggagctggctagtatgctgaccaaggggacatcaagggggaagaaagatgcggtgatggcactcttcaacctctcaacacatccagaaagctcagctcggatgctcgagtcatgcgcagttgtagctttaattcagtcgctgaggaatgacaccgtgtcggaggaagctgctggtgctttggccctgctgatgaagcaaccatccatcgtgcatcttgttgggagcnctgaaactgtgatcactagccttgttgggttaatgcggcggggaactccaaaaggtaaggnaaatgcagtctcagctttatatgagatttgtcgtcggggcggctcttctttggtgcagaaagttgccaagattccagggttgaacacagttatacagaccatcaccctcaacggaanaaagcgcgccaagaagaaa

SEQ ID NO: 53690 - DNA, 362 bp, Oryza sativa
  Clone ID: PAT_MRT4530_55867C.1
gcacgaggattacacgacgacgcgccttatctcccccggtcgccgtgcccggccgtcgccgtcggcggcgccgtcgacgccgcagcagccgggagtggaggcctcgtcgtagctcctctcctctcccgcctcagggtcggggagcccccgcccccccgccgcgggttccgttgacgtggagccctagcgcgcgccaccgccgggcgtcgccctcccgtagcgacaccgccgccgccgtcgccgccggtggaccgctgatccatcgacataagcgctcatggggaagggagaaattgtggctgttcttcaagtaggtggcgaattcagcacagatgctgatggactaatgtcttactctggtg

SEQ ID NO: 53691 - DNA, 615 bp, Oryza sativa
  unsure (1)..(615): unsure at all n locations
  Clone ID: PAT_MRT4530_55868C.1
gatgacaacattatcatatacctctgattaataaaatttaagtcccacctcatctgctctgtcatgactgtgtacatcgcatcgccgttgctgggcaataaacagtttttaagaaagctcacaagttcactcttgcctcattacatctcctatcctcctgctgctgctaccgctcctcttatgtgcacattttaatgctaaaagtgaactgaagccccaaaatcttagcacatgatctgcttgtacagtatctgaattccatggatcaatgagagaaaagttcatccccaccactacattctccggcaaagagtctgctgctttcctctctgccaagaatcgcacaagttcctcatcgctccaagatttgcttatgctggtgttaagcaatgctaacccaggaactgaagaacacatgattgtcctggaacaaatagaaccaatttcagtcgacatgcttctccagttgacatgcaaacaccaaggctatatttctagctaaaggatgtgcattgataacatgaaaaacatatctattctgtgagtaaaacnaatctggaggaaataactgatacatacagcctaaatttagtgcaatatcacaaaggtagtaaa

SEQ ID NO: 53692 - DNA, 225 bp, Oryza sativa
  Clone ID: PAT_MRT4530_55869C.1
atggtctcacatgcttccattacccacaccatcattggcctcgccgtcaggccgtcatcacagatctacgtcagttatccttccgccggcttcctccaacctcctccatgctgcccgagaggaccgcttggccaccgcacaccgctctgggatgtcatgacaatggagatcgatagggggtgggagttggtggtgaggatgaggctcagcgcggaggaggagtag

SEQ ID NO: 53693 - DNA, 2076 bp, Oryza sativa
  Clone ID: PAT_MRT4530_5586C.1
atgacgctggccatcttcgcgcatctgtgcgagatgttcatcggggtgcggctgacgatgcggctgttccagtctttcttcatcccacagctgctgcaaggtgcggtggtggggggatgttacttccagccccggccaggcacggcggggcaatacatcgagagtcatctccgcaagaaatgggaggactggaagaaggactggttctacaccgtgttgccggaccacccgcgacttcggcttcctgccggtcctcccgaaagatccgccgatcgatcccgtggcgcgtgggagtacactggtcccaacaaccccatgcgcacgcatgtgggtgagcgctgggactgggaggaggaggacgcgaagatggtgattcggcgggtactgggcttggactccgccgagcaaacactgattccagacgggatcctttccctatggtgcgaccgcgaccgggagagcatcctggccgtgtcggttgttggcaccggcaggagcaggtccagccgggacggcaccggtggtagcgctgccgatgttgctggcggtggcgcgacagcaggcgggagtcggacaagcggacccggcgggggtgggagctctaggtctcccggcccaaaccgcggacccggggacgactcggccagcgacccgaaagggaagcggaagatgtccgaatctcgaccgccctctcccccgcgtggagggggcgccgagcgcgtggatcgtccgctagcgggccacaagagccctgccgggaccgaggccggacggaagaagaaacggctccggaagataggacaaatggagccgtgtcgggggagcttcattgagcccccgaagtggactttcaaccgccctccccgcaggcttggccgatccaaggccgcggggccttcacagcccctcggcagggcccacgggccgcataccgggtccggccccgagcgaaccccagccgggactcgtcccgccgcgggcgatagcggcggtgacgtccctcctgggggcgactccgagaccagggttcatgcggagcgccacccgggatcggggggcgaaggaggtcgtggctcggatgccgaggccggaggcggccttgagctcgaggtcaaggccgaaatcgggggcgggcccgagccggaggccgagtccgaaattgggggcgggcccaagcctgaggccgaggccgaatctacccgaggacccgaggcggggggcgagagggacggccgctcccccttgcacttggggcgccctcaaggctggtcgtgtagaaggggggccgagagcatcccccagtctcgcgggggatccagcggcactccgtcgtcccgggggcgggccgcaactttttcttctccgactccggcaagtatggagccgctcctgcaggtgctcgctgccgccgattccaccgttcgggaggggctcaacgcccaagttcaagccctggcggaagagcgagcggccctggaggctgcatgggcacagctcgcgtgcgagttgacgaggggcgtcgcgccgtggacgacatgtgctcgcgccgagcgcgcggcgatagcggcgagggcttctgagctggaggcccgtgagaaggacctggcggcgggcgggcagcccggcggcgcggagttggggagccagcttgccatggctcagagcactctcgccgatatagagcgcttggtgcaagatcaggccagggagattgcggccctccgcctcaccaacgggatcggacccgggaagctctccgacgccgtcgaccggctggagcgcgcggggcgccgagtcggcatttccgtgcaccgggataggaccgaggcaagggctcgggagcaagtccgggaggcggccgacgcgatcgtctctaacttcgaggggtcggccccccggttcaccttcgggcttgcctcggacaaggagagcgggagcggggacgatgatgacgacttcggcggcgaggactgggacgacgtctgtcacgcccagaaatttaacccaaatttccggactattttgtgtattaaatccctgtccaggacaagccagggtacacaaaacgacaagtaa

SEQ ID NO: 53694 - DNA, 395 bp, Oryza sativa
  unsure (1)..(395): unsure at all n locations
  Clone ID: PAT_MRT4530_55870C.1
accgagtttgtatactcgataaattaagacttacgacgatgctgtcaaagccttcgctgatggcgttgggcggcgttgcggtgggcatggccgtgtacgagccgctgcgcacgttcatggtgacgcactggttcgtgtcgctgctgctcgtcggcgcgctcgtggcgctgctgcagtacaatgagtggngcggcggcgtggcctctatcctgaaccacaccgacgcgnagaacatggtcgatgtcaacggcgacgtcaactcttacgagnagctgtacggnaacgactngcgtacgggcggcacgagcacgcgggtctgttgggccagcgcctnacgcagtacactgagatggtgantaagttctacaatttggtgactgacttctacgagtacg

SEQ ID NO: 53695 - DNA, 2149 bp, Oryza sativa
  Clone ID: PAT_MRT4530_55871C.1
cctccacttgcgctgctgctgctgcgagagcgtccgcgagaaggcgcgaaccattctcccccctctcggatcggcgggtcgaattggggcggaggagatgctggacgccttcttcaagggcgccggtggcggcggcggcgggttccgcggcgcaaagtgcaagacgctgctgaagctgtcgatcccgcggatcaagctgctgcggaacaggcgggagctgcagctgcggcagatgcggcgggacatcgccaagctgctcgaggccggccaggaggccaccgcgcgaatcagggtggagcacatcatccgggaggagaacatgatggccgcgcaggagattcttgagctcttctgcgagctcatcgccgtccgcttgcccatcatcgagacgcaaaaggagtgccctatagatctcaaagaagctatatccagcatatgtttcgctgctcccagatgtgcagatctgcctgaacttatgcaagttcagatgatgtttgcaactaaatacgggaaagagtttgttgctgcagctacagagttgatgccagattgtggggtcaatcggcagataattgaactactttctatccgtgctcctcctgttgatgtaaagatgaagctgctgaaagagattgctgaggagcatgagattgattgggatccatcagccacagagacagaatatcttaaaccacatgaggatctattgaatggaccaacctacttcaatggttctacacttcctcttccaaaggagaaacatgaggaaacactagctgcaagtgctgccgaacatcctgatgaagactatgagtctgatactggtttagagtcattggatttgcctgaagtcccaaaagcagccattcgcccaccttctgatactccagcaacccctgatattgacacacacgtgcaaagctcccagccaacttctcatgaattctcaaacatgccaagctcccaaccaacttctcatgaattcttaaacatgccaagctcccagccatcttctcatgaattctcaaacattaaaagctcccagacaacttctcatgaattctcaaatgttcaaacctcccagttggcttcgcatgaattctcaaacccaagtgacttggaagagaatccaacagctaatgctgctttcatgactcagccaaaaggttcagaacatattcctacaccattcgctcaaccaagtatgccagtttcacccaatgaaaagaaacattttgttccatttgcctctccaccgccatttgctgttccctctctagtggagaaaaatgagtccattccgtcaccttctccatctcctccggtgaagccaacagatccaggaatgttcaggacgattgatgaagtgaccccacctccaacagctactgattacttgttctcaaaacaaccagaacagttacactcaacctctgctgagaacattgcaaacattgacttggatgatgtactttctgctgcccagacagctgccgaaacagcagagcgagctgcatcagcagcccgtgctgctgcaaaccttgcacaactgcgcatcgcagatctgaagaagaatagtaaggcttatgagaactacagtgacagtgtccgaaaggaaagccatcctcaatccgaagtgacacagaaaccagtatttgatcaccaagattccttttccagtgacacacagggttatgtgccttctcatttgccccagaggtcgccattgatggaggatgatccgtatttctcctatcccaatctgttctcgtcaaaaccttgagggtggaaactcggtgcgacttagttcttcagcatagttcgaagtgcctgcgatgttgcatcttcagccttgtttaatcttgaatttggctgttgccgggatattctgtgtatgctgagttgatacttaaaggggggtactggcggggtactggcgtactgcagttttactaggtcactgcatggcttgttcaatgtctgtaaattgtaaatgtgtgctgcttgtaccaaatttgtgatacattttaccacctccacaagaaattttaaaaaataaaggtgaacattgttccttgcttaaaaaaaaaaccaagcgtcacggacacgcccgagactagttccctcgtgccgaattcctgcagcccgg

SEQ ID NO: 53696 - DNA, 1665 bp, Oryza sativa
  Clone ID: PAT_MRT4530_55872C.1
gcaacaaagagagaactgcgaagttcaattagtacttgtatagaagagaagagcactggttacatcaaacatggaacaaaacagaaatttttgaattaggcaataagatgcaaccctataaatgaactaaacaacactaaactttgagtaacagttctcagagtccacagcacacttagcagtgtagtacaaggagtagaatggcaacactgccttgcacagcaacactctttcatagctggttgcttttgctaagctgagctcactgctatgagtggccagaggggcagagctaggacatggcaagcacagaccctgcagcctagccaactctgtctcagaggacaatgggttcttggagacgaagacctccttcacggataggcgacttggcagcaaaatttccactaaatcagcaatgtagccaagtccatcacccaacaatgacagccccccaatatctctctgaagaaccgtacaccagaatttaggatctggattttctttcagaatcgccccgatgatctttgcgccgaagaatgatccgttcagcttcgcggcgatcgattttcctgctgccaccagcctagggttctcctggacatctgtgccggcgaaggcatgcgctttgaagaagaaccagtactctgggcagggcaaaaacttcagtttgataggctgcactgttccaattgtagtgacatgcttgttgctggttgtgactatgatcttgctaccttgtttgccacaactcaggcttttcaggagctcctcaagcatgttcttcttgtgtatgtcaacatcctcgaaaacaatcaagaacctcttgttgaagaaactctgctccagttcatgtagtggatcatctgaatttccaacatctccgatgacatgtttaggccgtagaacaggctttggttcacacatctccatcttgtaggtgtgtgagaaattgaacagcaagattgttgtgaagtggctgcgcaccctagcatcatcacaggcatgctgtactagggtggtcttcccgaccccgatatcgcctagaatcggaagaacaccaagttttcctcttggtagatcatcctcatgcagcaagaagttgatgatcatctcctttttgacatgtcggccgaacatctgcccctcgatgaagatgttggtagctagaggccgatgaatcggctggcaggcctgaaggagcatcatgaactccttgagatcaccacacatgctctgcaagctctcaaccaccctatcaatctcatcaacaccgatgtcgtggcgagacagtatgttcctcacggtgaaagccgcgacgcgcacacgctttgcaggattgaacttggacaaggagaaaggcttgggatctacctcatcgcgattcttgtcatcaagatcaggctccccgcatccgatcgtgtcgagcaagtaacggccttggtatgcgccatcgatgagctccgagagccactcgagggtgccatggttggtgatctgcctccctttggcctcctcaaccacgctatggatcttgatcagcatgcggcatatcctctgtaacttgacttcagtgctgtgatctccattgaaattactgacaacaagggatatcactctgccgatcacatcgccaacaattgccgagaagattgcttctgccat

SEQ ID NO: 53697 - DNA, 711 bp, Oryza sativa
  Clone ID: PAT_MRT4530_55873C.1
atggttaggatgaagcctggcatatatctgaccaggactaacatgccatctctgggaggcggcgagcggagcgggcgggcgagcgtggcggacgagttcgacgtcgtgccccccgccgactcgcgcgttgctgccacccacattgcctaccacttcgcggcggcgggcggagcggcggcggctgagcacggcggcgggcagagcaaccctgtcctcgtcgtgctcctccctttcatcggaagcgagcggaaggcgaagcagatagcaccgcagcagcggaaggcgagtggaaggtcgcgaggcagctgtgcaggcatcgtgatgccatcgcaggagagcgagctcaccatcaccaacccaggcgacgtcatcgcctcaacctactacatgagggcacgggagtgtgacgctggcgcgttgcgggaggagctttggagcgtgaaggccaagctcgagctcgcagagacgaaggcggtggcggcaggcgcgctggcggagaaggcgcgagaggtgtacgagcgcgatagggaggacatgaggtgcgtcgtgctctaccgctaccagcacctcaacctggccaggatcgtcgtcacgctgtcgggcgatgaagctggcaccagcgccggggcaccactggtggagctggagaggaccggtggtgcctctagatccgatggcttgaccttgccgctgccgagatctcacacctag

SEQ ID NO: 53698 - DNA, 225 bp, Oryza sativa
  Clone ID: PAT_MRT4530_55874C.1
atgtggtcaccatatggcgatgtcctcaggagctctgcacgccaggtgtttgatggaatggtcctgccatcagctgcattgcacaggccccaactgtccgtagaacttattggacttcaggacaaggacttgaagtttaggaagaagatgcatccaacatgggaaagagcctccaatttgattgttcccaacatcaagtaccaccaagtttttgcaagcaactaa

SEQ ID NO: 53699 - DNA, 426 bp, Oryza sativa
  Clone ID: PAT_MRT4530_55875C.1
atgaatgctaactttacattatattcatgttatactgattatactgctagcttatctaagagatgctttggtacgggtatagtgtttgcttgtgcaattactctatgtcatgacgatgatattagagtagtatctggtagtttaggcgtggtgtctagactatgggacatcattatttggagttatatgttacggatgagaggtgggtcactgatggtgacaggtcagtacgggtattcctccacgcgtgtatatagttctaagttaatttcctggggcgggtactcatccgtatttagccccggttgtatggtcatgacgggctgtcgtaaggtactcggcagttaggggtggcttctcgaagtactagaagggtatcggatagaggaaatatcaaaaatatcacctatgcggtcaataagagat

SEQ ID NO: 53700 - DNA, 1252 bp, Oryza sativa
  Clone ID: PAT_MRT4530_55876C.1
ttatttacgcaccgtggcaaggcgccattttcatagacttctttagggtgtgcgtgactttgtcagtgaggtcgccgcagtgtaaacgccaaccaaactcccactagcagagtagcagtcgcacagcacataaacccttccattccaaccccaattagcactagatcgtcatcgctatcggctgcagcaaagaatggcaggagctgggaggactaggagcacggccatggcggcgtggtcgtactcgtcgctgctgctgcagctgctgcttctctcgatggtcgccgtactagacggcgcggcgacgaccggcggcggcggtgccggggcgccggcgccggcggcggactgcacggacgcgctgctgagcctggcgggttgcctgagctacgtgcaggaggggagcacggtggcgaagcccgacgcgccgtgctgctcggggctcaagggcgtggtgaagaaggaggtggcctgcctctgccaggcgttccagggcagccagaacttcggcgtcacgctcaacatgaccaaggcgctccagctgcccgccgcgtgcaaggtcaagacgccgccgttcagcaagtgccacctttctattccgggcgtgactggtggtgctcctgctcccgctccattctccggggctccgttcttcggggggtcgtcgccttcggcatcgcctgctgggacaggaagcgactccgccgccgccaccgtaagagctccggccccatcgccgtcggctgctgtccggcccaaggagacaaaggcggccttgttctctgccgctgtaatcgccgccgctactctgctcgcgcaccgtgcctagttaggctttggcctgcacgggtccatccaacgagcgtgtcgttgcagttgttgacttgtgtgtttgcatatgtaccgagatgtatcttgtgagagtttttccctccatattactacacacttaaaccagcattttttacgttcatgacaaaggttctcacagatcatcaatcttttttagctgcattctcagttttacgacgtgatgcgtaagatcgataaggcctagaacgatcaaagtaaactagtaattgctgttgttttagtgaactagtgatgctggcctaagccctaaagcactagtttgggcccacctccttttgttctctcaaattgattgagcccatccatagtttgggtgtgtcagtttgctttatttcggaggccaagatttatatggaccttacccaagccagtgtcatct

SEQ ID NO: 53701 - DNA, 645 bp, Oryza sativa
  unsure (1)..(645): unsure at all n locations
  Clone ID: PAT_MRT4530_55877C.1
ttagcctnngtcagctgacgccttgnatnnccagtattacatgncnnatgcccactncnnaagcattttggcnnncaccaagttgtnagtgacagcgatgataaagaaaccactgttagcctgtcagctgacgcttgatccagtatacatgcatgcccactcaagcattttggccaccaagttgtagcatcttcgtctgcctgaaccgaagcgcatggaagaatgctgtctttgccatatgtctgaaccttttgctataaactgttgatctccagctattacttcttagttactttcgaaattattgttcctatctcttttggaaccatctttagcaatgtttgtatgcttattatggttacattagctatagtccaaccacgtgcccaaagtccataacagttgccaatatgccagtacggcaatggactttgaacagttggcattggcttagctccatgatacctctcaggtttcgcttagtaatgttagaccaatcttaagactcannaaaaaaannaaaaaaaaaagnnggcggccgcttctagnagnngatccaatgtttttcttnanncgcgtgcattgcgaacgctcattagctctttctatttagtgttcaccttaaatttcatattcaaactggcc

SEQ ID NO: 53702 - DNA, 456 bp, Oryza sativa
  Clone ID: PAT_MRT4530_55878C.1
atggtattactaaatttggtcctcaacagccgtcttcacgacaaattcaatactagattcatggacccccgcaaagtgaacacgctgatgctgcaacgctacgagaaacaaacagaggacaatatcatccatttcctggtgcagcagcattataaaacgttcatactactgccctacaacacatcattccactgtgttattcttctttttgaccttgacaaatgcaaaatccatgtctatgactcaatggataaaccggagtcaaatttggcaaagattttcgaagtgatttatgtgagggaaaacaccacccacgatgatttcataagggttgttcaagaacaaatgatgggattcatcaacgagcagattctcgctcccacaggaaaattctattacgatggaaagcctattcatcaagctggtccttcttcttccgatctcacgaagttgtag

SEQ ID NO: 53703 - DNA, 1068 bp, Oryza sativa
  Clone ID: PAT_MRT4530_55879C.1
atgtcgagggttatagcattacctagaagggagttcacttggaatcgaggagcatgccgcttgcgccatgatctcctctgcagcagaaccgtcaccccctttccccctctcccttcaaaccctagggaccggaggctggctggcagtgaggcaaggaggttggccggtggcagcgggttgcaggcgacgggacctggagacggcgccggcgcaaaatgggagcacaacaagtgtcgcctccccttcccgatccccttctgcgggaggctagagactggtaccgagcttgcaaaattttgttcacatgctttgctggctttggatgtccttgtacaccctcgtgaacattgtctacaatatgatccaaagattcctctcagaagagcagctcatggtgatcaaggatccctgtcgattgcttcagacaatgaagtattagattccgggagatgtaagaacctccactctgcatgtaaaaaccaagctaccgagaattcaggagatgaagtcaatgaatggctattctctactgacgatgctccaattgatgcttttgtggaagacaatactgcggagaaccatgaagtgaaggagatgtccagagatcatttggtgcagaaggacactgtcatcggagaacatcaagaaattgttttaaataagtttcatggggaattgctggttccaacgtccagtagaattgatgccgatgtggctattgcaggaacaaaaggaggaacatacaacagccctgctgattacatggtgggttatcctactcactttttcaatgttgattcagctcgcatcagcataacaccacctgatactcaggatcttgggggtgctacattttcaaacaataaagacgaccagcatggaaggaccatttcaggtgccgcttcaagtagccagaatgtggcaaggcacaccgcaccgatttgtgatgcttcaggcgtgtctggtactgagtgggactcacttgacccattcctggatataggtaattttggcactgagacaactttttccttggacatggctaatcttgatccaggctccaattag

SEQ ID NO: 53704 - DNA, 855 bp, Oryza sativa
  Clone ID: PAT_MRT4530_5587C.1
atggctcaagacgctggtgacacagtactcccggcatcacgcattacggcggataggcaccttaacctcccccgcaagatcatgccggaaggcgccgtcgtgagggcgggggagtcgcggccgcggccgcgatatccggagcggtccgtgtacctcttgtccttcgctatggcggggttgattccgccattctccggattcttccatgagccccggccaggcacggcggggcaatatatcgagagtcatctccgcaagaaatgggaggactggaagaaggactggttctacattgcgttgccggaccacccgcgacttcggcttcccgctggtcctcccgaaagatctgccgcatggctggcggtttcggagctgggcgaggagtacgacgcagtgtgggatcgccttaggggcctgcgaagcctgggcctcacaggggtgatggtctttggtgactatttccgccgccgcatcgcacctctccaggatcgaccccacggcgcgtgggagtacactggtcccaacgacctcatgcgtacgcatgtgggtgagcgctgggactggggggaggaggacgcgaagatggtgattcggtgggtgctgggcctggattccgccgagccaacactgattccagacggaatccttcccctctgctgcgaccgcgaccgggagagcatcctggccgtgatgtcggctgtcagcaccggcaggagccggtcctgccggggcggcgccgaaggtggcacggccggcgcgagcgggggcggcagctccagggcacctggtccgagccgcggtcccgagcccgaggccgaggccgaatctacccgggggcccgaagcaaggggctag

SEQ ID NO: 53705 - DNA, 306 bp, Oryza sativa
  Clone ID: PAT_MRT4530_55880C.1
gcagaatataacgacgcgtccggacatactatctgctgaaaatgaagctgatccaggatctaatatatgatactattggagctgcatcatgattatctatgaagatgagctataagctgaataaccactatctcgatggggaggaagcggtagctgagcatttagtatatagaaacaaagtccgtcttgttccaataccagtacagcatcaaactacgacttgtgaccttagcaggcaaacatagcattacaagtaggcttttttacgggcatacatagatatcaaatactgctaatactgcgata

SEQ ID NO: 53706 - DNA, 541 bp, Oryza sativa
  Clone ID: PAT_MRT4530_55881C.1
ccggcggggtgacgctccggtggcgaagcgatttgcgcgagggtggcgcgcggtggccggtgggcgtgccgggccgaggtactagcacagtacagcagtgcactgctgcccgatcgaagcggccgtcgcgcatggggccgtttcattattgcgatgcgggccgggagcacagtggcagtgtggactgttgccgcgcccgcgcgcgaatcgggtggaggcgcgcgtgatgatggcctactgggctgctgggctctggaatttgcgcggccctaccacgaggagcggtggcatggggttgtacggcgcgtgctgcaaagggaagcgagaaggggagcacgaggcagttgctcgctgcacgtgtccaggcaatctgttgatatgttttggttcttcctccttgtccatttggatttggatcttcgaaatcccatttgtatctttgtgagaaatgatagtcgttataggccatttatgttaaatttcagcattattcttaccgggcttcaaaaaaaaaaaaaaaaaaaaaaaaaaaaaaaaaaaa

SEQ ID NO: 53707 - DNA, 140 bp, Oryza sativa
  Clone ID: PAT_MRT4530_55882C.1
tgttctcttggtaccggcaaattaccctttcgtcagctttgtattggtagagatcatgtgggcagcaagatattgatgggagggagatgacaaatacagaggacagactcgtagggcagacggggagtaatgtcgactgt

SEQ ID NO: 53708 - DNA, 1757 bp, Oryza sativa
  Clone ID: PAT_MRT4530_55883C.1
gcacgagggagagaactagtctcgagttttttttttttttttttgatgtcttaagagccttgagatggataggcatatatctatttaattcatcatcttggtcaacaggttcagcccagtccagtcctagcaaccataagctaattatgtactacgaaataaaaaagagagagaaagatattaacttctctgcagttaggcaaagcagactaatccatccactcatccaccacttctgctgcataacgggcgcctcctacaggcgcagtagttgttgcaccagagctcttcttcaccttctcggcgaggaacttggccgtgtcggcgcccttcacgttgaactccatcaggagctcctcgaacagcgtcttgaggttgtcgttgaacgtggggcgtctactgacggaatccaccttgtccggccgcggcttcagagcggcggcggcggcgctggcgctggcgctgctggtggatgctcccgcgtcgccgtactccggctccttctcttcggggaccaccgatccgaccttgtggccttccatgtagtacctgcatgctgccaggatggtgtgcccgcgctccctgaagtggctggtaacaaggtctgcgaagtgctctggaggccgccgaagtgagtagagcatcgtcctgcatgagtgcagaaatgtgttgtcgttatactccatagcaatccgctctccagatacactattggcgtaggatgcatatcctggctcattgaagtagggcttctcattcaaaatgagagcttgaatggagacgagcacttgtagcatggtcgactgagatggattccacgtctcacaaccactacctgcccaggtaccaagaagactaaggcatacttttccattattgtataagtttgggttaatccgtagtccgccagagtggtagtatactgatggaggattagcagggtaagagttactaaattgaatatcaaagaagaagagcccatcgtggtacggtgttcccttaggtccgataatagcagccctaagaaggtccattctatcttcagcaacacggacataaatagatgctggtagatctttctccaaaagtttccagtcatgctgaatcctcttcacccagtctctctttgtcacatcccctgatgttgctgcataatgatgatcagagaaatttttaacagtgtcaaactgtttgaacaactgagatttatttgcacttttatttgcgctttcatcttcaactgtcaatttggaactgctttgctcttcgttagttataattttctgaagccaaggtacagtagcctccacgcctggaggcaaatccaaatcatcaaatttatcagcaagacgttggttgaagtagtcaccgccatcaaattcataatcatatccatcgccatcatcataaatgcaatcgtcctcgtccagatagtaatcttcttcctcattttctccattatcaaaatctcgaggctctggttctgacatttgcaaagaattacttgtgctcaatccaacttggtcatcagaagaaccctttccccaatccactgagccgccatcgcacacaatccccaattccccatgactcgcactcgcgagacgcttggcgagcgcgtctgcgacctggcaccgctgccgcttctgctgctgctgggtggaggatccccacgccgccacgtccgccgctcggcacgacgccgacgacgacgacgacgagctcccctgccccacgccgacgtacccgaagtccat

SEQ ID NO: 53709 - DNA, 3777 bp, Oryza sativa
  Clone ID: PAT_MRT4530_55884C.1
ttaagcataaaaacaacgaagatgttcgatattccaagagttgtcgataggtgtaccgtcttcgcgcttgagccgataggaacctggccgagtgacttcagatattataaatggcccttcccataaaggggataatttgtgccgatcccgtgtagttcgaattttcctcaaaaccaggtcgccgactaagaaagctcgcgatcggacgttacgattatgacaacgacgcaacccttgcaagtatcgggccgactgaattaaggctgcttcgcgggtctcttccagtcggtgtaggtcatccactcggtcttctccgtagcgctcttcacgaaaattgcgaaaacgcaaagattcaaactctacctcactaggcaacattgcttctgctccataaactaggaagaatggcgattggcccgtagcccgactgggggtggtgcgcaaggaccaaagtacggatggaagctgttccacccatttgccggcatagggatttagtcggtcaaaaactcgtgcctttattccttggagtaccatgccgttggcttgttcaacttgcccattgctcgtgggatgcgctacggaggcatagcagattttgataccgaagtcttcacaaaaatctttaaatactccgtcggtgagttgagtgccattatcagtgatgatctgattaggtaccccaaaccgatgcacaatattgatgaaaaagtctctggctttatctgccgtgattgtgatgaccggtttagcttcaatccacttggagaatttgtcgatagccacaaagaggtgtgtgtaaccgccgactgcctttttgaacgggccgaccatgtcaagcccccaaaccgcgaacggccaggacaacgggatggtttgtaactcttgggctggtagatgagtttgtctggcgaaaaattgacaaccttcgcatgtccgcacgatcttgtcggcatcggacacagcagtgggccagaaaaaaccttgccggtaagccttgccaccaatggtgcgtgtggcagcgtggttgccacagataccagaatgtatgtctttcagtaattgtctcccttcctctagggatactgttgacagaaaacacgaggcctgggagatcttcggatgtgtgagcgtgccagttgatttgatccaaattcggttgttaacagatacgcagcgttgcagaattcttgatggacttttcttgtacaaattggcctcatgaatgatgtaaagcctgctgcgcctggaaatccgctcagcttcgtctttatcttgagggagttcttgggaggtctgaaaccgtatgaggggctctctccagtcagcttcgaccatagctatgtcttgagtgtccgcggcttcagctgtttctctcttgggtacggttggctcataaagatgttcgacgaatacatcagaaggggccgcttcgtgtttggatccaaaattcgctagtctgtcggttgcttcgttattgtgccgaaaaacatgggtgagttcgagtccatcgaatttgtcctccaatttgcgtacctcttgtcgataagcagtcatattatcatctagacaagaccactctttcatgacttgattaacaaccaactgagagtctccacggacgattaatcggcgaatgcttaaagagattgcaatccttaatccatggagtagcgcctcatattccgccacgttatgggatgcagaaaaatgtatccataatacgtagctcaatctttctccagtcggggaaattaagacgaccccaggtccagtgcctataagcctcttcgacccatcaaaatacatagtccaatattccatcttttcctctggcatgtcttcttggcactcggtccactcggcaaggaaatcagcatgccatagtttcttcttgacctcagtctcttctggataagtttccatcggctgattgcgttctttccttaatccactctgcatggcgtactccaatgccatttcataatcaacctgttcaacatgttgtgttaagcaatccctaaaggtcatctctgtcacctcctcagagtttactttctcaaggagttcctcatcttccttatcataacgtggcctctttgggggagactcatctgcaatttctcccagagtctccataattgccctcgcaacatcaggaatgtatctgtttaggttccttttcctgtcctgccgttcacgagcctgtagtttctttactatctttgacttcagttgaagacaacactgcttaagggctgactgaacagcagatgctatttcggttatgtcatccccaatgtactcttttccagttcctttaaaaggtatctttgtacttacaatgctaacaaagacaccaatcttgtcctgctgttgatttattttgtagctgctccaattgattctttttaaagcagttcttgtgatgacatcagcaccttgttcaaagagaagtgggattcggttcgcatatctaaaaatgtttagaccatgtttaacatcttttccaccaatacttattccagcttcaacgatgaatggatgaccttcaaaaacctgtgggctgcttgcatgcgtagcaactagatcagggtgcagctcttttatgatacctagacgtaaattgtattcacctgcaggactaagacaattgccactgggatcatcaaattttgcctgccgaaataactgatgtatccgaactaattgctgtgatgtaagactcttaactgtcgtttttgcactgaaatcaggccccatctccccgatcaaacgttcagcatgagatttgctaatattcacaaactcatgttggaggaactgcaaaaggttttgctttgtagtctctgatattaagcgctttatcagcagtaaatcaacagcagaaggatgatgcttagtttgaagaggaataggaggcataacatctgtcctccgtgcaaactgtattgtcaaatttttgttatgaatatcgatatcaagaagacaaaatgaaataaaattctggcctttcattgatgacttaatctcaataggaaggcctgtgctcatctttgaccatataagtgccattttagcaccaagaccaaattttccacgtgtttgcctcaaaccatactttgtgcccgataacactctaccaagcatatttgggatatcatcatgtggcatacctcgaccattatccttgcaagtcaccctaaaaaatgcagcctcaccccgacctttccctcgagcagctggagcctccttaaccttcttcccaagagcagcatttttggcttgtgtttcttggaagcgtgcttctttggcaaggcgtttctcacgagccttagccgattcaaagtcatcatagagctcttcatcaatacgctgtcgatcaactagccctatcattgtgttgaacttgctcttcgtgatctcttctattataatttctatgtcagggagctcagagatggactcggctgaatcaagggcattctcaactaactcccgcatcgttgtgtacagtgactttccaggctgtccagcattttttgtgtcaatcaaaacattgtcaaaccccgcgatgttcttgttctccgcgaagaattcagcaggcgacttctgcttgaggaggctgctctccttggccgtggccaacgccgacgccttagaggcggccttccctttccccgccgccttccccttcgccgccgccgacgacgacgccgcagtgaccttcctctttgtcccgccgctagcggcgccgtcgccagcgtcgtcgtccat

SEQ ID NO: 53710 - DNA, 1036 bp, Oryza sativa
  Clone ID: PAT_MRT4530_55885C.1
gtgggattcggttcgcatatctaaaaatgtttagaccatgtttaacatcttttccaccaatacttattccagcttcaacgatgaatggatgaccttcaaaaacctgtgggctgcttgcatgcgtagcaactagatcagggtgcagctcttttatgatacctagacgtaaattgtattcacctgcaggactaagacaattgccactgggatcatcaaattttgcctgccgaaataactgatgtatccgaactaattgctgtgatgtaagactcttaactgtcgtttttgcactgaaatcaggccccatctccccgatcaaacgttcagcatgagatttgctaatattcacaaactcatgttggaggaactgcaaaaggttttgctttgtagtctctgatattaagcgctttatcagcagtaaatcaacagcagaaggatgatgcttagtttgaagaggaataggaggcataacatctgtcctccgtgcaaactgtattgtcaaatttttgtcgggtgagtctgagagaaatctaaaaaggaattgagcgtatggtgtgatgacagccatctgacgcatgtaatgtagtatctttgaacgatgagttgtccaattcccctcaattataacttgaagctccgccccatgccagcgatctttattctcccttttctcatgtaaatgaacatgagggacattcctaaattgtggggatcaatgttagtcatgataaactctatatgtttacctccaaaaaagaactgtttatgtttacaataaggtaaaaggtagtgaccaacaaatcagctcctgtgttgagccgatgacccaacaaaatgtacttacttatgaatatcgatatcaagaagacaaaatgaaataaaattctggcctttcattgatgacttaatctcaataggaaggcctgtgctcatctttgaccatataagtgcctgtttaattaataactgattcacattaaatccactgaaattcaccacaaactgctataattaaagcctgcagcccggggatcca

SEQ ID NO: 53711 - DNA, 246 bp, Oryza sativa
  unsure (1)..(246): unsure at all n locations
  Clone ID: PAT_MRT4530_55886C.1
aaaannnnaaaaaaanaaaganagaangccancatgtgattcanaccannaatcatcggggcatnttnagggnaaangnttncttancancncggnaaggnaacaanaacanatcaangangtgaagtcnngnccnatgncnaagcaanactnctncannangnnccacnaaagnaggangcctggtgnggnttgttggnaatagacccntgngattccatgnangttacatnaatatgcctccag

SEQ ID NO: 53712 - DNA, 236 bp, Oryza sativa
  unsure (1)..(236): unsure at all n locations
  Clone ID: PAT_MRT4530_55887C.1
cccccataaacctgtttttgtaactgaaacaaagggaaaacgattggttggcaaaatgtccatggttcaaaaaaaaaaaacccaaccccttatcgataccaggaacaagagccctttccaaatttttgccaaaacctcttaatggggggnggatttaaatctgccagtttaaaaatcacttgcggtagccctcggggggaaacccctgggggaagccccacccgttggcccatttt

SEQ ID NO: 53713 - DNA, 1561 bp, Oryza sativa
  Clone ID: PAT_MRT4530_55888C.1
gtctccgcctctggaggcagcgacgccggccggttgccgccgccgcctacccttcctcactccacctctccgactaatcgccgccgccttcgccgccgccggaggcctagaatggcgtccacatccgccgcggagcctggcgtccggttctccgaccgagcggcgaggaggtcgtcgctgggcctgaggtcgatggtgctcctgatgcacgtggtcttcgtcggcgccgtcttcctgctcgatccgaccctcgacaggcgaatccgcgaggagccctggtacataggggcatatggagcgcttgttttgatcgccttagtgcagtatttctacacagctggttcatctcctgggtatgttctcgatgcaatgaaagctggttcgacgatgcacgcaacctacatcaatactgccactctttcgaaacaatcaagtccaaacaatggtagcttaaattcccctttgagcctccctcaacagcagaaacttaatccgaccacttctacatcaacatggttgcagcgagttgcagaattatacccccctgggtcaagtagcagggattggacttgcacttactgcagggttattcagccacctcgtactaggcattgccatgactgtgacaaatgtgtccttcagtttgatcatcactgtgtttggcttggaacatgcattgggaaaaagaaccactgcagattctggtggtacatatttgaagaaacaatcctgagtatctggacagttgctctctacttgactcgatacgtttagatgttgacaagcctggtggaaggattttattggcgtaatcctgttggctgtgttgatctttattctcatattcttgctactattgttgatctttcatacttacatcgctcttacaaatcaaacaacctacgaagttgcccgaaggaagcggatattctacatgaggtgataatacattcgtgctgtatcattcgcaggggtatacccgacaaagttcatccattcagtaaaggcatctgtaggaacatctacgtcttctgcttctctagacagaagggatatgatctagaagaggtgcccccacttgaagagttggaagccagagctgctccctacacatgccgcgatataatctgctgccggtgctgttgatcttgtacatgtcaatatatgttactaccatagcattctttttttcacatgtggaagcatatgcttagcctgtgtagtgtaattcctctgccttctttttttttagcctgtggaagcatgcatgcctttttcgtgagctgcacctatgtggttgttcatgtaaagagagtcaggcctggttgttcatgtaaagtacatgaccgcatgtacattttcaagcacaagacgtgtgtctgtgtgggcttagatccaatcgttgtggtagattagttccaccatttttctttttgaaatcagggatggttgattactgataagttgaataaaaaaaaacaagctttagtaggaaaccgttactacttgtgtcgaaaaaaaaaaaaaaaaaaaaaaaaaaaactcgaggggggcccgtacc

SEQ ID NO: 53714 - DNA, 2073 bp, Oryza sativa
  Clone ID: PAT_MRT4530_55889C.1
atggcgaggtggtggggaggggaggggaggggagggagcgggacgccggtggtggtgaagatggagagcccggagtgggcgatatctgaggtggaggcgggggcggcggcgccggggtcgccggcggcgggggggaaggcggggagggggaagaacgcgcggcagatcacgtgggtgctgctgctcaaggcgcaccgggcggcggggaagctgacgggcgcggcgtccgcggcgctgtccgtggcggcggccgcgcggaggcgggtggcggcggggcggaccgactccgacgacgccgccgcggcgccgccgggggagagccccgcgctgcgcgcgaggttccacggcttcctccgcgccttcctcctcctgtccgtgctcctcctcgccgtcgacgtcgcggcgcacgcccagggctggcacgccgtcgtccccgacctgctcgccgtcgagggcctcttcgccgccgcgtacgcgtcctggctgcgcgtccgcctcgagtacctcgcgccggggctccagttcctcgccaacgcctgcgtcgtcctcttcttgatccagagcgccgaccgcctcatcctctgcctcggctgcttatggatcaagctcaagggaatcaagcctgtgcccaaggctagcggcggcggcggcggcggcaaagggtcggacgacgtcgaggccggcgccgacgagttccccatggtcctcgtgcagattccaatgtgcaacgagaaggaggtgtaccagcaatccattggtgctgtctgcaacctggattggccaaggtcaaacttcttagtacaagtactagatgactctgatgatgctgccacctctgcacttattaaggaggaagtggagaaatggcagcgagagggtgtccgcatattgtaccgacaccgggtgatccgtgatggctacaaggctggaaatctcaagtcagccatgaactgcagttatgttaaagattatgagtttgttgttatctttgatgctgatttccaaccacaagcagacttcctgaagcgaactgtgccccatttcaagggcaatgaagatgttggattggttcaagcaagatggtcttttgtaaacaaagacgagaacttgctgactagactgcaaaacattaatctgtgcttccactttgaggtggaacagcaggttaatggagtattcctcaatttctttgggttcaatggaaccgcaggagtatggagaattaaggcacttgaggactctggaggatggatggagaggacaacagtggaggatatggatattgctgtccgagcacatctcaaggggtggaagtttctgtacattaatgatgtcgagtgccagtgtgagctgccagagtcatatgaagcatacagaaagcagcaacatcgatggcattctggtcccatgcagttgtttcgactctgttttgtcgacatcatcaaatcaaagattggagtatggaagaagttcaacctcatcttccttttctttctccttcgcaaactcatattgcccttctattccttcacacttttctgcatcatccttcccatgacaatgtttgtccctgaagctgagctccctgcatgggtggtgtgctacattccagcaaccatgtccttgctgaatattctcccagcacccaaatccttcccatttattgttccctaccttctgtttgagaataccatgtcagtgacaaaattcaatgccatgatttctggcttgttccagctcgggagcgcctacgagtgggttgtgaccaagaaatcgggccgttcttctgagggcgatctcgtttctcttgttgagaagcagcctaagcaacagagagttgggtctgcacccaaccttgattccctagcgaaggagtcccatccgaaaaaggattcgaaaaagaaaaaacacaataggatataccagaaggagctggcactctccttccttctattaacagcagcagctcgaagcctgctctcggtgcaaggcatacatttctacttccttctgttccaaggggtctcattcttggttgtcggcctcgacttgatcggcgagcaagtcgagtga

SEQ ID NO: 53715 - DNA, 440 bp, Oryza sativa
  Clone ID: PAT_MRT4530_5588C.1
acggcccgacgcggaagcgaggacggccgtccgatcaaacggacggcttagattttgcccgcgccgaacaaatcgcatgccagggggaatcgacggctctctcaccctggcgagcgagcgagcagcggtccggcgaaggcggcgcacgcgtgcggcggcgagcgctgcagcggcttcatctcggccggctggggggcgcacccgtagggtggcgccaagccgtgtgccacggcatcgacggtccggcgaggcggcgcgcaagcgacggcgagcgtcgatgcggccggagctcgtcggggggggggggcggagctcgaaagcatccgccaagctgacgcttcccgtccctggcgagggatggtgtggagagacaagctccaagacggctgcgcacggggaacccgacacgaccgcgagaagctaaggtgcggcggtgccgc

SEQ ID NO: 53716 - DNA, 638 bp, Oryza sativa
  Clone ID: PAT_MRT4530_55890C.1
cacgaggggaagaggaagaggaaggcagcgcggaggaacgagtcgtcttctccaaggcgtccgaaaaatctctccgttctctcgcaagccacagtacttcctactcctcctattcatgcccccggccccgaattggatacgctggttatttcagaacaaaagtcagtttagattcgactggaggcctaactggtggtaatttgaagcattttggttcgctttggggggccagtagaggcaaaaggtctgattttttttatcgaattggtcgcccttttgattcgagaatcgtcaagctcggcgtgagagtttctttggcctgtgctcgcctgagagtagaaggctgtggttcttgctcggcaaaatttgggcttatccttaaatcggaaggcgtgggcagctaaattcacaaggaaagcttcagttacccacggaagaaggatttcccttctctctcagagactcggattggtgatggcccggcgctgaattgctctgaaatctgccgaaagcatcgatctttgtctccgaaagatcagggattgggccctcgtatccccaattcgccccacctccaagacggcggtcgggcttgtagatggggtcggggtcgagcatcctcggtgcggacggggaat

SEQ ID NO: 53717 - DNA, 1161 bp, Oryza sativa
  Clone ID: PAT_MRT4530_55891C.1
ggcgagccgggccgtccccggcccctgcctctctctctctctctctctctgtgtcatgtcgtcgtcgtcgtcggcagctcgcaccctcctctcgccggcggcgcctcctgtcccgcgccgcggcgtggtgcgtcccgcgaggtgctccgggggcggcggcgcggcggcggtggagacggccgcgtcgggggcgaaggtttgtacggtgagcaaccgcggggactccctggcgatatgccgggtgctcaacggcatgtggcagaccagcggcgggtggggccgcatcgaccgcgacgccgcggtggacgccatgctcgcctacgctgacgccggcctctccaccttcgacatggccgaccactatggaccagcagaggatttgtatggccttttcatcaatagagttcggcgtgagcggccacctgagttgcttgaagaaatcaaggggctaacaaagtgggtaccacctccggttaaaatgaccagaagttatgttgaggataatattaacagatctcgaaagagaatggatgtttctgccttggacatgctgcagttccattggtgggattatgcaaaccctggatatctggatgcactaaaacacatcacagacctaaaggaggaaggtaagataaagacagtagctctgacaaacttcgatacagacaggctgcagataattctagaaaatggtatcccaattgtcagcaaccaggttcaacattccatcgtcgacatgcgtccgcagcgaagaatggcagaactttgccagcttactggagtaaaacttataacgtatggcacagattatgggtggtctgctgtctgagaagtttcttgacaccaatgtatctataccttttgcttggacctcctcttgaataccccatctttgcagcaagtataagcggtatggtggatgcctggggtggctggagcctggtatatgctttgtttcatacgttgaagatagtatcattgaagcatggtgtttttacgagctctattcaaaagaaaacgtttgctttggactgcctttacaggaaggttaggttttgtcaaagacttatgtgtgaatattgtagtaatttgattttctgttatttaccacaattatgaccatggtttcgagttgtgtaatgaagcttgaagaattca

SEQ ID NO: 53718 - DNA, 360 bp, Oryza sativa
  Clone ID: PAT_MRT4530_55892C.1
atggctggtcctacggaggccacagcaaatgagcaaatacaatactgcttttgcaccgtcgtcgtcgtcatcgcccgtcagatcagattcagcctagatcgatcagagcctgccactgccagtgttaaggaaggaatgcagacctgtccccgggtcccacattccgaccccggttatatatacagaacaatgctagagcggttggtcaatctggtggttaagccattcaatcttcctgtgaagaagaagaaaaggggaagattggagacgaaggaagattcagctacatatccctggttccagagcggcgcgtgtggcagagagcatgtgccggttctacatatgagatatataatctaa

SEQ ID NO: 53719 - DNA, 534 bp, Oryza sativa
  Clone ID: PAT_MRT4530_55893C.1
ctggtggcctacctgggttgccagacacatggaacgagttcatttacggtcacatctctcgagccctcaaaggaggccggttgaccgattgagaatcaacctcagagataacagtgaagaatttgtctatttggaatccattagatcgtttagcgaggaagaagtggcggcggaggccataaattattttctaggtttaggaatctatgctgttgattcacctagggtttaaacagaatggtggccatggggtagagaaatgtagctgtaagcaaccaagatagccctagacgagagctctgatgctgtctgagagtttgaatgcggttgtttctgaggagaatgctttctctgcttcccgtccaaaaaaggtgagtgtatttccatggatgcatgtatataatcttactaaattcttttggggaattgttttcggtttgtcccgtggacaattttcttgaactgtcgcaaacgttccagtaaagctgcaacagtcaatatacaaattggctgttgccttgtgattccaacccc

SEQ ID NO: 53720 - DNA, 378 bp, Oryza sativa
  Clone ID: PAT_MRT4530_55894C.1
atggcggcgcctcaggggaacaacaaccaggctgcagctccggcggcgccgcctccgctgccgccgcagccaccgaggccgccactgcgacggcaaccgctgctggaccagctcccgagacgcctggagcatgagatcagcaggattgatggtcgtatcagggagctagaggatgaatgctacaggcttgtctctgaaggacatgggtcgacgctggtgataaggtttaggattgaaaagatggaagctttgagggcaaagctgatatcccgttacctgcagcagcagcagaacgacgacggcggcgatagcaatggcggcgactctccgcctccgcctccgcctccagccgccggtggtgccgctgcggtgaactga

SEQ ID NO: 53721 - DNA, 597 bp, Oryza sativa
  Clone ID: PAT_MRT4530_55895C.1
atgaagtcttcttactcttcggcggcggtttccttttctcgcagagcgggagagggagtgacgggcgctgcggagctggaggcaggggaggcgaatagtcgatgcagcgctaggagctgcggaattagggagagcgacctcgtgccgcggcgctcggggctgcctgccgtgggcgacgatgcagcgcgcttagcccgtgcctctccacgccgtgcgctgctgctcaagtgccaccgccgctgcaccacctccagccgcctactggcgtcgccctgggcgctgcaggaccatgccaccacctcgctcggcgtcgccactaactgttttagccttcttttgttgggtgtagttgttgttgtttcatatgttcctgtggtgcaatttgagttcgtctatgaagcctccgaagaccatttttctctgagcaaggcaattggagtcctagcgccgctgcctcctgttgccacgccgccgcctcctgttgccaccgtcgtcatcgccttcgcgtcgccggcttcctctagcatcgtcgtcgtcatcctcgccgggttgccgtcgttgccatttccctcgccgtcgccgttgttctctcggtga

SEQ ID NO: 53722 - DNA, 444 bp, Oryza sativa
  Clone ID: PAT_MRT4530_55896C.1
ctatggtaagctgaacgcctggaggtcccgacccggatttcccggtccgccccccccgcccggctcgtcggacgctcccctcctctctgtctccctgggtgccttttaaaactatatgcgggtccaacaaaggccagaagccgcatttgcggacgaagaagagggcccatagcactggcggcgcagacattcctgttcacctccgagcccgtgaactagggtcacccatacaagccgtgcgaccagctgtcggacgcggtgctcgacgcgtgccttgtccaggaccccgacagccaggtggcgtgcgagacgtgcaccaagaccaacatggtgatggcgctccgctagagcaccacccaggcccccggctactacgagaagatcgttcgcgacacctgccgcggcatcggcttcctgccgacgacgccggtctcgacccccacc

SEQ ID NO: 53723 - DNA, 341 bp, Oryza sativa
  Clone ID: PAT_MRT4530_55897C.1
attcattggcaacataataacatagcctccttgacaacattaacaaacatgctagcatctcaataattcagtcctcaaaacagaattccaaacaacgcatcatgtcaatgcaaaattgctccaattactcgagaaatctaaaagttgctgcaatccaacgatcaaacatattgctaaaagttcttttggctattataacttaagaaataaccatttcaaaacatctaaatctctaaaccaacttaatcgaatttcacaccattcttcacactataataaagcttgtaccttctctttgtcaaactttacatcatattttttctcttctccttaaaaccttt

SEQ ID NO: 53724 - DNA, 1039 bp, Oryza sativa
  Clone ID: PAT_MRT4530_55898C.1
tcggcacgaggggtcgccgcaccttccttccggcaaggaaaaatctgtctcgtctcctccgctccttgcgccatctcgcggctgaacaggggaggggcgccgatttctccatctggcgagcagagcagggggaggggaggggatcctgagatggcgagcacagcatgctttgtgattgtgagtaaaaatgatattccaatctacgaggctgaagttgggtctgctcccaagagagaagatcaagcttatcagcaccagttcatattgcacgctgcattagatgttgttcaggaccttgcatgggctacaaacacaatgtttctgaagtcagtagacagatttgatgatcttgtggtgtctgtttatgtaactgctggtcatactagatttatgttacttcatgactcaaggagcgaggatggaataaaaagtttcttccaggaggttcacgaactctacatcaagatcttcctcaatccactctacctacctggttctcgcatcacatcctctcattttgatactaaggtcagggctcttgcaaggaaatacctgtagcatataaccaggtgaagactctgtaagctccacaccgccctgtattctagtgagtagcacttgccttgtactagttcttctacaattgaatgaacgtagatcctgagactagcctagcagtaccatttactattgaatgaacatagatcctctaatgatcttgtactagaaaagtgctctgtttgtcttttccggagttagtagacgcccattccttgcctgtactgtacttctacccagagattatatgtactagtagtataaaatatctctcacccatcgaagtttagtgggaaatttatgtcgatcgccttgtttctgacatgctctgctgctaagataatactagtgtccttgaccccgatcctgtgaacatggtttgttgcgcatcggtactgtactgtttgtaccatgatactgtagtctctgtagttattatagttatgccaggaaactggagggtggtgctgcagcatttatc

SEQ ID NO: 53725 - DNA, 331 bp, Oryza sativa
  Clone ID: PAT_MRT4530_55899C.1
gcgtacaaccaaactttttcattataattgggtcactgccagttttccattttgatcgcaaaaaaggccctttagggctaggtttttcaagatttcacatccaagcgccccagacccaaccataaattttttcgcctgctaaattttttttggagggttaaacccaaaaccactggttggggccacatacctagcttccttgggcttaaaccggggtggctccaatgggtcaccggggagagactcatcaaattctaaattggaaaaacggggaaaggggatggaatttccctgaacagacttttacaacctttggacctacaatgccccc

SEQ ID NO: 53726 - DNA, 978 bp, Oryza sativa
  Clone ID: PAT_MRT4530_5589C.1
atgccgagcctcgcgcccggcaacggcctcctcgcgtttcgcgagttgctcgcccagccggcgcaaggccacctcacggcggttcacctcggcttcgcgctcggcacgcctcttcccggagccgtagctcctccgcgcgacgggcctccgaagctttcgcggcgaggcctcgagcgctgccgtccgagcccgcagcgaggcatcggcctccaatacccgctgctcttgggcggcagctgcatcaaggactacgcgggcgtccttaaccctcttcgccagtgctgcctgccgctcttcctccgtctcccgcatgacgatgtccagcgtctcctcgcgcgcctggatttcagccagttgggcttggcacattttgcgtcccaccttcaccatgtcgtccacggcgcggcgcccctcgtcaacccgcgcgcggtccgcagcgagctgtgcccactctgcctccagggctgctcgctcttccgccagggcttgaacttgggcattgagcccctcccggacggtggaatcggcggcggcgagcacctgcaggagtggctccatacttgccggagtcggagaagaaaaagttgcggtccacccccgggacgacggagtgctgctggatcccccgcgagattgggggctgctctcagcccaccttctgcgcggccagccccgagggcgccccaagtgcaagggggagtggctgttcctctcgccccccgcttcgggccctcgggtagattcggcctcgggctcgggctcgggcccgcccctagtttcggcctcggcctcgggcttagggccgcctccagccttggcttccgggccgcgacctccctcggcccccgctcccgggtggcgctccgcatggatccgagcctcgaagtcgcccccgggagaaacgctgccgccgcgagcgatagcattcggactttgtcccctacaaagggtcgaaccccgagatcccatgggaagtaa

SEQ ID NO: 53727 - DNA, 576 bp, Oryza sativa
  Clone ID: PAT_MRT4530_558C.1
atggccgggtgtctcgagcacgtagctcgtcaaggtttaacaaaggacggatgtcaagtaaacatggcacaaggaaagcaacggaaggaggcagggagggagaggaggggctcaccgagtggtgccgacgaggggcagcggcggaaggagcttggcagcggcgctccagcgatgaccggcgaatatggagggatggtcgagcacctcctcgacctggccaaggggacggcggccgtggggagccgggcgccggcctggttctgacagcgaggggcggtggccgaggtgcggcagggcgcggcgatgctgtgggtggcggtagcatggccaggcgagacctctctcggtggcggggagcggctggaggcggtggaagaggcgcgtggctcggcttcgtggtggatgtggtggcttaggggtggatcggaagggtagagcggcggccggtgtgcggtgcggagcggcggagccaatggtggtggtgatggcgtggcacggcagccggagctcaccggtgagcggtggaggtcgggagcggcgtggggagcacgggagaggacgcgggagctcgggcaa

SEQ ID NO: 53728 - DNA, 892 bp, Oryza sativa
  Clone ID: PAT_MRT4530_55900C.1
ccacgcgtccggaatggtacatgaagctgtcagattttgggctgtgcaagccaattgattgttcaaagctctcaacattgaatgaagatgaaccgatgggtgatgacaatttgagggaatcaatggatatcgatagctctttctctgaaacaacaaatggtagaaggtggagaagtcaacatgaacaacttcagcactggcagatgaacagaagaaaactggcattctcaactgttgggacaccagactatattgctccagaagttctgctaaagaagggatatggaatggaatgtgactggtggtctttgggtgcaatcatgtatgagatgcttgttggttatccaccattttattctgatgatccaataaccacatgccgaaagattgtccactggagaaaccatttgaaatttccagaggattcaaaggtgtctcctgaagcaagggatctcatttgccggttattatgtgatgttgaccacaggattggcagtgcaggagcagaccaaataaaggcacatccttggttccgtggagttgcttgggaaaaactatatgagatggaagctgcatttaagcctcaagtaaatgatgaactggacacacagaacttcatgaagtttgaggaaatggataatgctccaaccagaacaggttccgggccctcaagaaagatgatgctgaattccaaagacctcagctttgtgggatatacgtacaaaaactttgatgctgtgaaaggattgaaacattcagatcaacaaaggaaccaatctctaataaggccctctattggctccatttttggtccagcagaatatggatccatctagagaaccaaatggaagggacaagcacatgcacacagtttcttcttgggatccgatga

SEQ ID NO: 53729 - DNA, 2564 bp, Oryza sativa
  Clone ID: PAT_MRT4530_55901C.1
atggagagcgagatggcggacgcggcgccggcaccggcggtggcggcggcggcgacggcggagccgctggcggcggtggcggaggaaggggaggaaggcggggaggcggcggtggggtccaccctcaccatggagcgcgtcgccgcggcgaagaagttcatcgagaaccactaccgctcgcagatgaagaacatccaggagcgcaaggagaggttttcagtggagaaatgtgctgtaaatgttgtgtggatgcgacggttatgtctgtctttaagtgccgttgacaatacacttgtcgcatatcatttgtttgtattaagcggttggcgctttagattggagcgacaactggaatcttcccaagttcccagggagcagcaaatcaatctactaaaagatctggagagaaaggaaacagagtacatgcggcttaaaaggcacaaaatctgcgttgatgactttgagctgctcaccattattggcagaggagcttttggagaggttcgactctgccgggagaagacatctagcaacatttatgcaatgaaaaagctaaagaagtctgatatggttgtcaggggtcaagtggaacatgttagagcggaaagaaacttgctggctgaagttgctagccactgcattgtgaagctatactattcttttcaagattcggagtacctttatcttatcatggagtatctccctggtggtgatatcatgacccttctcatgagagaggataccttaactgagcatgtggctcgattctacattgctgagaccatccttgctattgagtccattcataaacacaactacatccacagagatattaagcctgacaacctgcttctcgacaagaatggtcacatgaagctgtcagattttgggctgtgcaagccaattgattgttcaaagctctcaacattgaatgaagatgaaccgatgggtgatgacaatttgagggaatcaatggatatcgatagctctttctctgaaacaacaaatggtagaaggtggagaagtcaacatgaacaacttcagcactggcagatgaacagaagaaaactggcattctcaactgttgggacaccagactatattgctccagaagttctgctaaagaagggatatggaatggaatgtgactggtggtctttgggtgcaatcatgtatgagatgcttgttggttatccaccattttattctgatgatccaataaccacatgccgaaagattgtccactggagaaaccatttgaaatttccagaggattcaaaggtgtctcctgaagcaagggatctcatttgccggttattatgtgatgttgaccacaggattggcagtgcaggagcagaccaaataaaggcacatccttggttccgtggagttgcttgggaaaaactatatgagatggaagctgcatttaagcctcaagtaaatgatgaactggacacacagaacttcatgaagtttgaggaaatccattatatccagatcgaatcattgggtgtggccgaggtcagggatgcggagaggagcgaatccacaacgatgggagggccaggacgtgcattcgtgcgccagagcaggggaggtctggggagggcagcgaggttgaacgctgagggcgggctggggtgggtggcgaggacgcgcaccacagcgggggagatggataatgctccaaccagaacaggttccgggccctcaagaaagatgatgctgaattccaaagacctcagctttgtgggatatacgtacaaaaactttgatgctgtgaaaggattgaaacattcagatcacaaaggaaccatctctaataaggccctctatggctccattttggtccagcagatatggatccatctagagaaccaaatggaagggacaagcacatgcacacagtttcttctggtgatccgatgattcaatgacctgcgtcccgttgttccttggaaaatcctgaactaaaattagcatgcgacgcctgaacgatgtggcttcatccggagaacctgcttgttttaggccaggttatctgccctgttaatcgttggcgagcattctgtagaaatccaacaaagcttctagttgtaaaaatagtatgctgagtacttaacaaaacagcccgtgtacccaggggggcttgtggtctttgttgtagcgtgttgggaccaagcggaaatgggcaggttggggggagtatttgcacctttgggggctggctgcccaggttggcagagctaattgccgccttctcttgtggcagttcctggtccgctgacattttcatcttgtggaaacaaacaaataaggcaagctatgctgttgttgctgttgccggtggtgttttgatgtgcgtgtgtatcagcagaaatttaattttccgtaacgacccttttgccccctagtctatggtctcccgttgcagaaatgcctaattttgtctgttagtgtaatgttcatcagttatatctttggtcatgtactattattgaaccctctgacttcataattttgtggagatactaccttcttttccgaaaaaaaaaaaaaaaaaa

SEQ ID NO: 53730 - DNA, 468 bp, Oryza sativa
  Clone ID: PAT_MRT4530_55902C.1
atgggcatcaagctgtgctttgcctcgcctacccaccccaagagcaacggccaagtcgagcgagccaacgccgaaatcttcaaaggactcaagaccaagacgtacaacgtcctgaagaagcacggggattcatggctcgaggaactgcccgccgggctgtgggcgaatcggaccactcgaagtcgcgccccgggggaaacaccctttttcctggtgcatggcaccgaggcggtcctaccttcggagctttccctgggtttgccacgcgtcacgctgtacgatgaggccaaccaggatgatctttgccacgacgacctcgactatttagaagagcggagaaggtgcgcggccctgcgagcggtgcgctaccagcaaagcctgtggcgctaccatcacgccacgtccgggcccgatcactgcaagtcggcgatctcgtcttgcgccgcgtacagtcgcgcttggggctga

SEQ ID NO: 53731 - DNA, 123 bp, Oryza sativa
  Clone ID: PAT_MRT4530_55903C.1
atgaagatgttcaatattccaagagttgtcgatatgagtaccgtcttcacgcttgagtcgtcggttgagatcatctactcggtcttctccgtagcgctcctcgctgaagttacgaaatcgtag

SEQ ID NO: 53732 - DNA, 1421 bp, Oryza sativa
  unsure (1)..(1421): unsure at all n locations
  Clone ID: PAT_MRT4530_55904C.1
atggataaccacgccgtcgcggtccagcaacgcgacacggcgccccggccccgcgcccgcgcgcgcgcctccgtatccagtatccagggggggggggggcctggctgggctgaccacgtcgccctcccacgcccgccacgttgccacccgcgccgccctcccaccccatgtcggcgaccgctcgcgttcgcgtcctcctccatccatccgcatcgcgccgtgctgccaagcggcgcgccgcctcacgtgtcggccggggcgcgcgacacgggcggcgcggcggggctcgcgcgaccccaccactcatttccccaggagaaaaagccgaagccaagacacgcaggtgtcgcctcgcctcgcctcgccctcgcgccgctgcggaattccgcgaggatggataggagggaggccaccgtcttcttgcccccgccgccgccaccgcagccgacgcagccgcagcagcagcctgcggcggcggcggtgagggctccggtaggcgggaggggtgggggaggagggaggcagtatcgcggggtgcggatgcggaagtgggggaagtgggtggcggagatccgcgagccgaacaagcggtcgcggatctggctcggctcctactccaccgccgtcgccgccgcgcgggcctacgacaccgccgtgttctacctccgcggccgctccgcgcgcctcaacttccccgaccagctcgacggcgcgggtggtggtggcgcgggcgccggcggcgccgaggaccacagggagctcaccgccgccgtcatccgcaagaaggccgccgaggtcggcgcccgcgtcgacgcgcagcactccgtcgtcggcgccgcggcgcccgtgccgctccagccgccgcagcccccgccgccccagcgccgccggaccaagaaccccgacctcaaccgggagcccaccccggacacctccgacgacgagtagtaatccgagctgattttgcctcccttcttccatccatctagttcgtagtccttagccaccccaagacacagagagagagtagcagctagtagctatagctagtcagcgaagcggatagcgccaaggaggcggtcgtggacgggggcgcacgcaaggtgttcggcgaaatgcgattgaggtcggaggagcccacaagtatatccaataatggagccgcgacgtcgccgtcaagccggggaagtggtggttagcaagtaggaatctagagctcagctcgtcgtctgttccggcgacggcgactgtactaggagcgtgcgtgtcagcgtgagcatgtagctaaaagcaagacggctatgtacctcacccttttcgcttaagcgttggtttgtaaagggaaaatacccagcaagcaagacaaaaaaagctgcttcaagaanctctcgaatcaaaaaaaaaaaaaaaaaaaaaaaaaa

SEQ ID NO: 53733 - DNA, 1444 bp, Oryza sativa
  Clone ID: PAT_MRT4530_55905C.1
caatccccaccctactccaatgattccccccctcctcctcccctccatagctcgcaccagataagcccccccgcctccgcctccgccgccgcccacgccgtcgccgtcgccatcgcggtcgtggttgtgttcgtctgttcgtgtactctggatcgatcgattgatcgggcgcgggtggaggaggaggaggaggagggtttcgagggggtgtgctagggtttcgagtggaggtggggggaggttgagctcagttcattcttctgtcgccgtggtgggggcgggggaggcggagccggatgctatgctgctaggctgctcgtccctgacgtcgtgggtgcgtcgcctcgtcgcctgcgttggagcagaaattgttttggatgtgcgaaacctactccaataatagccgttgatgagccttcaaaaggtttaagaattcaagggcgctcaataaagcagcggagtttgtcggaggacttttggagttcaagcccgccgggaatggagaatagtgccatgcaatctcagcgtagcatgtcttcaatcagtacggcagcacaatcgagcgatcagcatggagctggaagtagcaccaacccaaatgagtttgtaaatcaaggacttctcctgtggaaccagactaggcaacagtgggttggaaacagaaggcacaattctcagcgtcaacaacctcgagagccaaaaataagttggaatgctacatatgagagccttctaggaagcacaaaaccatttccacaagcgatccctcttggtgaaatggtagatttcctcgtggacggctgggagcaggaaggcctatatgattagtgggttaaatgagtgatgaagggtgttgtttgtggggtcaaattatgaatcaccgagaatgtactcagaaaaacttcagcctttcaaagcttgtgggtgataactgcggtattcctggagacaggatggcatccctatcttaagtaaacgtaacatattctttactgctaattgtgttaacataagtttcatattgtgataaaaaaaaaaaaaaaaaaaaaaaaaaaaaaaaaaaaaaaaaaaaaacccaaaaaaaaaaaaaaaaaaaaaaaaaaaaaaaaaaaaaaaaaaaaaaaaggaaaaaaaaaaaaaaaaaccccggggcccccaacgtttttgtccccttaagggggaaatgggccctgggaaaaagccaattccggggggaaacccccattcaaacaaaaagggaaaggggaaggggggcccacccccccgaaaccctcctcctcctcctcctccacccgcgcccgatcaatcgatcgatccagagtacacgaacagacgaacacaaccacgaccgcgatggcgacggcgacggcgtgggcggcggcggaggcgtaggcgggggggcttatctggtgcgagctatggaggggaggaggagggggggaat

SEQ ID NO: 53734 - DNA, 258 bp, Oryza sativa
  Clone ID: PAT_MRT4530_55906C.1
atgtctctcgccttccgggcgcgccacgcgcacggcgtggcgagggataaggcgacacaaagaaggtggcaagtgtttgtcgcggctaaccggacgccgcagttcaggtacttcgtggtggcctcccacaactccggctccctcttggagttcacagctcttgcttccttgtccgggctgccgctcaccacccatccccgtgcgataccgtttgcgccaaccgcccgccgccgctcgacctacgcgtgtgcccgatga

SEQ ID NO: 53735 - DNA, 219 bp, Oryza sativa
  Clone ID: PAT_MRT4530_55907C.1
atgggggagggcgtcgccatcgccaccgctgctcgtgatgaggaaggtagccgctgccccgcgtcagtcgcgagatcaccggccgccgctgaggaagatggggatcgcggtagggaggtagccatcgctatcgctgccgtcgccgccgttgctcgcggccaagttgtggaagacattcggcccatccttatgggcctaattgagttttatctattctga

SEQ ID NO: 53736 - DNA, 111 bp, Oryza sativa
  Clone ID: PAT_MRT4530_55908C.1
atttgtgacaagcaagaggggatctccatcgcgtgctgcattctccgtatggaccgtatattcagatttgtgacgagcaagaggggatctccatcgcgtgctgcattctcc

SEQ ID NO: 53737 - DNA, 1661 bp, Oryza sativa
  Clone ID: PAT_MRT4530_55909C.1
caggcatgcacatgctgctgcaccgaccgtagtagtcggagacgaggatgacggcgcggccgccggagcggcgggagccggtggcgtagcactccaggccgccgtagccgtggacgacgtcgccggcctccccgcccgtgttctccgtcatgttcggcgggttctccaggcacgggtgaaaagaaaagaaaagaaggagggaggggaattagacttcccacgggcggctagggcgcggcccgagagaaaggagcggctcggcagaccttaatgggccggccggcccaagaaggcggcccaaggcacgcgcacgggcggggggaagagaggaagccgatgggccgggtccaccttgcgtggtcccgggtgggacccgcttgtcggtgactcggctcaccggtttggggaggggaggcgcggcgcatgcgcgcggttcgcggaggacgcggatgcggcgggcccacgcgcagcctcatggctcaccgcggaccatgcgcatgggggaggggggaaacggagggagcggctggccgggtcagccgatccggtcgtgccgaggtggctccgacgtggcgcctacgtggctgccacgcgggccggctggaggaagacgaaggcgccggcctcgaatggacggcgggcggcgacggtttctccgggacgccgtgcgacgacgaggggcgacggggcgtacaccgggatgacgagggagaacgagagggagcgagccaacggcttggattcgccggagggagtccgtcggcggcggattgcggcggcggcaaccggcggagagaaaagggggaaacggcgacgaggtcatgagggaccgattcccggcggtgagagcatctacgcggctacgggaacccaccccttgcgccggattaggaggaaacgcatcgagggaggccggcgacgagagacgcttccgagctcgggcggcgatggcggcgagcacacggcgagcgacggcagcagtcggggcgacgccagggaggagatggatcgaggagggagaatgggggaatgcactaccgagatgaggcggggcgctgtgacgagaggctgacggcatgggagcgatctctccggcctcgtgccggggaagaggaagaagagagcgcgcccggagtccccttccgtgtcctcgctcgtgccggctcctccgacacgcgcgacggcgaatggcgaacagagcatgggaggcggcgacaatggagtggaggcgatgggacaaaacgagaggagaaggaagaagagagggcgacgcagcagagggggggagctctgcctctgtcccttggaagctagcgcgcggagtggcggggctgggttgtgacgacggcgatgacggcgggggtggtgtggagcggagcggcgacacggacggcaggcgcggacaggcacggcagaggctgacggcggcggcgaccaggcggtcggccaccacggcgcgcgcgcgcgcgggaagcaacgggcggcgcgacgatttgggcggcgtcggcgggaagcggcagcgagagtggagggcgctcggctcggcgcggctcacgcgcacgcgtgcgcagcgcacgggcagagcgggggagagggagagagagagagagagatggggagggagggggagatgggccgagaggaattcggcccatcgaacc

SEQ ID NO: 53738 - DNA, 2670 bp, Oryza sativa
  Clone ID: PAT_MRT4530_5590C.1
atggctcaagatgctggcgacgcagtgctttcggcatcgcgcattacggcggataggcatcttagtctcccccgcaagattatgccggaagacgccgccgtgagggcgggggagtcgtggccgcggccgcgatacccggagcgatctgtgcacctcctgtcctttgctatggcggggttgatcccgccattctccggattattccacgaggttttggatttctatgaaatccatgccttgcatctcgcacccaacgccgtgatgacgctggccatcttcgcgcatctatgcgagatgttcatcggggtgcggccgacgatgcggctgttccagtctttcttcgtcccgcaactgctgcaaggtgcggtggtggggggatgttacttccagccctggccaggcacggcggggcaatacatcgagagtcatctccgcaagaaatgggaggactggaagaaggactggttctacaccgcgctgccggaccacccgcaacttcggcttcccgctggccctctcgaacgatccgccacgtggctagcggtttcggagttgggcgaggagtacgacgcggtgcgggatcgcctcaggggcctgcgaagcctgggccttacgggggcaatggtctttggcgactacttctgccgccgcatcgcgcctctccaagataaatcacgtggcgcgtgggagtacactggacccaacgaccccatgcgcacgcatgtgggcaagcgttgggattggggcgaggaggacgcgaagacggtgattcggcgggtgttgggtctggacaccgccgagcaaacactgattctagacgggatccttcccctctgcagcgaccgcgaccgggagagtatcctgggtgatgtcgaccgtcagcaccggcaggagtcggtcccgccggggcggtaccggtggtggcgctgtcggcgtgggtggctgtggcgggggcgccaagcgcgtggcggaccaaccgccggcgggccacaagcgccccgccgcgcctgaggccggacggaagaagaagcggctccggaagataggtcaaacggagccgtgtcgggagagcttcattgagcccccgaagtggactttcaatcgccctcctcgcaggggatctcggggtccgaccctttgcaggggacaaagtccgaacgatcggagcggcccgggcttggccgatccagggccgcggggccttcatagcctcccggtgctcgccgccgccgattccaccgtccgagaggggctcaatgcccaagttcaagccctggcggaagaacgagcggccctggaggcagagtaggcacagctcgctgcggaccgcacgcaggttgacgaggggcgccgcgccgtggacgacatggtgaatatgggacgcaaaatgcgccaagcccaactagctgaaatccaggtgcgcgaggagacgctggactccgtcatgcgtgagacggaggaagagcggcaggcagcactgatcgcttcaagcgtcctgaatgaagagctaggtgacattcgcctagctcggacggcggcgctcgaggctgaacgcaaggccttagatgagcgtgcccgctccgcgcaggagtttgaggccacgattcgtcggcgaatcgaggtcctcgaccagagccagcgcgagcaagacgcgcgcagccaggagcaggcgcagcgagcccaggagctggagaggcgggctaaggcgctggaggagcgagcgcgcctgctagatcagcgggagtccaccttggcctcccatgagagaacagcggcagaggcggaggcctcccttcgcctttgtgaggaggctgcagccgagcgtgaccggaccaccctcgccgtgaaagcttcggcggcccgtcgcgcgaaggagctatggctccgggaagaggcgtgccgggaacgggatgccgcactcgccgagtgcaaagccgaggtgaaccgccgtgaagtggcctcgcgccagctgggcgagcaactcgcgaaacacgaggaggccgttgccgggcgcgaggctcggcatctggagagtgctcgtgccgagtgcgcggcgatggcggcgagggcttctgagctggaggcccgggagaaggacctagcggtgggcgggcagcccggcggcgcggagttggtgagccagcttaccgcggcttagagcactcttaccgacctagagctcctggtgcaagaccaggctagggaggtcgcgaccctccgccttaccaacgagatcggccccgggcagctctccgatgctgtcgatcggctggagcgcgcggggcgccgagtcggcatctccgtgcgccgggataggaagctcccgcccacacaaccggcactcgcgctccggctggacgggctggcggcggatctggagaggctggaggaggaggccggcgacatcgtgaaaacgtcatcggcttccatggcgcgggccacggtggaactggtcctcacgagccaccaagcccgtgatcccgacttcgtcccatggcgcgcacttgagaatttcccccgggaaccgaggcaagggctctggagcaagtcccggaggcggccgacgcgatcgtctctaacttcgaggggtcggcccctcagttcaccttcgggcttgcctcggatgaggagaacgggagcgaagacggtggtgacgacgccggtggtgac

SEQ ID NO: 53739 - DNA, 1379 bp, Oryza sativa
  Clone ID: PAT_MRT4530_55910C.1
gcgcgcgcgggcggggaggagagagagagaggtttggggaggggaggcgcggcgcatgcgtgcggttcgcggaggacgcggatgcggcgggcccacgcgcagcctcatggctcaccgcggaccatgcgcacgggggggggggggaacggagggagcggctggccgggtcgtgccgaggtggctccgacgtggcgcctatgtggttgccacgtgggccggctggaggaagacgaaggcgtcggccggaacggacggcggacggcggcggcgagcagcggagcgaaccacggcgatacaggcgaaagcgagcacaccgggaggttgcacgagacgaggggagacgagtcaacggctcggatttgccggagagagtccgtcggcggcggattgcggcggcggcaaccggcggagagaaaagggggaaacggcgacgaggtcatgagaggccgattcccggcggtgagagcatctacgcggctacgggaacccaccccttgcgccggattaggaggaaacgcatcgagggaggccggcgacgagagacgcttctgagctcgggcggcgacggcggcgagcacacggcgagcgacggcagcagatggggcggcgccagctagctactggggtactactcgagcggcaactcaaagctaaggggaggagatggaacgaggagggagaacggaggaatgcactaccgagatgagcgcgcaccggctcctccggcacacgcgacggcggctttcggcgggagagacagagggacggcaatggcgcgggcgagaaacggggaagattgggaggggaaaaaggaagggagggcgcctgggtttatagggcggcaatgtcggttttggagaccgaccttgggcggtcaaggcgcgagctggcgctcggcgctcgcggccaaaacggcgacagaggcggatgacgccggcgggggagagaaaaggaaaaaggaagggagaaagggggcttgccccttgcctctttgggaaaagaaggagggagagagggcggcgcggcaaaggggggggggaaactctgcctccgtcccttggaggttagcgcgcggagtggatgacgacagcgatgacggcgggggcggtgtggagcggagcggcgacacgggcggcaggcgcggacaggcgcggcagaggctgacagcggcggcgaccaggcggtcggccaacacggcgcgcgcgcgggcggcgcggcgatttgggcgacgccggcgggaacggcggccagagcggagagtgagggctcggcgcggctcacaggtagagcggggagagagagagagagagagagagatggggagggagggggagatgggccgagaggaattcggcccatcgaacctgagggaggcgaaa

SEQ ID NO: 53740 - DNA, 588 bp, Oryza sativa
  Clone ID: PAT_MRT4530_55911C.1
atggccgaccgcctggccgccgccgccgtcagcctatgccgcgcctgtccgcgcctgccgtccgtgtcgccgctccgtttcaaaccgcccccaccgtcatcgccgtcgtcatcgactcggccccgcccctccccgcgcgtgcttccaaggaaaggaggcagggctcctcctcatcgccctctctccctccttcttttcccaaagacgcaaggggcaacccccctttctcccttcctttttccttttctcttccccgccggcgtcatccgcctctgtcgccgttttggccgcgagcgccgagcgccagctcgcgccttgaccgcccaagatgctttagctcgcccgaatcggtctcccgtcgcgccatcgccgtttccccttctctcgccgccggttgcctccgccgcaatccgccgtcgtcgagcatcccccggcgaatccgagccgttggctcgtctcccctcgtcccgtgcaacctcccggtgtgctcgctttcgcctgtatcgccgtggttcgccgccgccgtccgcgtccgttccggccgacgtcgtcgtctacctcccgccggcccgcgtggcagccacgtag

SEQ ID NO: 53741 - DNA, 300 bp, Oryza sativa
  Clone ID: PAT_MRT4530_55912C.1
atggttcagtggcggcgcgacctcgccggcgccggcgaggagaaggagcgttgcagggtcaacgacatgtccattgtcaactggtacaagcccggcagcaagagccccctcaggggcggctgctggagcctacctcgccggaaggtggtgtcctccgatcaccgcctccacgcaagatcacacaaggtgagcaagaaggtgcaccgacgagatcaggaccaagaacagcagctacaaagggatcatgctgtggcagagacctatgacattgacggcaaccaaccaccgacggattactga

SEQ ID NO: 53742 - DNA, 121 bp, Oryza sativa
  Clone ID: PAT_MRT4530_55913C.1
ctaaaatcagctagggcgagaagcaacacgtgctatgaaacgcaccctcctggatacagacagtttgcactgaacacattttgtttgagagactcccaagattcaatatgagtgccaagat

SEQ ID NO: 53743 - DNA, 144 bp, Oryza sativa
  Clone ID: PAT_MRT4530_55914C.1
atggggatgcattaccccgtggggaattcccaatttccatttctagcggtgatcggccagcaagtggaagagctcaacatctcgcaacacgagaacgggctacggatgggcaagcggaggatttgggcggtgaacgataggtaa

SEQ ID NO: 53744 - DNA, 216 bp, Oryza sativa
  Clone ID: PAT_MRT4530_55915C.1
atgtgcgatcggcacagcgaggagcaacaaggcacggggtcgaggcgggtccggtgcaccgcggtgctcgggagcactttgcggctcacgggagaagaaaggagctgtatggcgcttgtcctggcccgctgtgtccgtcaggcttgcccgcggacggttgcggcgcacgagagcgacaaggccgacacggcgctgaagcctggaaggctcggctag

SEQ ID NO: 53745 - DNA, 764 bp, Oryza sativa
  Clone ID: PAT_MRT4530_55916C.1
gcgggggggcgtgggcgccggcggcaacttgagggggcggccgcgtcgatctcgagagattgggtatggccttgaggtcgcgatggctctggcaacaaagaacctcaccagataagctgtggcagggactaaatatcccaattttgcagaaggaacacaaccttgtctcgattctatggtttgctcagtgggcgatgggaagttggtactgttctgggaggattgctggctacagggctcttcaattcggtcactcgcgccggctgtctacgcagctgttcccgctcggttccggaacaggcgaacggtggttgaggctttgcaagacaagaggtggactcgagacatctctgcggcgctggggatccaggcaatactggaatatctcaagctttgggaccttcttcgatcggttcagcttggggagggactggacacgatctcttggcgttgggagagttcggggatttactctgcacgctcggcgtatcgtcttctcttcttgggaagaaccaacctcaagcacaagccaatttggaagtctctagcgcctcctcgctatcggtacttcttgtggctggtcgccctcaatcgttgttggacagcggatcgccttcggagttgagggctgtcacacccggctcactgccttctttgcgatcaatgtgatgagacgattgatcacttattggacgcttgcccgaagtctcgctggctatggtggattgctctttcagctattggtcatctgagtgtctacctct

SEQ ID NO: 53746 - DNA, 1134 bp, Oryza sativa
  Clone ID: PAT_MRT4530_55917C.1
atggcgggcggcggcgggcaggcggccggaggtgccgcgcgcggcaggggccggcgggggcgcgcgtggcggcggccggcggggaagcttctggcggcggccgtgccctctcagcggtccatgtgctgtaccggcgacgaggtggcgggacccggagagcagcggcggcggccgctcgacgccgacgccggcggcgacaagggcgcggtggcgacgacgtcgtcgtcgttgttggcggcgccgatgctgtcgcggcggaggcaggcggaggagatggcggcgatggtgtcggcgctggcgagtgtcgtggccggcggcggcggcacgtcgttgccggcgaagaggccagccgagagagagcccgaggagggcgccgccgtggagggggtgtggtggtcgtactgcagtgagctcgccgccgccgccgccgcgccgtcgccggcggctccatttccggccggctacgtgccatcgccggggcaacactcgcctgcgtcggcggcggccggcgacgaggaggagctcccgtcgccgtcctcggccgactccagcggcggcacggcgaggaagcggtacagaggggtgcggcagcggccgtgggggaagtgggcggcggagatccgggacccgcacaaggcggcgcgcgtgtggctcggcaccttcgacaccgccgaggacgccgcccgcgcctacgacggcgccgccctccgcttccgcggcagccgcgccaagctcaacttccccgagcacgccaccctcccaccgccgccgacgacgacgacggccgccgctcaccggtgcccgccaccgccgcggacggacgcgctgctggagtcgcaggagctctctcccggcgccggcggcggtgacccgtactctcagtacgcgaggttcttgcagggctccggcggcgacggtggcgaggcggcggcgcggcccggcggtggcgcctcgcaaagaacgccacccgccactacactgctctacagcttcgagggagacgctgcttccgccgcctgcctctggcagccggagagcggcggcggcgggatggggtggccggcgacttcgccggcggcgtggttggagtacggtttctacccgccgccggagcggcgcgacacggacacgtag

SEQ ID NO: 53747 - DNA, 2511 bp, Oryza sativa
  Clone ID: PAT_MRT4530_55918C.1
ctatttcctgaacacggccatactcaaggaaacaagctccagtaccattgacacttcaatgacaaagttaacaaagtaaatctgtctctctgttccttcaaaaccaatgatcaccaactcctttagccgtttgtgctgcaacttggatggctggtcagttatgtctggagtgaatccaagatgcggcttgagatccaagttcgcaggcaagcaaaagttaagtttatgcctgagaccatcgcgtttgaggttcaggcgcacgaggcgcgggaaggatccaagcttgtaccgtacccaggtctgcatgacaactatactctcaagcattggcagagcgtgcagctcaaacccagggacgccacaacactccagaacaagctgcctgatcattgacctgggggcatcaacgaaaacactactgccgcgcttgcaggggcaggacttgaggtgcacctcttgcaactgtaggcatgagctgaacacactgcttcgtaggctgccgcgggtgtggagtcccgcaagtcttgcaggaccagcttggtgagagcttggaaccccaagaacctctagatcctcaactccccaagtatcaacagccttggcgaccaagcggttgatgcagtcgtggtagtgtgtggcgatgaactccacccgcagcctactgatcctcctccgtggagctccgccgccgccgtcgccatgggcaaaaccatcatcggcgtcgaggaagttgttgatggaggcgaccatgtttcgcatggcgaggcgctcgtgccgcctgatgctagcaacgatggttctgagctcgtcggcgccatcgaacacaccactggcggactcgtggagctggatgcaccggtggtagcgcggcgggaggatgtcgccgaccatgaaatcgagagcctcgaggcccgcgcgcgcgaggccggaccagcgcctggagagcgccgcggtggcgagcgcggagcgggtgtcgagcctccgcaggatgatcagcagcagatcgtccgtcaggtcgtcgatgcggttgtcgccgcaagccgcgggcgcccgccggcggcggcggcggcggcggcgataggacgaacctttcctcctcctagccatggcggagtcgcgcggcggcgtggggtttggcgcgcgcattattcggactcgattcgacgggtggctttggggatcgggggggaggggcgatgaggcggtgacgccgccggaatccagtggagccatgggaggaggaagataggaagcgaggccgccgaggctctggcgccggtggtttggcggatccagcggccggctccggcgccggtggcgagcggcgacggcgaggcggtagggaagaaggattaggccacgatgtgcacctagaagagcagcatatccagagtcctcataaacaggctcagtagcagcagtagcagtagcatttcttgatccagtgtagtagccatggtgcaacaggttgccgttgccattgccattccctagggtttccagcgcctcgagctgcgacttgaggaacttgaggtagctggcggcctcgtcgagcatggtggccgtgtccatcttgctgccgccggggaccagccgctgcagcacgcgcaggcgctcgctcacccgctcccgccgcagccgcgccgccaccgtctgcgggtcggggtcggaggcggaggcggcgccgccgagggtgaccgggcgcatcgccgccgcgcggtagatcatctccttcacctgcgctatcgcctccgtgtccggctcgtacccgcggccgtagccgagcagcgccgccgccgcaccggcgccgtggcagccgccgccgaacgtgatgctgctgctgcccccggcccctctcttggtgctccggcgctctgcggctgtctccgacgtcgtcgtggtcttcgtcgttggtgatgtgcctacgacggggtacttctctggtagcttccgcttcgacgggggcagagccgtcgtcgtcgtcgtcgtcgacacggcgcacggcgtcgacgccacctccgtgtaggtgttcgactcgccggaggagatgttgccgccgccggtggtgttgctgctgtatccggagaaggcggtgttcgacgcggcggcttgcacggtcgtcgtctcggcaacgttcgggaacgcgaacctatcgaggagcccgccgtcgtcgtgcgtcgcgccggcgatggccggcactggcaacacatccaccgagtcaaggaacgccgccgccgccgccgtcggggacgcgtcgccgtgaagagcactcagaccatcttggcaacgcaggaggctcatctggtgggacggcaggtcgacgtcgaggccgtaggcatcgtcagagcgaacggcgccggcggcgccgttgccgccgccgtcgacgagggagtggagctcgaagctcgcgcccaagacggcggcgaggaggacgtcgtcgtcgtcgtcgccgccggggccgcagctcggctggcacggcgcggctggcgcgctccacccgaaggcgtccat

SEQ ID NO: 53748 - DNA, 579 bp, Oryza sativa
  Clone ID: PAT_MRT4530_55919C.1
atgaacccgcgggtggtgacgggcgtgctcgggagcgacgacaacgggcttaggatcatcggtgacgacaaaaatgctgatggagagctcgacgacggcagatccatcgtcagtgacctcggcaatggcggatccgatggcgggctcacttggagtggcggtggaggtggcggccttgggagcattggtgacatggatctgctgcattcaagcatcacaaaaatcataacaaaaatcagcacggtcgacggcgtcgaggtcggagaggagggagccgggcagcacggtcgatggcgacgaggtcgatgccgccctccccgtggcctggcggtggcggatccggcctccccgcggcccagcggaggcggatccggcctccccgcctgggcccaagtgccgccacccgcgcccgagagctgccgcccgccgcccgcgcctcccgggtccggcacgtcgtcgtcggctgacctccacgacggtggatccagcgtgggaaaggtcaaagacgtcatgggtgactacaccaccgcagcggcaatggatctggtggtggcggcggtgtggctagggtttgcttag

SEQ ID NO: 53749 - DNA, 255 bp, Oryza sativa
  Clone ID: PAT_MRT4530_5591C.1
atgagcaaaaggtgtacgatagccacaatagatggcaagcgcaacaaagaaggcgacagccatgactacatgatgaacaaagacatcaaggaacaattacatgcgacagccatgagggagaagcgacaaacatccacgatgaagaggccacaaccatctatgacaaacaacagccatgacgagggcaacgggctccggccgcaactaagccagcaagcacgcgatggccaacgaatgtgcaacaaagttagatag

SEQ ID NO: 53750 - DNA, 441 bp, Oryza sativa
  Clone ID: PAT_MRT4530_55920C.1
atgcatcaaaggaaccaaaaaaaaaatctatcaaaaaaggacaactacacatcagcatcatacaatcaacaaccaacaacaacacatgggagtccgctggatctggcggaggggaacccgccaccatcgcccatgggagcccgccgccgcctcccgctgtcgcctatgggaggccgctgccatcgctgccatagcctcccctcccgtcggatctggcggaagggagcccatcgccgctgctgcccgtggggcgccaccgctgccgctgcctcccctcccgctagatctggcggaggggagggtgtagcccgccgctaccgcctctcctcccgccgccgctcgctatgccgctgcctccgtcccgccaccgcacgccattgcatgccaccgccaagagaccgcggtggagaaggagagagagccgagagagagagggtgtga

SEQ ID NO: 53751 - DNA, 753 bp, Oryza sativa
  Clone ID: PAT_MRT4530_55921C.1
atgcagctcaacccaaaagcaagaactcattgaaaacaaaacgaaagtaaaaggaccgaatccgtgtgtggcaatccatatgaagcacattaactcagcccgatgacgtatactgagtcacattgtctgattcagctgaatcgactaccttgtccgactcgaactctgccgactttggtcgtagccgatttggacttcagccgaatcttgctctttttctggaacgatctacctctttgattccgcttcggttttattttcatctccgatactgaaattaccaaatttggtcgctaacatcatctgcaccagcggcagcgatgctgacatcgtcggggaggctagtctgacaaggatgatgacgaggacgaggggtcgcttggttgaggagccttgcttgtcgaatgatgatctcgtcctcgatctcgaccgggagcgggagactggttgtcgttatgacccgtatggtacaagcgtgtatcggctagcaagcaggttcattgggatgaactaggaatcggccaagcgcttgctctcacaatagaaaattcggctaaagatgaacctctgatggcttctgcagcttatttctggtccaacactcttaatgccttcatgttcaatcaagggccgatgacccacactctgctagacatcaccatgatcactggtttagatatcacttcttcggccaatccaatgaccctgaactccaaaaaccagtttgagtttaagacaaaaaccataggtgga

SEQ ID NO: 53752 - DNA, 138 bp, Oryza sativa
  Clone ID: PAT_MRT4530_55922C.1
aagtctcgccaaccgtcggcggctatgcaactctcggcctagacctcgtcggcgggagggccgacgccaaggacagtgtaggggtgctccaggtcagcgcgcgcacggggaacccaaggcgactgcgagtaggtgaag

SEQ ID NO: 53753 - DNA, 423 bp, Oryza sativa
  Clone ID: PAT_MRT4530_55923C.1
atggagagcggcggactgaatcaaagagctcctagaaaccggccaacacaatcgccgccagcggcgtcatctcacaccgtggtggtcgtgggagtccgcgcagcgacatgcaggcatgcagcggaggaggggatcggcgaggcggagtctgaggagacttcagcggcggagggacagcggagggagaccggatcggcgatgccggttgacgcggcggcggtaggcactaggcagtcgtcgcctcgtcggagaggtggcgcggcggaggtcgagcgcgaggtgcgcgacctggaggagggcgggaaaccggatcggcggcggcgggtgatgccggttgaggcgacaatcgtcggagatgcagcggcggagcgcgaggcgcgatctgagagaggaggagcgagcgcgatctttttttttttgagt

SEQ ID NO: 53754 - DNA, 561 bp, Oryza sativa
  Clone ID: PAT_MRT4530_55924C.1
tttcactttcatggacttcctttacatttgttacttcctaatgtagatgaatcggctatggatgtacaccacggaccgacgatcgaaggaattaattaatggctcgcattatttttttgagtgtggccaatgcccacaagcctaaaggttttatatattgtccatgcgaaaagtgcaaaaccagatggagtattctatatcaagaattcttcatatgcacttgttttagtcaggattcatgcctagctataattgttggatctcgcacgaagagttagaggttgcaatggaagaagattaagaagaagacgacaacattccggattgggctcaatacgatggacttccataaaatacaacaggcgaggcagacggagctgttgaagaaaacgatggtgcagatgatcttggtgagatgttgtgtgacgtaaagaaggattgcgaaattaaaaaggaggtctagaaattggagcatatgttagcggaccacaaaacacccaggttgcgaacatgtacacaaaaagttgggtaccatgctggaattcttgcaatggaaggcaa

SEQ ID NO: 53755 - DNA, 1005 bp, Oryza sativa
  unsure (1)..(1005): unsure at all n locations
  Clone ID: PAT_MRT4530_55925C.1
atggagccggaggtgagcgcgcagatgctggggctcggcgaggacgcgcgccgggaggggctgcnggaggacgcccaagcgcgtcgccaatggccggttccgcgacggcacccgatgtggcttaactcacaagaacagaacccttacaacagtagcatggtaatagcaactttgaatactcaaactgcatcccaatccaagctacatcatgctgggtctaatcttgaaagcatacaattccatgttggctatgtgccctctggtggaagggttgttgggttaagcaagctttcgagagtagctgatgtcttcgccaagaggttgcagaatcctcaaagactggctagtgaagtttgtggtgcattgcatgctagcatacaacctgctggtgtggctgttgctctgcaatgttggcacatacctttgccagaaaacttgaaatgcaagactttgcaaggttggattagcacttcacattcatctcgctctggagtttttgagggtgagagcagctctttttggaatgacttctcagcccttcttaagcttaggggcatagacatggagagggacagccattctgcctccatagcttggtgccctttaaggtctcatgatgtcccagtctgcaatgggcactgcaagaaggctacaaccaacggtgcaatttcacccaaatcagtaccagctccctctaatatggtttctgctgttagctcaatgctcttatcccttggagaggatcccttcaggaaagaacttgtaggtactcctcagcgttacgtgcaatggctgatgaagttcagagcatgtaacctagatgtgaagctgaatggctttacactcaataatttgagtgtataccagagtccagctggagatgctgctgaccatcgagcaatccattctgagctgcatttgccatttggtgcgcagtgcgagcatggttcatttttatggatgcaagcttcaggttcaagagagaatgacaaggcagatagctga

SEQ ID NO: 53756 - DNA, 518 bp, Oryza sativa
  unsure (1)..(518): unsure at all n locations
  Clone ID: PAT_MRT4530_55926C.1
gtataaatgtggaggntggattagcanaatacnttatgcncgatcggggngaatattaatatttttttatttanaattttttttttgaaattatacttttcacggatgacaggggaggtttgcttcttntgcttcccngacngnagtccntggtgtgtgtgtgtgtgtgtgtaacttgttatgttgagtggggattgaaagtgatgcatgtgatgtgtggcacctaatgtatcaccatctgcctttaacatctctagactttttattaacttttatttattgtaaaatttgtatgtttgataataattaggctattgttacaacaatgtttgttgttgtttcaatccagagaccagactgcatggacataagacacaaggtctcttggtttcaagcatcaaaatggcattgtgagtaagataagcaccattacagatttaacagtgctatacatgctaatgctaaatgctatattcatgttttattatgtcatgacacaagctattgacacaaacggg

SEQ ID NO: 53757 - DNA, 2096 bp, Oryza sativa
  Clone ID: PAT_MRT4530_55927C.1
ggcgccgcgccgctcgagtgcgccatcacatttatttcacaggagctggtgcctttgatctcatcaaaatttactacagtgaaaaatgatgtgacaaacattgcttctgtgtatatatctttctcggcacatctgcaactagtgcagtatagatttcaagtgccgtgcaaatgaaaaatggtacaacacagagaaaaccaaacccttttggtgcttccagtgacagcttcaatataatcttccatgtgacgaaaattttccctcaccaagcaaatggacattttccttccagagagacgtggcaccagccccggtctcgaaccaatgggcaatgtttgccggtaacacaccgaactgggtaccaactttcaaccatattaaagtggctgcagtacttctctgaatcatgtattcttagctgatattctagtttgtatgatctaagtgattcatactgccaaaccagttgtatctactacgttctgcagaaagcgtgccttggcagaagggtccgtcaaaaactgacccagaactgcaatcgttgcagtgctactcctgattttctctattccccttgatatcatgcaaatgtggttagcttctacaacaactatggccccacaatgcgaaacagaataaactgcttcagctatctgccttgtcattctctcttgaacctgaagcttgcatccataaaaatgaaccaaggcctgaaaatgagatcgatcaatcacttcaccatctccgccgtcaaggtagccaatatgcactactccatagaacggcagaagatggtgctcgcactgcgcacaaaatggcaaatgcagctcagaatggattgctcgatggtcagcagcatctccagctggactctggtatacactcaaattattgagtgtaaagccattcagcttcacatctaggttacatgctctgaacttcatcagccattgcacgtaacgctgaggagtacctacaagttctttcctgaagggatcctctccaagggataagagcattgagctaacagcagaaaccatattagagggagctggtactgatttgggtgaaattgcaccgttggttgtagccttcttgcagtgcccattgcagactgggacatcatgagaccttaaagggcaccaagctatggaggcagaatggctgtccctctccatgtctatgcccctaagcttaagaagggctgagaagtcattccaaaaagagctgctctcaccctcaaaaactccagagcgagatgaatgtgaagtgctaatccaaccttgcaaagtcttgcatttcaagttttctggcaaaggtatgtgccaacattgcagagcaacagccacaccagcaggttgtatgctagcatgcaatgcaccacaaacttcactagccagtctttgaggattctgcaacctcttggcgaagacatcagctactctcgaaagcttgcttaacccaacaacccttccaccagagggcacatagccaacatggaattgtatgctgaatggaagtaagcatgactcacagtatgagaaaagatcaatatcacgaacaacaacttgccctccagttcctccagcagaaccagtcctcttgtcaacaccaacctcaggaaagagagccccctgcacaatgtcctttactttttgcttgtaacctttcaagattagacccagcatgatgtagcttggattgggatgcatgctactgttgtaagggttctgttcttgtgagttaagccaccaagcacatggcacagcattatcctgctgctgcagcccataaggcaaaagtagactaataaataaaggacagccattgtgattactacaggaattcccagtattgcagactcgggtgccgtcgcggaaggccttggcgacgcgcttgggcgtcctccgcagcccctcccggcgcgcgtcctcgccgagccccagcagcagcgcgcgcaccgccggctccatggcgtcggcggccgccgccttgccgtccccctcgacgaggtcatcctcctcctcctcctcgtagcactcgcactcgcacgcggagatggcggcggcgaggtgggcctcctcgagcgctcccat

SEQ ID NO: 53758 - DNA, 961 bp, Oryza sativa
  Clone ID: PAT_MRT4530_55928C.1
ccccccacgcaacctaacgataaacacagggagagagagagagaaagaaattcaatggcctcctcttccttatttctgctagcttctcttcttgttctggcctcatggcagcaggccatcgcctttgatcctagcccgctccaagatttctgcgtcgccgacatggcctcacctgtgcgagtaaatgggtttccttgcaagaacccaatgaatgtcacatcggacgacttcttcaacgcggccaagtttgacatgccaaggaatactatgaataaagtcgggtctaatgtcaccaacctcaacgtcatcaatttcccgggcctcaacactcttggcatctcactagctcgcatcgactacgcgccaatgggtgtcaacccaccacatgtgcatcctcgtgctactgagcttctcactgtgcttgagggaacactttatgttggttttgttacatccaaccctaacaggctcttctccaaggtggtgcataagggtgatgtgttcgtgttccctaaggcaatgattcactttcaaatgaacctagaccacaataagcctgcggttgcccaatcagcactcagcagtcaaaacccaggagttattactattgctagtgccatatttggatcaacgccaccaatctctgatgatgttttagtcaaggcatttcaagtggagaagaaggtgattgattggctgaagtctcaattctcggagaataaccactactgattatatcatgtttcttgattgttcctttgtgcgttataatatgtataataaatgggcttttgcctagttgatgtcatggtatgctaaaacagtatgtttgatcgtccatgtttaataaatgtaatgcaatatggacacagtacggcgtccttttcctaattatatattaatataaaagaatgattgttcatgaaaaaaaaaaaaaaaaaaaaaaaaaaaaaaaaaaaaa

SEQ ID NO: 53759 - DNA, 291 bp, Oryza sativa
  Clone ID: PAT_MRT4530_55929C.1
atggcacgagtgttcgtggtcgccgtgctcgccctctccgtcgccgtcgccgtcgccggccgcgttctcgaggaaggcgaggcgtactacggcctcgaggcggcggcggcggcgcccgggctgcagcctgcggcttcgccgccgtacgcttcatcaccaggcggcggcggcggcggaggaggacacagctggcgcggcggcgccggcgccatcctcgacgagatctgggtcgtgttcaggtgggccaacgacgccgtggccggcggcggcggccggacgaacgtccggtag

SEQ ID NO: 53760 - DNA, 338 bp, Oryza sativa
  Clone ID: PAT_MRT4530_5592C.1
ccgggctgcaggaattcggcacgagggtcacctctcgcaccaccaccgcgtcagtatacaaacggcggcgaccaaccaaatgccggcgagtcgtcgtcgtcgtcgccgtcgtcgagagagagtcaaacccccacacgcaaagagagcgaaaccccacccccctcctcttcctcatccaccccacgcacgcctcgtcgcggccgcgcgaggtgagctggagcgggcggcggggagggcggcggcgaaggaggcggtggtgccggtggaggggcggaggaacgtgctggtgacgagcgcgctgccatacgtgaacaacgtgccgcacctggggaacatca

SEQ ID NO: 53761 - DNA, 408 bp, Oryza sativa
  Clone ID: PAT_MRT4530_55930C.1
agcgggcgcgcccttttttttttgttatgccataaacagggaaaagcgccctgctttcataacctacagtgactgtcagccgtctaccgcaaatgcaatggcctgcgtgcaaacagggaacacgtcttggggactggagcttgcggggacagactgatgcgcagcaacatcagcgcgggaaaaacatcatttcgcttggttttattggcttatcatgcacacccacacgctctacctttatacctgatcttgcttgatctctgcctgttgaagtccaggtggacgaaggcaggcccacgatgatccacgcagggacagcctcagaacctggagcaggaaaaaaaggggaagccctttatatatagggagcacaaaaatgtggcatggtttcatccagggttcattatc

SEQ ID NO: 53762 - DNA, 334 bp, Oryza sativa
  Clone ID: PAT_MRT4530_55931C.1
aactagtggatcccccgggctgcagtaacttttgactggtagcttcgtttttcaattcctgattaccttcagaatctccggtgtcaatgaatttgggcctcttgaagagaaggcctgcaccctggggagcatctctagaacctaaaatcgtcttcgctggtgaaatttgatggtgagtttgcctctccccgctggcattgccctctccatcttgtaggaaccggaggcattccatgatctctgaaactaggagattctggccatattcctgtggggaacagaggcacaaggtagctcagccgctgcatcgacggacaagcccatgacatcccat

SEQ ID NO: 53763 - DNA, 305 bp, Oryza sativa
  unsure (1)..(305): unsure at all n locations
  Clone ID: PAT_MRT4530_55932C.1
gaggattcaaggcctatgtaatcggattgctggttgtgcacacatgagccagtacatatatacacagtcagggggagaatactagtactcatgtacatacagatatagagaataaggtgctcggagaagtagtacatgtcaggtggtacgcacagcaagacacgcgtttcatatgcattataagaatgtagtagatctcagagagatgtacataaggaataataagcatcaccaataaanattaacaagataagataacacacattntntntntgggcatataaaaataacatatatagatacag

SEQ ID NO: 53764 - DNA, 2196 bp, Oryza sativa
  Clone ID: PAT_MRT4530_55933C.1
atggagacccgtgccaccgagtgcaggacgatgcagctcctccgtgagcttcaaacaaacaaattggacacatcttcaaagataatttacgctccacggcagcaagatgatatttatgcgggcataatgccagaactcccgctcgataaacttccggaggatatcttgcatcatgtatattctctaatgccattgaaagatgccgctcgtgctgcttgtgtgtcgcatggatttctacgttgctggagacgctatccaatccttgtattaaatagcaaaacaataggtttggctaagagaaaacttagtttgtatgcggaagatgtgccattgtatgagccagcgcttaaagtggatgacatggaaagctatgccatcagtaaaattgaccatattattaataaccactctggcattggggtcaaagtgtttaaacttcaactgtttgcctgtccgaacatagatgcagctgttcttgacaaatggtttgtacatgttatcaaagctgggatcaaagaactctccttggagatgtctttatgcaaaaaaaggacagaatacaacttcccatgttccattctatcaagtaaggcaggtggagggacaattcagtcacttttcctctcctcttgttcttttcatcctacagtggctctaggttgcaacataagcttgacaagcttacatttatatgaagttcatatttctggggaggagatagggcagttcctttccaattcattcgctttggagagattggtaatttctgattgcaatgacataatccagtttaaggtaccttgcctgatgcagcagctcaagtacctccaggtgacaaaatgtgaaatgctagaggtgatatcgatagatgctcccaaactctcctcttttatctatggggatgtcggaatacaaatctctcttggagatccactgcaagtcaaagacatacgtctgatgggttacaaccaacccaacacagtctgttttgctcgtactgagcttccatccattatgccaaatgttgaatcacttattgtgtcatctactgatgagatgatcagtacaccaatggtgcccatcaagttcctccacctcaagttattggaaatttatcttgctgaattactggcttttcctcccaactatgatttcttttctctggtttctttcttggatggttcccctgccttggagactttcatcttgcatgtaaagcagcgatgtgaaaggcgtgattcgattcttgatggagaacatacaaatttgaggcaaattctgcaccccagacatgccaacctccagaatgtgacaatcactggctttaactctacaaagagcatgattgagctaacaagtcacattcttgagaatgcaccatcgcttaagtgcattacgctggatacagccaacttctatgataagaaccttttgacgatgggtgaatgcttgcctatgaggaaaggaggaatcttggaagcacggaaagcttttgatgcagccaaaagatacatcgcggggaaagtaccggcgcatgttgagtataagtttctggaaccctgcaggaaatgtcatattggtgaaaatgggtgctcaagtgagaagtcattatactctgttctactttttgagagaaaaatcttggaaaactattacaaaaggaaatgtgagaagaagaatggcaagaagcaaaacaagaacccatgctaccgatgtcgattttggggctggttttataacaagtggtatcagagcctgcaggagatccatggtagaggtgcgagggaggtgctccacgccgcgacaactacacaggatgtccagggacggacatggacgcaaggcggcggtctgaaccgtttgatggctgcaatcaacagggagatgaccagacgtggtgctcaggttgatggcggcggaagcgattggcgattcaatcggtgggtcggacacttcaggcgggtggctcgaactttctggtgccggcgagttcgacgcgggccagctccaggaggaggtggcggataccggcggaaggggtgggctgctcctgcgtcggggggcggctccgtgggcgtcggcatcctcaccagcgggaaacccacggcggcagcggtagcggcgttttcatcggcggtggtcccagggaggtggcgcaaggggagaccagctcctgtgcgtggcagcatcttctag

SEQ ID NO: 53765 - DNA, 473 bp, Oryza sativa
  Clone ID: PAT_MRT4530_55934C.1
aggacaaacaatgggcatcgtatatttgagatcttgtgattattcaataatcttgtccatattattattgatatttatttctctcgctaaaataaattgctcatatctatatttttactggcaaggagaagccctgttacataaccattaacattggctctatacattttttgcagaaatgcctgatgggggtcctaagggataaaactgtgttatacgtcacgcaccaagttgaatttctagttgatgcagaccttattatggtaagcccctcacagctgctcgaggtggtcttttcattcctatgataattgcagcacaatgcttctttcagatatttgaagtgggaagcaactattggatggcatcagcttgccatccacgaactggaagcaaatcaaaaatggaatccacccagttcatggtatatgtatttatatcagttggcagcgccttgtgtatcttgattcgag

SEQ ID NO: 53766 - DNA, 2247 bp, Oryza sativa
  Clone ID: PAT_MRT4530_55935C.1
atggagacccgtgccaccgagtgcaggacgatgcagctcctccgtgagcttcaaacaaacaaattggacacatcttcaaagataatttacgctccacggcagcaagatgatatttatgcgggcataatgccagaactcccgctcgataaacttccggaggatatcttgcatcatgtatattctctaatgccattgaaagatgccgctcgtgctgcttgtgtgtcgcatggatttctacgttgctggagacgctatccaatccttgtattaaatagcaaaacaataggtttggctaagagaaaacttagtttgtatgcggaagatgtgccattgtatgagccagcgcttaaagtggatgacatggaaagctatgccatcagtaaaattgaccatattattaataaccactctggcattggggtcaaagtgtttaaacttcaactgtttgcctgtccgaacatagatgcagctgttcttgacaaatggtttgtacatgttatcaaagctgggatcaaagaactctccttggagatgtctttatgcaaaaaaaggacagaatacaacttcccatgttccattctatcaagtaaggcaggtggagggacaattcagtcacttttcctctcctcttgttcttttcatcctacagtggctctaggttgcaacataagcttgacaagcttacatttatatgaagttcatatttctggggaggagatagggcagttcctttccaattcattcgctttggagagattggtaatttctgattgcaatgacataatccagtttaaggtaccttgcctgatgcagcagctcaagtacctccaggtgacaaaatgtgaaatgctagaggtgatatcgatagatgctcccaaactctcctcttttatctatggggatgtcggaatacaaatctctcttggagatccactgcaagtcaaagacatacgtctgatgggttacaaccaacccaacacagtctgttttgctcgtactgagcttccatccattatgccaaatgttgaatcacttattgtgtcatctactgatgaggtgcacatgaaacatatgattaatcctaagtcatctcttcttttctttcaaatgatcagtacaccaatggtgcccatcaagttcctccacctcaagttattggaaatttatcttgctgaattactggcttttcctcccaactatgatttcttttctctggtttctttcttggatggttcccctgccttggagactttcatcttgcatgtaaagcagcgatgtgaaaggcgtgattcgattcttgatggagaacatacaaatttgaggcaaattctgcaccccagacatgccaacctccagaatgtgacaatcactggctttaactctacaaagagcatgattgagctaacaagtcacattcttgagaatgcaccatcgcttaagtgcattacgctggatacagccaacttctatgataagaaccttttgacgatgggtgaatgcttgcctatgaggaaaggaggaatcttggaagcacggaaagcttttgatgcagccaaaagatacatcgcggggaaagtaccggcgcatgttgagtataagtttctggaaccctgcaggaaatgtcatattggtgaaaatgggtgctcaagtgagaagtcattatactctgttctactttttgagagaaaaatcttggaaaactattacaaaaggaaatgtgagaagaagaatggcaagaagcaaaacaagaacccatgctaccgatgtcgattttggggctggttttataacaagtggtatcagagcctgcaggagatccatggtagaggtgcgagggaggtgctccacgccgcgacaactacacaggatgtccagggacggacatggacgcaaggcggcggtctgaaccgtttgatggctgcaatcaacagggagatgaccagacgtggtgctcaggttgatggcggcggaagcgattggcgattcaatcggtgggtcggacacttcaggcgggtggctcgaactttctggtgccggcgagttcgacgcgggccagctccaggaggaggtggcggataccggcggaaggggtgggctgctcctgcgtcggggggcggctccgtgggcgtcggcatcctcaccagcgggaaacccacggcggcagcggtagcggcgttttcatcggcggtggtcccagggaggtggcgcaaggggagaccagctcctgtgcgtggcagcatcttctag

SEQ ID NO: 53767 - DNA, 330 bp, Oryza sativa
  Clone ID: PAT_MRT4530_55936C.1
atggcaaaggacgccgaagaagaaaagaagactggggagaaggagggagagagagccgtccccgtcatcaccggcgccgctgccctagagctccctgggcgagctccatcctgttgctaccgtcaagaaaaggagactggggagaaggggcgagtgagagccatcctcatcaccatcggcgccgccgccctagagctccccgctgagctccgtccagtcgctgccaccgtccaccactggtcaccacctcgcactccctcattgtcccccgcgctccggagcggcggcagcgggacaacaacggggagcagcggcggtgaggacggcgtg

SEQ ID NO: 53768 - DNA, 624 bp, Oryza sativa
  Clone ID: PAT_MRT4530_55937C.1
gccacgctcgcgcgatggcttccgacggcgacggcgccgcggcggtggcggcgctggggatctccggcggcgggggcgacgactgggcgccgccgctgcggcggaatctcccgctgctcgcgccccacgaggttaagcttgcaaaattgctgctgagtgaaggacagtcacatttgtttgaacactggccggaaccaggtgttgatgatgacaagaaaaggaacttctttgaccaggtctgccgccttaattcaagctatcctggtgggctggcatcgtacatccagaatgcaagaaagcttttagcagattcaaaggcaggaaaaaatccatatgatggcttctcaccttctaggtaccataattacaggttccttcaggggaagtattgacctttggtgatgacaactttgtttcgcttgaagaagctggggtaaaagaagcccgccatgcagcatttgttcttgtagctggtgggcttggtgaaagacttggttacaaaggaattaaggttgcacttcccagggaaacaactactggaaaatgctttcttcaacattacatagaatctattctagctttgcagggagcgagctgcaaattggtagagggtgaatgcaatac

SEQ ID NO: 53769 - DNA, 445 bp, Oryza sativa
  Clone ID: PAT_MRT4530_55938C.1
aacgacacggagcgcgacacgtggcagtacgtcggctacatgttctccaaaacggcgcgccaactcatgctcgcacgactcggcttggacccggaacgcgtcaacgccgacgtcgaacaattcaaaacggcgcatccggcaagcgatttggacgcgaagaagaccgacacagttgccggtggcgataaggcgacgccggccgtcggcgccgacggcgccgttgcatcgaccgccgcctcgtcgacgtcgaccacgtcggcgccggaggactttttcgaccgcgtcgccaacggtggcttgcccgacgcggacggtgccaagacgcccgacgccgctgcgaagccgtcggcggccgacgcgtttgcgttcttcttgccggcgacggcaccggacgccaacatcgagaatttggtcgcacgcacgctgttggtgggcaattttgcgg

SEQ ID NO: 53770 - DNA, 871 bp, Oryza sativa
  Clone ID: PAT_MRT4530_55939C.1
ccccgtgcagcaggcatgttttcgccccgcaattaagcaccatgcttcatgttccacttccctagattctgggtgtgccgcacctacccatttgtacctcacatcgtgcataccagcatcaccgcccggcagcgcacttactgcaagaactcatatagcaagagtacgcatcccttccactggccaatccgcacgagaggcaatgactcctcgtaccactgcctggtaggatacagcttcggcaggccaccattccccgtcaagctgcagaattacggcttctactcattgacggctgtcaagcaaactttatttttcaaaggaacccacattggtcactataatttgaagctgtacatgcaaatcctcaacaaacatatttagaattcgaagggcccgaatccacttggagtgctatttgagcgcattagttagcaggagccaaccttaatacataatatccattcaaaatttgagagtcaaaccatctttgagctgaaccagccatgttaattgttcacaccaataattttacttcccatggatgtcagtaatgcattgggagtttgcaaacttcatcagaataaagaaaaattattaggcagatttcttttaggatttaagcttcatgcgtcatgtcctaaatccctgctgtggagttcactgcgtccatgagtttgtatcttttctcttgaacaccagcaacacccatttgtatctcaattattgtatgaagtggtatctcaatgttaggaagttcctccagtggtttatccgcaaaatatgcatatagtgctcttagcacagcctggtcagatatgacaacaactggagcacgctgccgttcaagctcaataattacaggttctaa

SEQ ID NO: 53771 - DNA, 1321 bp, Oryza sativa
  Clone ID: PAT_MRT4530_5593C.1
aaagttcttgaatcatagtcttataagagattctagcattgtcaagtcagaaagcatcatattatcttgagagaagaccaaaagattgattgatatctcggtgctactactatatgtacaatcgaatccacagctagccattctacgctacttgttcttcgtcgacgggtgatttgatctcttgctcttgcacatgcatctggagatcgtgatcgactcctcttgcttcgatgcacaatgtaattctctgccccttgcttagtagtagagcagatgggcgtagggagacaggcagtgctggtcctgccacgggctgcgcagctgcgtcaggaacgggtcctgcagccagtccatcgccggaagctgcaggctcggcagctggctcaccgccgggagctgtaggctcgtcgccgacgccaccgtgaccgtgacgtctgcttcttccttcttggcttcccttggtgcgccagcgccgccgttcttgctgctgctgccggacggcgccgccgacgaggatgaggactggatcaggaagccgctgtcgtggacgtcgtccgacgagaagtagtcgtcgccggtggaggcggaggcgtcgtggacgagggatgctctcgtcgccgtgtagtctccgtgacttgatcctctctgcatctcttccattgccgaggctctctgctccagctccttcagtggcgtcgccttccggtatatcttgcagagcaccatgtcctccttgggaggcggcgcggcggcgcgggcggcgccgtagtcggggaggcggtactcgttcatgacccagtccgtcttggtgccgcgcggggcgcgaccctggtagaagacgagcgtcttcttgagcccgatcacccgcttcgggtcgccggagctccggatcgccctgtccgaccccgtcgccttccagaacccgcgctccgtcgtccggttcggccgcccgccgttcccggccttcctgtcccgcggcacgaagaagtaccactccctctccccgatcttcgccatgcctgggaggtcccagggatcatggcggtagatgttgagggtgccgatgatgttgaagtggagcttcttgcctaggacgacgcgggagaggtagaagtcgaggagctcctcctccgtggggtggaaacggaagcccgggaggtcctgctccacctccatggacggcccagccacagccactgccgccgccattgatgacagtgtgctctgctcgctcgctcgctcgctctgctccaggtggtggtggtggttgcctctgcacttggcttgccgatcttgatttttactggagacgatggacgag

SEQ ID NO: 53772 - DNA, 369 bp, Oryza sativa
  Clone ID: PAT_MRT4530_55940C.1
atggcacagcagcagagacgcctctccttcctcaagcatggcgtgagcacgtgccttcacacgccgtcctcaccgccgctgctccccgttgttgtcccgctgccgccgctccggagcgcgggggacaatgagggagtgcgaggtggtgaccagtggtggacggtggcagcgactggacggagctcagcggggagctctagggcggcggcgccgatggtgatgaggatggctctcactcgccccttctccccagtctccttttcttcttcgtggggacagcgagggagtgcggggcagcaacctatggtggacgacggtagcaacaggatggagctcgcccagggagctctagggcagcggcgccggtga

SEQ ID NO: 53773 - DNA, 762 bp, Oryza sativa
  Clone ID: PAT_MRT4530_55941C.1
ggatcctgtttatctggactgcgtttgttttttttttttaaattttttttttttttttttgcagtaataatatccaggtaaacgtctccaaaatggtacagcgccggtacaccggcaaggccagcacactcaccactaccaggtcaagcccggtatcgagaggtactcattcatttcatatatgtacagatgaaagaacaacccaacacatatgtcaaagctattcacaaacacgacacaaaccctcctgcaagctcatatttgtcaaggacggacggtcttattcccgaaccacctctatatcttctccgagaacagacacctacaagcgtacagagcttctgctagctgccttcgacggacaaagctgctgctgctgaacacctgatgggttccatctacattaccttggtataaagctgctgcttcttcttcttctagtttcaaaactggcaagaagtgcccagcctctgcaacggacgagggccatcagcagcggcgtgcttccgggctcggaaggcgctcgggagcagctcctggaacttgtcgaggaatgcgctccactcatcagagcccatgtcggacagcttcacaaaactggcgctgggagggagaagctcattggcactcctgctaccagactgatgctcactacctttgccactatagttagttttagcagtcaccttgttcttgggaacacctttgtggtaggctctagcttttccaatgaaaccgagccccctaaatgatgctgataac

SEQ ID NO: 53774 - DNA, 616 bp, Oryza sativa
  Clone ID: PAT_MRT4530_55942C.1
actagtggatccccgggctgcaggaatcggcagaggagagagagagagaacttgccccacgcccccctttttttttttttttgtgtttttagataagttgcgactttttttgtagaatcagcctgaaaaatatgagctactatgatggaataaaggagaaataacctacagaacacagccagtttacaaaatggaagattggtacaagaatcatgagtccccggtagattggcccaaaggccttaaaatgtagtaggaaagaacatggcttaattcggatgctaatccagtagctggtccactggctgtcgcaccaccgtttctgaagaaactcttctattcgtgacacactgctgctgctcccaagacaactacatgtaaggtttatatagaaggcagcaaatacgccgtagttactagaaactaatatcgctatgttgctagagttgattccacacgacatccagattggatgaatcagttgagccgactgccgcaatatcatccaaaacctacaagaatccagcttatgctacccggtctgctcggttgaacttgcttgtccagccaaagcctcagcagtagcagcagcatgctctacagtttcctcagcagc

SEQ ID NO: 53775 - DNA, 726 bp, Oryza sativa
  Clone ID: PAT_MRT4530_55943C.1
atgagcatcttcgaagactgggccggcaaatcttttgagattgacgaagtcaccacatgcgcctcgctgtcgacggtgctcctgttctccctatgcatctcagcaaatgctgccatgacggacaccatctcaatgggcaacgcattgggtagaaaggacaagctcgtctcgaaaaatggcagggccaagcttggatgggacaaggttaccggcctaaaccgtcgtattatctcatggaagaactcaaaggacctagctgctgattttgggatggcaaagcttttgggaagggattttagccgagttttgactatggtgagaggcaccgcaggttaccttgcacctaaatggattagtggtgttcctattacactaaaagttgatgtttacagctatgggatggtcttgctagaaataatatcaggaaggaggaactcacgtacctcatgttcttgtggcggtgatcatgatgtttattttccggtgcttgtagcccgtaagcttcttgatggagatatgggtggtttggttgattatagattagatggtgagatcgacataaaggaggctgaaatagcttgcaagcttggacacaatgtaaggagctttttaatgatggcgattggtgagtggaagttagagtttaggaggaacccaagtgaggctgacaaaaatgatttgatagagttgctagatgtaaggcatgatggggagagtgtaaggtga

SEQ ID NO: 53776 - DNA, 368 bp, Oryza sativa
  Clone ID: PAT_MRT4530_55944C.1
gaggatccgggtaccatgggcaaatgtgatattttgtacacacattaaagttgaacatagtccctttattcttattcaggtcattgtaagtggaaagctcagggcccaaagagccaagtccatgaagttcaaggatggttacatgatctcatctggtcagccagtcaatgagtacattgactcggctgtgagacacgtgctcctgagacaggtttgtttggttcaactcaagcatcgtagtatttaaaaacctcatgatctttttggctcaacgcacttgttcattatcttttgcagggggttcttggcacaaggtggaagatcatgctcgactgggaccccaaggccaaggttggccgcacccctct

SEQ ID NO: 53777 - DNA, 1968 bp, Oryza sativa
  Clone ID: PAT_MRT4530_55945C.1
atggcagatacatttttccccggggcaaagcttggatggaacaagatcactggcctaaaccgtcgtattatttctaagaaaaacttagtagacccagctactggtatgtattgcgaagagttagaccctactggtgttaatcaggtctttcttgcactagtgaattcctccacgccatattggtctagtggagcatggaatggcgagtacttatcctcaatcccaaagatggcaagccataattttttcattccatcatttgtgaacaatgaccaagagaagtactttacatataatttggcaaatgaaaatattgttagccgtcaaatattggatgtcggaggtcaatcaaagacgtttctttggcttgagggatcaaaagattgggtaatggtcaatgcccaacctaaagctcaatgtgatgtctattcaatttgtgggcctttcacagtttgcaccgataacgagcttccaaattgcaattgtataaagggcttcaccataacatcgctcgaggattgggtactggaagatcgaacaggtggatgctcaagaaatactccaatagactgcatcagcaacaaaaccataacccgctcatcagataagttctattctatgccttgtgttagattgcccccaaacgcccagaatgtaggaagtgttgacagttcaagtgagtgtgcacaagtttgcttgaataattgctcctgcactgcttactccttcagcaatggtggatgctctgtttggcacaatgaattgcttaacataagaaaaaatcaatgtactggcagtagcaatacagatggagaaacctttcacattcgtcttgctgcacaagaattgtatagtcaagaggtaaataaaagaggaatggttattggtgttctttctgcatgttttgctttatttggtttgctgctagttatcctactactcgtgaaatggaggaataaaacaaagctatcaggtggcacaaggaaggattatcagttctgcaatgggatcattccatttggatacattgatttgcaacgtgcaactaacaatttcacagagaagcttgggggaggtagctttggttccgtattcaaagggtttctaagtgattacacaattgtagcagtgaaaaggcttgaccatgcatgccaaggagagaagcaatttagggccgaagtgagctcaattggaatcatccaacacatcaatttagttaaactaattggtttctgttgtgagggtggcaggaggttgcttgtttatgaacacatgccaaatcgttctcttgatcaccaactatttcagactaatactacacttacctggaatattaggtatgaaatagccatcggaattgctagaggattggcctacttacatgaaaattgtcaagactgtatcatacactgtgatattaaaccagagaacatccttctcgatcattcattcagtccaaaaattgcagattttgggatggcaaagcttttgggaagggattttagccgagttttaactacaacgagaggaactgcgggttaccttgcacctgaatggattagtggtgttcctattacaacaaaagtcgatgtttacagctatgggatggtgttgctagaaataatatcaggaaagaggaactcatatgcctcatgtccttgtggtggtgaccatgacgtttatttcccggtgcttgtggcgtgtaagcttcttgacggagatatgggtggtttggttgattacaaattacatggtggcatcgacaagaaggaagttgaaaaggctttcaaggttgcatgttggtgcattcaagacgatgagtttagtcgaccaacaatgggaggagtggttcaaattctcgagggcctagttgaagtcgacatgcctccaatgccaaggcgacttcaagcaatagctggaagctcaaattcaacatgctccctgtattctcttccagcaaatatttaa

SEQ ID NO: 53778 - DNA, 611 bp, Oryza sativa
  Clone ID: PAT_MRT4530_55946C.1
attaaccccccactaaagggaataagcttgctgggccctctagggtccaagtgccttttgtgctgtgaatttaatatcgcatcctggtgttgctgggttcttcgaggaaatgggaagccattcccaatttcccatagcttccaaccctgaacctgaaggagagatccttggggtccttacgactgaagcaacgtacaatgattaggatgcactaacttccccctttaccttatggaaacccttcactcctgcctcattaagggagtgggccacccacagggaaaaggcgattacctattgggcgactctttctgttactctgttacttacttactttggttcgactgctctgactcaggcaagcggaatatgcgtatccttgacggaggctatccggtgtcccccgaatataggggttaccgcgggaaaaaccttgttgccaaagggcgctgagaaaggcaccgaaccgcggataaggcctctttgctgctttttttccttagcttccacccccttaccaactttaccaaaatccacccttcaggagcaaggaggcaaacccccccaggcctttaacaatcccggccttttccccctgaagattccttttg

SEQ ID NO: 53779 - DNA, 714 bp, Oryza sativa
  Clone ID: PAT_MRT4530_55947C.1
atggctcggggcgctgccaagacggagggaggactccaagtggtggtcgtcgtcagccagctccgacgtcggtggggactgatccggccccctcttggccggatctggcgtcccagccggtggatccagacggaggagaccggcagcgtgcgggacggaggtcgacggtgcgacgggaatgccgatggcgcgacgggaaggccggcggcgcccggggaggtggtcgccggggttgtggtcggcggcatgcaaggaggaggccgtccgcgcccagggagaaggtcgaccacgacgggaaggccggcggcgcgcgcggaggcggtcgccggtgttgtggcagcgaccaggcgaccgcgccgccgccaacttctccccctcctcccctccacctcgctgaagctcggcctcctctcgcaggtgcggtggcctgggaggaggcgcggcgcccaacgagaagtgcggaggtggccgacgtgggtagtaggaaaggaggccggcggtgaagtcggagctgcttcgttgggtgcgatgaagctcggcaacaataacacattgcagtttttgaggagtgttggtgttagctgtgtacaagaagtggtgctctggcggcttgggctgatgttcaaagtggacaatcggtgtcttgctcgtttctgcgatgtctttggcaatgatgatctgatagccgtggagttggagctgttgtgtcgctag

SEQ ID NO: 53780 - DNA, 528 bp, Oryza sativa
  unsure (1)..(528): unsure at all n locations
  Clone ID: PAT_MRT4530_55948C.1
ccggtacgtcccgccgccgcggggacaccaccaccccgcgagcgcgatagccggcggcggataaaatcaaaaactcacagcgccccgcaagaacggaacgacgaaaacggggcgcggaacgcgccggggcccctacagcacctgacggcgcccctccaccggccggggggggagaagagccggagagcccgtataatcaactccgcaaagcagggcaaggacgtggcgggctcccggagagggngactccgcgaggcgggaggggagggccgccgaggnccacctccctcctcgcccgaccgccgggagcggcccctcgtttcgactgagcgccagcgcgccgcttcgcccaccgccccccctttgggacgccgcaagctttgcccctcctcacccggccgccacgcgccgctccgcccaccgcccctctttacgccgccgctcgccgttctgaatcatttgtcacataagcgccacgttggacgaggacctagtcaaagggagccacgtaggcagaacgagatctga

SEQ ID NO: 53781 - DNA, 746 bp, Oryza sativa
  unsure (1)..(746): unsure at all n locations
  Clone ID: PAT_MRT4530_55949C.1
ccggccggggttcctctcggccgccatggaagcagcgagcaaggaccagattgggagaggaggcggcaccggagacgccgatggaggcgacggggcgaagaggaaggaggacgcgctcgcatctagcaggctcctcgacccggatttcaagccttccaagctgtcacaagatcggctcgacaagttcaaggaattacacaagaaacggttgcaaataaaggaaaaaccaaaatgcaaagggaaatctagaggaagcacaaagaagaataccaaggtgaccagtgattgtagtatcgtggataaggatgaatctatcggcaatgttgctatagatgtacagcatacagcatcagctgctggaacccaagtggatcttgcatcatcacttccctcaaggaacaaaaggaagttacattggngggcttgatgttaaagaaaggtgggagaggaaagcaaacatgtgagttactgaagatcccttgtgttctaacagcaaaatcatccctccatgccaatgttcttgtcatggagcagaatagttcagcaaaaattccaagaaacgtgcagcaggttgtctgattttttcagtgttgtttcctgcagatgctgtgaataggtcttattgtactgtagatacttgaggnccacgtagggtctaatctagataatttgatactcgcatctgcacagncaaagccctgggaaactattggctggggctcttcttttttgcatcatgtctatct

SEQ ID NO: 53782 - DNA, 172 bp, Oryza sativa
  Clone ID: PAT_MRT4530_5594C.1
ggaccaggaggagtgctccgggaggcgacagcaggctgtagggctgcgtgcggcgcgtatccaaccgatgctcctgaagggttttcgacttaacaactgcgcctcacctaagcccaagaaaataagaacggcatctgctgctcggatgactgttggctgcttcgatacagga

SEQ ID NO: 53783 - DNA, 435 bp, Oryza sativa
  Clone ID: PAT_MRT4530_55950C.1
tcgggccgccgttcaggtgcgccggctggtagctcccctgcgcgatctcgctgtcccggttgccggccagcgaccgctcgttgaggttcgccgagccgaccatgacgtactcgtcgtccacgatcatgagcttggcgtgcacgtagatggggaaccggcggttcacctgcgcgcgccagtagtccgtgtcaacgtccggcgtctccggcggcgagtactcgccggggcgcggcgcctcccggttcccgaggcagaagaagttgaggtagtcgcaggggtgcgcctggccgcgcacccggcgtcgtcgatggccttcgtgacgatgccgtacataatctccacggtgagccggttccaccggaggatggcctggacggatcgccggccggctcgccctccggccacatcggcgttacgacgtacgcggcttacagc

SEQ ID NO: 53784 - DNA, 543 bp, Oryza sativa
  Clone ID: PAT_MRT4530_55951C.1
atggaagcagcgagcaaggaccagattgggagaggaggcggcaccggagacgccgatggaggcgacggggcgaagaggaaggaggacgcgctcgcatctagcaggctcctcgacccggatttcaagccttccaagctgtcacaagatcggctcgacaagttcaagggaaatgcttcgttggttctgatggagtttggagtatgcagattgtatgctagaattttggttggaacagaaaatatccacaccctatcagttaccggtgctagagacctagagtcatcacaggaattacacaagaaacggttgcaaataaaggaaaaaccaaaatgcaaagggaaatctagaggaagcacaaagaagaataccaaggtgaccagtgattgtagtatcgtggataaggatgaatctatcggcaatgttgctatagatgtacagcatacagcatcagctgctggaacccaagtggatcttgcatcatcatttccctcaaggaacaaaaggaagttacattgggggtacaattctatcattatactttag

SEQ ID NO: 53785 - DNA, 188 bp, Oryza sativa
  Clone ID: PAT_MRT4530_55952C.1
ctgcaggaattcggcacgagggttgattatccatccaaaaagagaaacacctcctaaaccgatgaagtgattggtgattgagtgcggaagtctgaaagactgacgaatgtttcgctgctgttgcatgtatgtcgcgttgtaatctactccaagtcttaaataatgtacggaattgatatacatcatcc

SEQ ID NO: 53786 - DNA, 1484 bp, Oryza sativa
  Clone ID: PAT_MRT4530_55953C.1
ccaccccccgccgccagggctcccccgctcccccacccccccaccgccccctccgcccccctcgcccgccgcggcccggcctggcggaggcgccggggctcccagtcattttaagatatccttaccaagagatttagtccagcatgggattcgatgtctggggctcggcatgtatttctgctcctttgtcaatttgtaaataaccttgaggtgatccatttgccatgggccggggcccctcatgggcgcggcgggggcgggacggctggcggtgggcgccgccgtgctcttcccgctccggctggccgcgggcgtgctcgtgctcgtcgcctactacctcgtgtgccgcgtgtgcacgctgcgtgtggaggaggaggagcgcgagggtgccggtgacggcgcggctggagaagtggaggggcacgggtacgcgcggctcgaggggtggaggcgtgagggcgtcgtgcggtgcgacgttcctggtgttccatgaatgctcatgttcataggcgtcatgttaataccctactactaaactgtaaaattatttgtccatagtgtggttcagtaatcatgtcagttatacatgattacattcacatgtctagcacacacttcaccatgcaatccatcgatgtgagccttgtcacctttcttcccaaactttgttgccaagagatcagtggccagattgcccatggttggtctcataagcaaatgtcttggatgcatttttgttcagcgggaatctaaaacctcagatttcaaaggcgtttcagaaggcacaactacaaatggtgattatctcctccctttcaagacaggagcatttcttgcaaaagcaccagtgaagccagtcattttaagatatccttacaagagatttagtccagcatgggattcgatgtctggggctcggcatgtatttctgctcctttgtcaatttgtaaataaccttgaggtgatccatttgcctgtgtattacccatctgagcaagagaaggaagatcctaagctgtacgcaaataatgtacggaaattgatggcagtggaggggaacttgattctttctgatcttgggctagcagagaagcgtgtgtaccatgcggcattgaatggattattatgtcaaagctaatttggatatgcgtgccgttaattttcctatttgtccctgaaatgttatcgtacatgaaccgaagtcaaagtttgccattagtttttctcaccaaagggatcctttgtagatgaccacagaattttgcagcaagaatcagctaggcattaaaccacaggaattaatacatagggggatgaagggggtaaccatagaaatttccattttcttcagctcaggatcatgtttagtagtgttgatgtgtcatcactaacaatgttgtatctggtgtaccttccaactagcgaattaccaatcaaatgtaatagtttttatggttaaaaaaaaaaaaaaaaacacacaaacc

SEQ ID NO: 53787 - DNA, 281 bp, Oryza sativa
  Clone ID: PAT_MRT4530_55954C.1
ggcccgagaacaagtgatgggactttcccagtaatactcgtggtgttgccccaaacgaaaatctgtgcccgcaacaaaccataccagagaggcaggaggacttcagaatctggtatcggcgacaggacttagtctcttcactaatcgaacccctctctctacacgtcaatgtgcctctgtgcatgtcgtagccgacgttttgcctaatctaacattgtcagtttttctctggtgtagtaccctattcttccctccttttttatctaggattgctgtactgc

SEQ ID NO: 53788 - DNA, 360 bp, Oryza sativa
  Clone ID: PAT_MRT4530_55955C.1
gggtgttgtttcgaggtatcagacgcctctcttagcagagcaataggcactgtgaggatattgccatttgtatcaatcaagggcaaccctggttctgggtcttttcccaacctgaagacaatggtcttgaagcacatgccagatgtgaaccagctggtggtcgctggtggtgcacttccagtcattgaaggtttatatatcgtgtcgctgccagagctagagagagttcctcagggcattgagaccctttgctctctgaagaaactctggcttctcaatctgcacaaatacttcaaatctcactggactgatggagaaatgcaccagaagatgcagcatgttccggacctgcgtgtctag

SEQ ID NO: 53789 - DNA, 1144 bp, Oryza sativa
  Clone ID: PAT_MRT4530_55956C.1
acccgtttctccggcgatgcggcggctacccctacggctcctgcgctccgccgcctcctcaccccgacgccgccccgctccctcccctcccccctcgccgaaccccgcggcgccgcctgcactcctctcccggtgggggtgggggtgggcgccgccgcggaggggttactcgcggttcgcgaccgggttcaccccactgcagcccaagccgctcgcctccatcctcgacgtcgagcgcgccagcggactctcccccgaccacctcgtcgccgcctgggatgactaccacttggggagaggtcatataggtgcatctatgagtgcaaagctttaccatcttatggagcaaagatcagctacatgccgtcattttgttatccctttgtggaaaggaactggatatactaccatgttcatgcaagttcagatgccgcatatgatcttcaccggacttgaagactacaaagcaaggggcactcaagcaagcccttactatacgatcactcattatacagagtttgcagaaaccaaggatacagtgcttatccgaggagacgttgttttcaccagtaaactgactgattcagaggcgaaatgtcttttagagagtgctcactcattctacctgaatgatgtgaggtacaggcttgtagagcgcttcaacaaagaaccacatgagtttgagttcaaagatgtcctgcaagtgcttgaaatgccaaccatgtgacaagattgaagacctgcaatagcaaagcttcctggagcatgtcagtgcatttttacagtggcagggtctagattgcactaatacactgcgtatcactctgagattgctagctgaacatcaattctacggttgtgtggtagcaataataccataataccatgagaaaaatttgtgtaagtgctaagcagttacagccgtaagtcctaggaggaattccttaactatcttctgccgtttcttttgaacctcttgtctgcaataacatggtggaaccagaagtccagaacccttatccactctcaaaaaccattgtgtaaacttaacctgaagtcagccgttattgttgctgttctgactttttgttaaggctgagtttagttcccaacttttccttcaaaaaaaaaaaaaaaaaaaaaa

SEQ ID NO: 53790 - DNA, 2495 bp, Oryza sativa
  Clone ID: PAT_MRT4530_55957C.1
atggggaagccgagctcgagctggttcagagcagcttcaggctcgggcatggcgtcggtgggcttcactggagtggtggcgatgctgctcatggccacagcgttcttgggggtcactgccgacactagctcagacgacgtgactgccctaaacacgttctacacaagtctgaactcgccctcgcagctgacaaactgggtggcgcagaacggcgacccttgtggccagtcttggcttgggatcacttgctctggatcaagggtgataacaataaaattacccggtatggggctcaaggggaccttggggtacaacatgaacgtcatgactgcactggttgagcttgatgctagcaataacaatcttggaggaggtgatatcccttataatctccctccaaatcttgagaggctaaatcttgagaacaatagcttcactgggactttgccttactccatttcccaaatggcctcactgaagtatctaaatcttggacataatcagctttcaagcatcaatgttatgttcaaccaactcaccaacttggctacattggacctctctgacaacaccttctctggcactctgccagacagcttcagcaacttgacaagtctgaccatgcttcatttgcaggataatcggtttaccggtaccatagatgtcctatctgatctccctctaactgacctcaacgttcaaaacaatcaattaagtggagcaattcctgataagctaaaaggcataagtaatctgcagataagtgggaactcctttagcaacagtccagtcagtcctgcaccatcatctccaccatccactacttcacaatccccgccacgacagccttctaccagaaatcctcgtaaccgtaacagaaatccaccaattggaagcaatggtgataacggtggcaatggcgatggcagtggcggtgacggtggaggcagaagttctaagataggaggtggggctgttgctgggattgtcatatctttggtggttcttggagcaatggttggattctttgtgttcaagagaaagtcaacgaggcatcaacatggaggagatcctgagaagaatgaacctctcactcttagaccaattgcttcaggaaaattcaatcagctgagaacaataagcatcatatcaccaactgcaaaggaaggattgcagaagactgtctcaatgaacctgaaaccgccatcgaaaatcgatttgcacaagtcctttgacgaaaatgatctcacaaacaagcctgttttggcaaagaatgtagacctttcttccatcagagcaactgcgtacactgtggcagacctgcagatggcaacggagagcttcagtgctgacaatcttatcggtgaaggctcttttggccgggtttacagagcagagatctcagatgagtcagatcataaggtactggctgtgaagaaaatcaatgtatctgcctttccaagcaaaccatccgatttctttattgatttggtagcaaagatttcaaaattaaaccatccaaacctctcagagcttgacggctactgcttggagcatggacagtatttgctggcatatgaattttacagaaacggttctcttcatgacttccttcacctgtctgatggatacagcaaaccactgtcttggaatagccgtgtcaagattgcattaggatctgcaagggcattagagtatatgcacgaaacttgctcaccgtctatcatccacaagaatttcaagtcatctaacatactgttggataatgagcttaacccccatgtttcagattgtgggtttgcagagcttattcccaaccaggaactccaggaatcagatgagaactcaggatatagagctcccgaggtgaccatgtctggacagtactctcaaaagagtgatgtgtacagttttggagtcgtcatgctagagctcctgactggcaggaaagcatttgacagatcccaaccatggccacagcagtcgctagtccgatgggcttctccgcagcttcatgacatcgatgcgttagatcagatggtagatccagcactggaaggactgtaccctgcaaaatccctctctcgattcgccgacgcaatcgcgctctgtgtccagcctgagccggaattcaggccaccgatgtcggaggtcgtccagtccttagtccggctcgtgcagaggtcaagcatggggtcagtcctcagtggtggcgagagcatttcgcgacgatacgacaactccggtgactacacattctagggtgaaaaagaaaaaaaaatgcttgcatgtttttgtcagtagttttttgtgacagctacagaagttacagatgttgcagtttgctcagctacacagtgatttgtagtactgataagccgttgtcatgtaacctgtaaaagtatgcctttggactgccaaactctgtttttgtttgtgaataacaatggcaacccctgccctggtggtgatgctttatacattctggttttctt

SEQ ID NO: 53791 - DNA, 701 bp, Oryza sativa
  Clone ID: PAT_MRT4530_55958C.1
tagcaggaattctgggttgcacaacaaagtccagagttgttgactgtggtccacttatagatagaactgacaggaggctatcttccatagaaatttatttatcacatggtcaaagttaacagtggtaattctatttttttcatcattaccaacctaccacatgtgtacattgaaggttccaaaaaaatcatgtaacataaagacagagcaaggaggtgttgtttaccgagaaaatggtatgcaactgacggagggagtggttctttggcagcttaggatagggtaaaaaacctaaacaaaagggaagttaagaatcattaatttggaacaccataatatagcgctgctcatgaaataactggataaactttataatagaagagatcttcgctgggtcaagttagtttggacagaaaactaccaatctcagcaacctccgcatgcttgctctgaaaaaggttcctttggcggaaagacatcttctgattattgccactctatagagctatatcgaaaataacattcggaatagggatacaatagtttgctagaaagacaacaggaatggtcatatgttggaagaaaaattccctgatcttttggttttgttagaaatgaagatcaatcaacaagggattttttttctaagtgcaaacatagacgacaatttcactcttcctttatcagtttagtctttacaa

SEQ ID NO: 53792 - DNA, 1626 bp, Oryza sativa
  Clone ID: PAT_MRT4530_55959C.1
gatgcaaagagaactccttggttatattgctcaccatgattgcactccatctgtccatgttcatcactccatctacatatgagcaacatcgcttttccagcattatttccactcttcatggctaccatgaaagaatcacacaacctccttatacacagaactacattgccatccacgactttaaagaggtacaacaggtaatggtaatatagtcaacaacagttgcggtcaactagtacaatctgaataaatcaggttccgaaagagaaaagaaaggtaaaataaaaaggaaacaggctcctagtttatggaaaattgaagccaacctgcctgtcaaattcaaatgacaccgctagccgggagaacattttcagcagattggcgctcagcagaacttccagtggttgttgcagttcacgcatgtcacaaatgttgtcattggctcatcagcactccgagtctgcagctggtagtaagtcgtcttccgctggccacacctgccacacttgaactgatcagtagtcgcctttggggctcctccacgctcacaatcgaacaaagccttctccttgatctgcttattctcaagcttcctcgcgtcactagccatctcttctggagatatgtcaacaagcctctcaggcctcacttggccaaggagaacccttcttcggaaatcagtgttgttgtcagctctaagattgaacattattgacctgtattttgccttgtgagccccagttgaacgtcccagcctctcaaataacgcagattcaacggtcacagcaactctgaatggatctcgtgcatccacttcatctaagatgtttctcacttcctccctgtcatctttgctagtctctccatgaaccctggagaaggcatctgcaagtagttcccggattttatctctagtgggatcattgcatttgacaagagatgtcagctttggggggccatttggaacagaagatggcttctttgtatcaggagttctagtggcttcctttggagccctctctaccttgacttgttggtttttggaatcattattggtgatcttctcaaccttgatgctctcaggcttctggcccctaacattgacttctcttttctcaggcttcacacttcctgatgcagaactcttatcaaccttcatgggctgagccttttcagctctggcggctgagttggttgatccaacattttctgtggtaccatttttctttccttcttcgataacaacctttttccagtaccccagaagatctgtagccatggattgtatgtctgagtgagggtgcttagtaaggtaacgaagacgttttccaacctgcgtggagacgaggacgtcggtggtgacgcggagaccgcgcagccgccgcatcgcgtcgaggcagcggtcggcctccggggagtcgtccgccccggccgccgcgtcggccgccttcttggcggcctcgaacgtctccagcagctccctctccatggcgggcggcgcgtcgccggcgacaaatcaatcaaaaccctagccgccgcgggctccccgccgccgtcttctcccgtgtggcgtacgggcgggcgcgtgggcggacgcgtgggcggacgcgtgggcggacgcgtggg

SEQ ID NO: 53793 - DNA, 1971 bp, Oryza sativa
  Clone ID: PAT_MRT4530_5595C.1
ccacgcgtccgcggacgcgtgggtaaaagccgcctcagatgcccggccgacatggcggcgtaggaactccaacgaccacgtatccacaaaccaaagcccccctttaaaatccgacacaagaaacagatccaaccaattcgctcgcttaagccgccggcaaatcaacccaaccccaagggtttttcgtgtggtgttgaggatccatggctaggaagatgctcaaggacgaggaggtggaggtggccgtcaccgacggcgggagctacgactacgacctgttcgtgatcggcgccgggagcggcggcgtccggggctctcgcacctccgcgtccttcggggctaaggttgcgatttgcgagctcccgttccatcccatcagctcggattggcaaggagggcatggtgggacgtgtgtgatacgtggttgtgtgcctaaaaagatactggtgtatggttcatctttccgcggagaatttgaggatgcaaagaattttgggtgggaaatcaatggggacattaacttcaactggaaaaggctgctggaaaataagactcaagaaattgttagactaaatggagtataccagaggattcttggcaattctggtgtgacaatgattgaaggggcaggcagtttggttgatgctcatacagttgaagtcacaaagccagatggttcaaagcaaagatatacagcaaagcacatattgatagcaactggtagccgagctcaacgtgtcaacattcctgggaaggagttagctattacttcagatgaggccttaagtttggaggagctaccaaaacgtgctgtaatccttggtggcggatatattgctgttgaatttgcttctatatggaaagggatgggtgcgcacgtagacttgttttatcgaaaagagcttcctctaagaggtttcgatgatgagatgaggacggttgttgcaagtaaccttgagggaaggggaatcagattacatccagggacaaatctatctgagttgagtaaaacagccgatggcataaaagttgtcactgacaaaggagaggagatcattgcagatgttgttctgtttgctacaggtcgcacaccaaactcccagaggttgaacttggaagctgctggtgttgaagttgataatattggagctataaaggttgatgattattctcgtacatcagtcccaaatatatgggctgtgggtgatgtaacgaaccggataaatttaacacctgttgcactgatggaggctacctgcttttctaaaactgtgtttggtggccagccaactaaacctgattacagagatgtaccttgtgctgttttctccatcccaccactatcagtagtgggcttgagtgaacagcaggctttggaggaagccaagagcgatgttcttgtttacacttccagcttcaacccaatgaagaacagcatatccaaacggcaggagaagaccgtcatgaaactggtggttgattcagagactgataaagtacttggtgcatcaatgtgtggaccagatgcaccagagattatccagggtatggctgtagcgctgaagtgtggagccaccaaggcgacctttgacagcactgttggtattcacccgtctgctgctgaagagtttgtgacaatgcggaccttgaccaggcgcgtgagcccatcatccaagccaaagacaaacttgtaggcaagatgagtaattttggataaagaaacatatatacccgttttgatttatattttgtggcaaagtgtactctggtttgcatctggtaatttcacgttagggattctacctggaacggtaaaaaggagacaatgtatacttgattgaaataaggtttctgcatatcagcctgtacagaaagtaaaactactgcgtttttctgatccaaataagcgggcgggacatcattcgttctgcctgcagacaaactctctgaatatcatccattgctcactgt

SEQ ID NO: 53794 - DNA, 272 bp, Oryza sativa
  unsure (1)..(272): unsure at all n locations
  Clone ID: PAT_MRT4530_55960C.1
ctgcccggcaagtgcggcctcaccatgcccaccnnctgctcctgatcgattgatatgntcatnacantagctatgtgtgcaacgaaanatatgctggttaaataaataacgtactgttgtgaaattcatccccatgtactgaagtgtgcatggntcgatcttgttttagtatatgtaacagtgtaagtgtgtcggcgatgcaagaagccaatgttagctcccatataatgataagttatcggggcttgtcatttaaaaaaaaaannnaaaaa

SEQ ID NO: 53795 - DNA, 393 bp, Oryza sativa
  Clone ID: PAT_MRT4530_55961C.1
atgtgggctacaaatgggccccagtccctaggaatgcacttgggcgtcaagttggctttgagaaggcccaacggctccgtcccgccgcctcccaggtacttgctgcggccttcaggccgtaggcgcggggtagtcatggcgagattgatgtcgtccgccctcatcaggggtctcgatatcaaggagaacccagtcctgatctacatgaagggttatcctgatgctcctaggtgtgggttcagtgcgttggcagttagagtcctcaagcaatatgatgtccctatcagtgctagggatattttgggagacctcaagctcaaagagagtgtcaaagcccacaccgagagcatcgatcacaacaagaggatgaccggtggtggaattggcggctag

SEQ ID NO: 53796 - DNA, 381 bp, Oryza sativa
  Clone ID: PAT_MRT4530_55962C.1
atgggtgcacgtcgtaagccaacggtcggccttgtctctagccccgatgcggtggtggaggtcggtattagcaggattttgctggagggagaagagagggagatggaaatggaaatggaagagaacgaagggctcattaatagatgggccttatatttctgctctgtccatgaaaagtggataaagccaacgatatcatatgtactgtcggtgacgaaggaggcttgcatatttgtggttgccacgcaggaggagatgaaccaaatggctggcacaatttgtgaagtaaacttttactttcagttggaggcgtcgtatgaggatagaaatcaaacaattaagtggtcagaactctcacgtgcaatgggcttgaaatggtag

SEQ ID NO: 53797 - DNA, 1181 bp, Oryza sativa
  Clone ID: PAT_MRT4530_55963C.1
gcacgaggccaagtcacaccatccgcgtcccggatccggcgaccaccgattcctcgccgccgccgacgacgatgccggcgttcaaggcgccggcgccgggcttctccgtgcgcttcagcccgttccacgagcagcgcctcctcgcggccgcctcccagcacttcggattagtcggcaacggccacctcctcgtcctcgacctctccgccgccgccgccccggggggcgcgccggcgcccccgccggtgttcgccttcccgacctccgacgcgctgttcgactgcgcgtggtcggagtcccacgagtccctctgcgccgccgcctccggggacgggtccgtgcgcctgttcgacgtcgcgctgccgcccgcgcagaaccccgtccgcctcctccgggagcacgcgcgggaggtgcacggcctcgactggaaccccgtccgccgcgacgccttcctctccgcgtcctgggacgacacgctcaagctctggtccccggaccgcccggcctccgtgcgcaccttccgcggccacgagtactgcgtctacgccgccgcgtggtcggcgcgccacccggacgtcttcgcctccgcgtccggcgaccgcaccgcccgcgtctgggacgtgcgcgagccggcgcccacgctggtcatcccggcgcacgaccacgaggtgctctcgctcgactgggacaagtacgatccgtccatcctcgccaccggctccgtcgacaagtcgatccgcgtctgggacgtccgcgcgccgcgggcgccgctggcgcagctcgccgggcacgggtacgccgtcaagcgcgtcaagttctcgccgcaccggcagggcatgctcatgtcctgctcctacgacatgacggtgtgcatgtgggattaccgcaaggaggacgcgctgctcgcgaggtatggccaccacactgaattcgttgccgggatcgacatgagcgtgctcgtggaagggttgctcgcgagcaccgggtgggacgagatgatctatgtgtggccatttggctctgatcctagagcaatgtaaactaaatgcctttggagaacacatatttcgtacgtcgagcgatatggattatttctgttgcgttttgcattggtcatagtaatacatgtggattaactcctttgagttgaagaaattgcaataaagatcacattgccatct

SEQ ID NO: 53798 - DNA, 621 bp, Oryza sativa
  Clone ID: PAT_MRT4530_55964C.1
tttttttttttttttcatcaaattatgttttttttttttttttttttgaaatatttacaagctttggtttcattcttgtattccttccatgaatacatgtacaagatggaatatttacagcgactgtatacccccaatgccagtatactgatgaaactaatcctacatgattttttttccctgacctaaattttgaattaactttccccctatgttttgtaccatgtgtaaacctatttacaccacccagcctacatcatcttcgtcgtcgtcataaatctgaaatcatatttacagtaaaatctagaagaaaaaaacataaaactaactaactaagtaattatttacagctaattaattaacccaggtgggagtaaattaattaggagtagagcttgatgaggctgaagttctggaacggccggtagaatttgaagagattcccgaagaggaacgccgtcgagccagccgacgtcatcgggggcgccgcgccgccgcggccggcgccatcgccgtcggcgaaggggtcgtgcttgacacgcagcgtggcctcgccgatctgcgcgcggatggcgtcgatcgtcttggctccacggggtgggcctgggggtcggagaggta

SEQ ID NO: 53799 - DNA, 480 bp, Oryza sativa
  Clone ID: PAT_MRT4530_55965C.1
atgggcgacacgacagcgatgatggcggtgacaggcgacgcggcagcagtgggaggagccgttgcgggagggcggcgagggaggggcggtgtgctggcggcgggggaaggagcggcacgcgggctcccccaccggccgccgcccatgaggcccacaacgcggcggctggggaaggagctgcgggcgggcggcgggggaggagcggcgggcggccgacggaggagcagcgcgcgggcggcgggaaaggaggaaggcgcgccaaccacacgccgacaccaacgaccaccatgcccgccgccacctccatcgcctccaccactaccgcctactggctcgcgcgagcacccggcaatcgtctccttccggtggagcctcacggggctgtggttctccacctgggccttcctcctcggcttcctcgcctccaacatcgcgctcttcctcaccctcctgcgcgtcgccggaggccgctcccactag

SEQ ID NO: 53800 - DNA, 687 bp, Oryza sativa
  Clone ID: PAT_MRT4530_55966C.1
ccacgcgtccggctcacctctctccgccgcccggcccgctcgctgatgctgccgccgccggcttcacgcgggaagaggtctcagaaaccctaggcgaaagccgccacacatttcctgagtcctctttcccgcggtgcggcggccggccggggcggcgctccatacacccatcgatcgttctgaaccagcaggcatggcgggctccgtcgtgacgaggagcccactgtgctccatcctcttctacgtcctcgccacggccgccgcggcgacggcgacggcgacgcttgtgggcaacatcaccgccgacgaggagtactgggccaagcgctccgaggtggcgcgctcgttcaaccgcgccgcctacgtcagcgaccccgtcgccgtgctgaacaggttcaacgaggacgtgctgaataccacgacggcgacggcggcggcggcgcggcggtcgctgatgaggaggtaccggcgtcgtggcccgtgcacggtgacgaacccgatcgacctgtgctggcgctgccgcaagaactgggcgagccgtcgcaagcggctggccaagtgcgccatggggttcggccacaaggccaccggcgggctcgccggcaagatctacatcgtgacggacgccggcgacgagcacctcgtcatccctcggcggggcacgctccggcacgccgtgatccagga

SEQ ID NO: 53801 - DNA, 144 bp, Oryza sativa
  Clone ID: PAT_MRT4530_55967C.1
atgcttgggagcagccggatccgacaccgccccttctcatcagcgcttgggagcggccagatccagtgcctcctccctctcctgtatggcgtggcatacggccaaagggacttctctataacagtgagtgttggttacttcacg

SEQ ID NO: 53802 - DNA, 510 bp, Oryza sativa
  Clone ID: PAT_MRT4530_55968C.1
atgggaccaaatggcacgcagacgcagcagcaggtgagaggcgacatgcatgcgccggccggttctcacctcttccatttcagcaacagctggaaaaagcgccaagaaacaaacacctcatcatcaagccaatgcaattcaaccccacaaaaaggccttccgaatgatacagctcacatcatcacaccagccacacatctgcacaaggtctctgtaactgctactgctgatgatgaatcattgttcatcaggatgatatatgattcacatgaagaacagaagttacagaggatacaggacagtgactggatgatgatgatggaaactcaatactacattttcagaggcctgagttttggtgtcagggacaactacaagtccagaaccatgaaaaagattgcacagaagactgaaatattagggtcaagtacatcaaccaaagtagaaatattatacaggagtacatctaaccaagctgaactacaaagccgacatgcacctattcagtga

SEQ ID NO: 53803 - DNA, 404 bp, Oryza sativa
  Clone ID: PAT_MRT4530_55969C.1
ctggcggtggcggggacgacttggcggcggggacgacctggcgacggcgacggcgaggggggagaggtccgtgcggcggcgacagcgacggcgagggggtagaggtcctggcggcggcgtcggcgacggcgaggggcggggcgacttcggggaggagccggcggtggcggggacgacttggcggcggtgacaacggtgacggcgacttagcgcagatcatcgcatgcgggcggcttaagggaccgcatggaaagatgatctttccatgcgggcgacataagccggccgcatgcgaaaattatctttccatgcgggccgttaagccagccgcatgcgaaaaagatatttccgtgcgggccgtaaagacggccgcatgcaaaaaagatctttccatccggctgact

SEQ ID NO: 53804 - DNA, 225 bp, Oryza sativa
  Clone ID: PAT_MRT4530_5596C.1
gggctgcaggaattcggcacgaggtatatttccaacataacatacaaccctgagcctttgtataaaagtgatggcagagggtcaggatggttattttgactcatccactgacagcttgcgtgttgagcctatttatgaatcattcttgtgtcctctctctaaacaagttatgcgggatcctgtcactatagagagtggtgccacatttgaacgtgaagctattct

SEQ ID NO: 53805 - DNA, 583 bp, Oryza sativa
  Clone ID: PAT_MRT4530_55970C.1
gcacgaggggcaaatctcccctcctctctttctctgttgcgcattcctatcagctggcgacaccctccctctccccctaccagcggcgttactccccctcctcctccccacactggtgacgccgctcccctacccctcagctaggcgccctttgccccgccaatggctcaggttacaggcggcagatctagcgtcggctcggggcgcgagcggcggcagtaccagtggcaaagcttggggtggtgctgttaagccacaagaggtggagatcggtcgcgtgctgcgggcggcggattcggtggcggctcgggtcgcaggcggcggatccggtgttagctccgggcacgggcggcgacggagatcaagtcatggacggcggtaccggcggcaaacctcagggcggtgggtcaaggcactggaggtggagctcggtcgcgggctgtatgcggctgatctggcgtcggcttgagcggaggtgttgacctagggtgcaaatctggcggtgtggatggcaagtcccgtggcacgggcgcgcttcggccggcggggctccgacggcgggtcctcgtccacggtgccagcg

SEQ ID NO: 53806 - DNA, 3232 bp, Oryza sativa
  Clone ID: PAT_MRT4530_55971C.1
ctgtgcgttcccttgagcgtcttgttcagtatcgcgagcagaatactagtagggcggttcctctggctctgggtttgctttgcatacccgatccaaaggtaaatgttatggacacaatgagtagactgaccaatgatgcagaggcgggagtttctatggctgcaatcatctccctgggcttgatagggactggtacacacaatgcccgtagagctgggatgcttcggaacctctcaagttattattagaaagaagttggacatctgttttgtgtgaggatttctcaagggcttgttcacattgggaagggtttgctgaccctttcgccatatcactctgaccggttccttctgtcccccatagcacttgctggtcttgttgactggttatgcatccctgtcttgacatgcaatccatcgattctggggaagtacccattacatgctttatatccttaccctagctatgcagcctaggatgctattgactgtggatgaggatctcaagcccctctctgttccggtacgtgttggccaagcagttgatgtcgtcggtcaggcgggtagacccaagacaatcactggattccagacacattcaacgcctgtattacttgctgcaggggagcgagcagagctggcaactgaaaaatatcttccactgacaccagttcttgagggttttgtgatcctaaggaaaaaccaagaataccatgaagattaaggcctggaatcctatgaagaagcttggatcaatatctaattgtctcgcgaagcgacgaacaaatagcacgatgaaaaagaactgcatactagatacggtgagggctgggttaacaggagttcaggtaaaatggggccaatatgacagtagtactttttaagaacaaggaatagaacttataagtgctttggcgattgcgaagatctttgtcaatagttcaacgagtatgataatgacgcgagagttctataccaagtatctaaagttaaataagctgttctcattcatcattgcacgccatggtttgaccatggagattgacgacgagatagctgccgatggcaatgataaggagggtttgcaagaaatcgttaataatagtaagctgagtgaggggtacctcacccttgctcgagatatcgaagtgatggaagcaaaatctccagaggatatatataaggtccatttaattgatgggcgtggtgccagctccagtcttgattctgcaagacaaaatttagctgcaacatttgtaaatgcattcgtaaatgctggatttggtcaggataagttgatgactgctccatctgattcttccagtagcggagcttctggaaactggttattcaagaacaaggaacatgggaaagccagcgcagcagctagcctgggaatgattctcttgtgggatactgattctggacttgctcagcttgacaagtacttacatagtaatgatgctcatgttgttgctggagctttgctaggtattggtattgtcacatgtggtgtgaagaatgattgtgatccagcacttgctattctcatggagtacattaacaaggatgacacaaacattcggattggggcaatcttgggtcttggtattgcatatgcgggttctcagaaagaggagcttaaatcttatctatcaactgtgttgggggactctgagaaatcaactcttgaggtcctgatattctccgccatcgctctgggattggtgtttgttggttcttgcaatgaagagattgctcagtctatcatatttgccttgatggagcgcagtgaggctgagctggcagaacccattatacgcctgcttcctgttgcgcttggtcttctgtatcttggaaagcaggagagtgtagaggctacggcagaagtttctaaaacatttgatgagaagataagaaagtactgtgatgtaacacttatgtcactagcatatgctggaacaggaaatgtgctcaaggttcaaaagctccttgggatttgctcacagcatcttgagaaaggtgaaacccaccaggggccagctgtcctaggaattgcgcttattgcaatggctgaagaattaggagctgagatggctgtacggtcacttgagcgtcttttacagtatggcgagcagaatattagacgggcagttcctcttgctcttggcatactctgcatatctaatccgaaggtaaatgttatggacacgcttagcagactgagtcatgatgcggatgctgatgtgtcaatggctgcaatcatttcattgggtttcattggtgctggtacaaacaatgctagaatagctggtatgcttcgcaatctttcaagttactattacaaagaagctgcgcatctgttttgtgtaagaattgctcaaggacttgttcaccttgggaagggtttgttgactctctatgaaatccatcattctggggaagtaccattacatgctttatatccttgccctagctatgcagcctcggatgctattgactgtggatgaggatctcaagcccctctctgttccggtttgtgttggtcaagcagttgacgtcgtcggtcaggcgggtcgacccaagacaattactggattccagacgcattcaacgcctgtattacttgccgcaggggaacgagcagagctggcaactgaaaaatatcttccactgacaccagttcttgagggttttgtgatcctaagaaataacccagagtatcatgaagattaagggatagatatggcacacgcaaaatgcaggaagggcctggagtattaggaagaggcttggatcaatatctaattgtcacacaaagcaatgaacaaatagcacgatgaagacaatgcatacttgatacggtgaggactgagttgtaacaaagagttcaggtataatggggccaatatgacaggagaactttgtaagaattaggaatagaatctgtgggtgtaatggcatggccgaaaatgtttttgactataccagaatgaaaatgacccaagagtttgttgccaaaaaaaaaaaaaaaaaaaaaaaaataccatcaaggaagctgacatatccgtttcttgatttttggaattgatgcgttttttgtttgggtcatttgttaccacgtggctcgcacctctagcacgcagaaacgctgtactttatgtgatgttgtgcacctgagtacagatataccgctggggatatcctgatggtaaaaaaaaaaaaaaaaaaaa

SEQ ID NO: 53807 - DNA, 906 bp, Oryza sativa
  Clone ID: PAT_MRT4530_55972C.1
cttattttaggatggaggtatactatctttctcctactatactgcgcggcgttcaacccgcggatgctgttcctggtgaagcccgatccgatcgtgctcaaggatcaccatggggtggtgctcagcgggaacgtcacggtcaatgtgctctactatggtcggttcacgccggcgcagcgcgccgtcgtggccggcttcgtgcggtcggcctcggcggcgcagcacccgcgtgtgccatccgtggcggcgtggtggagcaccacgtcgctgtaccgcggcggcggcgcgcggctgcggctcgggatgcaggtcatggacgagcggatgtcgctcggccggtcgctctcgctggacaacgtcacggcgctgacgagggcggcggggcaccaccgcggcgccgtcacggcggtgctcacggcgcccgacgtcctcgtggcgcccttctgcatgtcgcggtgcggcgtccacggccacggcggcggcgtcggcgcgcacggcagggcgcggtacgcctacctgtgggcgggcaacccggcgcagcagtgccccggccagtgcgcgtggccgttccaccagccggtgtacgggccccaggcgccgccgctcgtgccgcccaacggcgacgtcggcgtggacggcatggtcatcagcctcgccgcgctcctcgccggcacggtgacgaaccccttcggcgacgggtactaccagggcgacgccggcgccgggatggaggccgccacggcgtgcgccggcgtcttcggcagcggcgccttccccggctaccccggcaagctgctcaaggacccggtcaccggcgccagctacaacgccgtcgggctcgccggccggaagtacctgctgccggcgttgtgggaccccacgacgtcgcagtgcaagacacttgtc

SEQ ID NO: 53808 - DNA, 3113 bp, Oryza sativa
  Clone ID: PAT_MRT4530_55973C.1
tcggtgttccagtagcagcagtctccaactcctcttctcttcccttcccctcatctcgcgctctcgcctccgcgcggagctcgattcctaaaccctacctcgccgcgccgccgcgcgccggggagatcgccctcgccctccgccatgccgccgcgcgaggaccccaacggggacgcctcctccgcctccccctcggaccccgtcccgcctccgccgcagcagccgcagccgcagccggccaagggcaaggggaagaagaaggatgagaagaaggacgacgacctgtcggaggaggaccaggcgctcaaggagcagctcgagctctacgtggtgcgggcgcaggacaccgatcccggcgtccagaagctcgccctcgagagcatgaggcaggagatccgttctgcgacaagttcaatgacctctgtcccaaagcctctcaaattccttcgcccgcactatggaactctcaaggcttactttgagacaatgccagaatctgatctgaagaagtatatggctgatattttgtcagtattggccctgacaatgtccgctgaaggagaaagagagagcctcaactaccgaatgataggctctgaaggtgacattggttcatggggtcatgaatatgtgagaaacttggctggtgaaattgcacaggaattccagaagcgccaggatgatggcatgccaactgattccctgaaggaactggtggagcaaatcgtttcattccacatgaagcataatgctgaacctgaagctgtggatcttctaatggaggtcgaaaagcttgatttgctagttaagcacgttgactccacgaactacaaaaggacctgcttgtacctcactagttcttctaaatatcttcctgctcctgatgacatgtcggcacttaaaatagcttttgagatttacatgaaatttggagattttgcaaatgctttgcgtattgcacttctgctttatgacaagtccctggagttgaagccgatttttacagcaactgatgattttcaactgaagaagcaattcgcgtttatcatagcacgccatggtttaagcatcgagattgatgatgacatagctgctgatgaaaatgagaaggaggctttgcaggacataatttctaatattaaattgagtgaggggtaccttacacttgcacgagatattgaggtcatggagccaaaatctccagaagacatatataaggttcatttgattgatggccgaggggctacaagctccagtcttgattccgcaagacagaatctggcggcaacatttgtcaatgcattcgtgaatgctggatttggccaggataaactcatgaccacaccatcagattcttcaagcagtggttcttctggaaactggttattcaagaacaaggaacatgggaaagctagtgcagccgctagcctgggaatgattcttctgtgggattctgattcaggacttgcccaacttgacaagtacctgcacagcaatgatattcatgttgttgctggggctttgctaggtattggaattgtttcttgtggtgtgaagagtgactgcgatccggcatttgctcttatttctgagtatttcagcagggatgagtcaattatacgaattggagcaatccttggtcttggtattgcttatgctggctcccagaaagaggaggttagagagaatctcacagcttttctgactgactcccaagtacctctggaggtcttggtcttctctgccatctccttaggtttggtgttcgttggttcctgtaatgaagaggttgcacagacaatcatatgcgtcttaatggagcgtagtgaaccagagcttgcagagccaattatgcgcttgcttcctgttgcccttggccttctatatcttggaaagcaggaaagtgtggaggcgactgcagaggtttctaaaacctttgatgagaagataaggaattattgtgacgtgacattgatgtcactggcatatgctgggacagggaacgtgcttaaggttcaaaaactccttggaatttgctccgagcatcttgagaaaggtgaaacccaccaagggccagcagttcttggaatctccctaattgccatggctgaagaattaggggcggaaatggctgtacgttcccttgagcgtcttttacagtatggcgagcagaatattagaagggcggttcctctagctctgggtttgctttgcatatccaatccaaaggtaaatgttatggacacaatgagtagactgagccatgatgcagatgcggaagtttctatggctgcaatcatctccctgggcttgataggggctggtacaaacaatgcccgtatagctgggatgcttcggaacctctcaagttattattacaaagaagcaggacatctgttttgtgtgaggattgctcaaggtcttgttcaccttgggaagggtttgctgaccctttcaccatatcactctgaccggttccttctgtcccccatagcacttgctggtcttgtgacggttctgcatgcctgtcttgacatgaaatccatcattctggggaagtaccattacatgctttatatccttaccctagctatgcagcctaggatgctattgactgtggatgaggatctcaagcccctctctgttccgttgatctttgcttatgcttatgcttatgctctttctatgtgcagatatcttccactgacaccagttcttgagggttttgtgatcctaaggaagaacccagaatagcatgaagattaaggcatactagggaaccatgctgcaacatgggacaggatctttgcctattgggttccctcctcggcgcctcctggtgttaatcggataggtcttttatctcttctaccggagtctcgagtgttggagcagagctctttgaattctgaaatcctttttggttgtgcaatgactgacgtgacgtatcacttgtacccaaacatgggcatctaggagttgaactgtttccttttacctccagtttatttatctgtatgtagcaaagtatgtactggaaatttgaggtcgaagtattattcttgatttccacaagatctcatcaaggaagctgacatattggtttcatgctt

SEQ ID NO: 53809 - DNA, 1237 bp, Oryza sativa
  Clone ID: PAT_MRT4530_55974C.1
gaaagtgtggaggcgaccgctgaggtttctaaaacctttgatgagaagataaggaattattgtgacgtgacactgatgtcgctggcatatgctgggacagggaacgtgcttaaggttcaaaaactccttggaatctgttccgagcatcttgagaaaggtgaaacccaccaaggaccagcagttcttggaatctccctaatttccatggctgaagaattaggggcggaaatggctgtacgttcccttgagcgtcttttacagtatggcgagcagaatattagaagggcggttcctctagctctgggcttgctttgcatatccaatccaaaggtaaatgttatggacacaatgagcagactgagccatgatgcagatgcggaagtttctatggctgcaatcatctccctgggcttgataggggctggtacaaacaatgcccgtatagctgggatgcttcggaacctctcaagttattattacaaagaagcaggacatctgttttgtgtgaggattgctcaaggtcttgttcaccttgggaagggtttgctgaccctttcgccatatcactctgaccggttccttctgtcccccatagcacttgctggtcttgtgacggttctgcatgcctgccttgacatgaaatccatcattctggggaagtaccattacatgctttatatccttgccctagctatgcagcctcggatgctattgactgtggatgaggatctcaagcccctctctgttccggttcgtgttggccaagcagttgacgtcgtcggtcaggcgggtcgacccaagacaatcactggattccagacgcattcaacgcctgtattacttgccgcaggggagcgagcagagctggcaactgaaaaatatcttccactgacaccagttcttgagggttttgtgatcctaaggaagaacccagagtaccatgaagattaaggcctggagtactatgaagaggcttggatcaatatctaattgtcacacaaagcgacgaacaaatagcacgatgaagacgatgcatactagatacggtgagggctgggttaacaggagttcaggtataatggggccaatatgacaggagaactttataagaactaggaatagaatcgttgggtgtaatggcatggccgaaaatgtttttgactcgttataccagaatgaaaatgacccgagagtttgttgccaaaaaaaaaaaaaaaaaaaaaaaaaaaaaaaaaag

SEQ ID NO: 53810 - DNA, 220 bp, Oryza sativa
  Clone ID: PAT_MRT4530_55975C.1
gtaaacctaaactcttcctctttttttcttaaacgttggaactgtcaaagcaaaagcagttctggtgcaagaacataaaaaggagctttcttgctgtccttgtttccacagcattaaagaataagcacagcacccttaacagccaatgacactaacacacaaacagttcctcttgttttcgaaggttggactaaccatgctacctatttctagcctaaat

SEQ ID NO: 53811 - DNA, 1453 bp, Oryza sativa
  Clone ID: PAT_MRT4530_55976C.1
aactagtggatcccccgggcaccatagtttggagctcccagtttacgagaggaggagaagaagaaccgcacgacaccccaccccacctcccgatcgccaagaaccacaatccccaatccacccaataactctaattcctcccccgattcgccctcgaccaagaaccactcggatcgatcaaagccgccacctttccaccaaatccccaatctttttttttcttcttcttttcttgcaattgatgcgcttcgccatcgggatttgaggggaggaagaagaaggggatggcgtgcagggggttcttcgagtgggtcctgaagctgctcaacttggtggtgatggtggtcgggctggccatgatggggtacggcgcctacctcctcgtggcgtggctccagctgctgccttcgccgccgctgccgcctgcgccggcggtggctcccggcggcggcggaggcagcgagatggtgcggctcgggaggccgctgctgctcctcctcgacgtgtcgtcgttgcccgatgggaccgcggagaagctctccgctgcatggtttatttacacgtttattggtgttggtgtaatactcttcattacatccatctttggttgcgctggagcatcgaggggcgggtgctgcttatccttttactcgttcctcattattttgttcatactggtagagcttgctgcaggaggtttcattttcttcaaccatagctggaaagatgtaattccagttgataaaactggtaactttgacatgatgtacagctttttgaaggagaattggagaatcgcaaagtgggttgcacttggagctgtactatttgaggcagtgctgttcactgtagctctcatagtgcagtcaggcaatcaagcagactatgacagtgatgacgagtacattgccccaaggtcttcaacccggcagccgttggtgaacaagcaacctgttgctgaccctagggtgcccaaccttgactaccgtccaatccgaaacgatgcgtggagccaaagaatgagagaaaagtatggggtggacacctttgatccaaacaggttccaacaggcgacaatatctcccgcagaacaaagaaaccgatgcgcaatcctctgaaactcggttggtatcagtcggtagcggctctaatttacacccaactgtacaatagcatcgatcggttcccgcataatgtatacctgcttgatgtctttgaaccaatgttgttcagttgtttaggatgtggagagcctgtccagttaaaaaaaaaaaaattgcacagttagagttctgttgaacattttgtagtttatgcgcccttccatcttgcaataattaaatttcagtttttgttaacagagacatctcctgttgtgcataaaacctgctatgtactcccatcggttcctcttttctttttataacaaggtatattataaagtcaataagtt

SEQ ID NO: 53812 - DNA, 1785 bp, Oryza sativa
  Clone ID: PAT_MRT4530_55977C.1
atgccgccgcgcaaggaccccaacgggggcgccttcccctcggagcccgccccgccgcagccggccaaggccaaggggaagaagaaggatgagaacaaggacgacgacctgtcggaggaggaccaggcgctcaaggagcagctcgagctctacgtggtgcgggcgcaggaccccgatcccggcgtccagaagctcgccctcgagagcatgaggcaggagatccgttctgcgacaagttcaatgacctctgtcccaaagcctctcaaattccttcgcccgcactatggaattctcaaggcttactttgagacaatgccagaatctgagctgaagaagtatatggctgatatcttgtcagtattggccctgacaatgtccgctgaaggagaaagagagagcctcaagtaccgaatgataggctctgaaggtgacattggttcatggggtcatgaatatgtgaggttgtatctggaaataactttggagttttcagtttttctgtttcctttgtttgttattgagaataagattggattttctaacaatgtcaatgtctcacttgctagaaacttggctggtgaaattgcacaggaattccagaagcgccaggatgatggcatgacaactgattccctgaaggaactggtggagcaaattgtttcattccacatgaagcataatgctgaacctgaagctgtggatctcctaatggaggtcgaaaagcttgatttgctagttaagcacgttgactccacaaactacaaaaggacctgcttgtacctcactagttcttctaaatatcttcctgctcctgatgacatgtcggcacttaaaatagcttttgagatttacatgaaatttggagattttgcaaatgctttgcgtattgcacttctgcttgatgacaagggtttaagcaccgacattgatgatgacatagctgcagatgaaaatgagaaggaggcttttcagcacataatttctaatattaaattgagtgaggggtaccttacacttgcacgaaatattgaggtcatggagccaaaatctccagaagacatatataaggttcatttgattgatggccgaggggctacaagctccagtcttgattctgcaagacagaatctggcggcaacatttgtcaatgcattcgtgaatgctggatttggccaggttagttatgcgaatttcatcaaagattcttcgggcagtggttcttctggaaactggttattcaagaacaaggaacatgggaaagctagtgcagccgctagtctgggaatgattcttctgtgggattctgattcaggacttgcccaacttgataagtacctgcacagtaatgatattcatgttgttgctggggctttgctaggtattggaattgtttcttgtggtgtgaagagtgactgcgatccggcatttgctcttatttctgagtatttcagcagggatgagtcaattatacgaattggagcaatccttggtcttggtattgcttatgctggctcccagaaagaggaggtcaaaatccttgctcttggccttgctatcccactggttagagagaatcttacagcttttctgagtgactcccaagtacctctggaggtcttagtcttcgctgccatctccttaggtttggtgttcgttggttcttgtaatgaagagattgcacagacaatcatatgtgtcttaatggagcatagtgagccagagcttgcagagccaattatacgcttgcttcctgttgcccttggccttctatatcttggaaagcag

SEQ ID NO: 53813 - DNA, 639 bp, Oryza sativa
  Clone ID: PAT_MRT4530_55978C.1
ggaatcggaggccgaccagcagcggatttgtgggctgtcccaaaaccagtccgactgggctccctcgctttctgccgcctggtcgtcctgtttctgcccttctcccacctgtcgtctactcgcttctcgctgttgccgcggcactcgccatgtttgctgtggaccttccaggagctcggcgccctcgatggtcccaactgcgagtggtatcgcaacgaagaacatagatggcgtggctttcccattctcgtcgagccgggcgtctggaagctcgacggcagatcacagcgcggccgtggcggatcgacaagcaacgacgccgggacccttgcaacgtcgccgtagcagccgactcggactcgagtcacccagttcgacatgggtgccattgcaaggcagcgacggccggcatcctccgcgcctatggatgcatgaaggtgacaatgaactccttgaaggcggcgaggaggattcgaatctcgcgtcgcttcatgcgaatgcgatactcaatctcgtcgatcgtgtgcttgccgttgaggtagggcaacaggcgaaatagcttcttgacgagccagggctcctttccttcgaccatgctggcatccactcgttttcgatgcgaaaaaaaaaaaaaaaaaa

SEQ ID NO: 53814 - DNA, 479 bp, Oryza sativa
  Clone ID: PAT_MRT4530_55979C.1
cggacgcgtgggcggacgcgtgggcggacgcgtgggcggacgcgtgggcggacgcgtgggcggacgcgtgggattctggggaagtaccattacatgctttatatccttgccctagctatgcagcctcggatgctattgactgtggatgaggatctcaagcccctctctgttccggtttgtgttggtcaagcagttgacgtcgtcggtcagtcgggtcgacccaagacaattactggattccagacgcattcaacgcctgtattacttgccgcaggggaacgagcagagctggcaactgaaaaatatcttccactgacaccagttcttgagggttttgtgatcctaagaaataacccagagtatcatgaagattaagggatagatatggcacacgcaaaatgcatgaagggcctggagtattaggaaaggctttgatcaatatctaatggcacacaaagcaatgaacaaatagcacgatg

SEQ ID NO: 53815 - DNA, 315 bp, Oryza sativa
  Clone ID: PAT_MRT4530_5597C.1
atggaggctgcagcaggcggcgcaagggaagtgcatgtgatgaagaagacctgcaagaacctgaagacgaaggaggatgctgcaggcggcaacgtcgccgtgcggaaggagcaggtgatgaagacgacgaagggcctgaagaagtcgccgccgccgccatcgtcgtcgccggagcaagtgaagatgccgtgccggagctactccgcggagaacataaagcatcggctgaccaagacggtgaaggagcaccgggcgcgcttctacatcatacgccgctgcatccaaatgctcatctgctggcgcgacgagtactag

SEQ ID NO: 53816 - DNA, 237 bp, Oryza sativa
  Clone ID: PAT_MRT4530_55980C.1
atggcgccgccgtctcgtcatgtacacgcaccgccgtcgtcgtcggcggcggcgcatgaggcccgtcagcagggcggcgagcgccctgaggagctccaccctggcgcggagctccgcgacgttaaatataagtggaacatgtgcacaagctcacgtaatgcatccaatgggtggagtcaccgcccggctaacctgggcagccgcatagactcatcagaaaactccattaaattttag

SEQ ID NO: 53817 - DNA, 3189 bp, Oryza sativa
  Clone ID: PAT_MRT4530_55981C.1
atgcaccgcaagctcccgccattacctcccctcacactccgccgctcctcctcctcctcctcctccgccgccgccgcggcctctcctccaccgccgccacctcgccgtctccctcctccggttccgctccgtgacctcctcgcccaccgcctcccgcccacgcccacgccggaccggcctcccctctcgcggccgcatcctcacgccgacgtcctcctccgcggccgacgcccgggctgcgacgcctcgccggagagcctccacctcgaggtcgtcaagaggggcctcacccatgacctcttcctcgccaaccacctcgtcaactcgtacgccaagggcgcgcgcctggacgccgcgcgcagggtgttcgacggaatgccgggccggaacgccgtttcttggacctgcctcatctccgggcacgtgctgtccgggctccccgaggatgccttcccgctgttccgcgccatgctgcgggaggggccggggtgcaggcctacgtcgttcacctttggcagcgtgctccgggcgtgccaggattccgggccggaccggctgggcttcgccgtgcaggtccatgggttggtctctaagacagagttcacttcaaacaccacggtgtgcaatgccctgatctctatgtatggcagttgctccgttggtccgccgatcctggcacagcgtgtgtttgataccactccagtcagggacttgatcacatggaacgccttgatgtctgtgtatgcaaagagaggggatgcaatttgtacgtttactctgttcagggctatgcagtatgatgattcggggatcgagttgaggccgacagagcatacttttgggagcttaatcaccgcgacatatctttcctcatgcagcttgggcctgcttgatcaattgtttgtgagggtgctcaaatctggctgctcaagtgacctgtatgtgggcagtgctttagtaagtgcatttgcgagacatggcatgcttgatgaagcaaaggacatttatctcggtctgaaagagagaaatgcagttactttgaatggtctgatagctggtttggtcaagcagcaacatggtgaagcggcagcagagattttcatgggagcaagggattccgctgctgtcaacgtggatacatatgttgtgttgcttagtgcaatagctgagttttctacagcagaacaagggttgaggaaaggtagggaagtccatgcacatgtgctcagagctggacatatttataggaaaattgcagttagtaatggtctagttaatatgtatgccaagtgtggtgccattgataaagcatgtagagtttttcagctgatggaagcaagggatcggatttcatggaataccattatcactgctcttgatcaaaatggatactgtgaagcagcaatgatgaattactgtttaatgagacaaaatagtataggtccatcaaactttgcagcaattagtggcttaagttcctgtgctggtttgggacttttagctgcaggccaacaattgcactgtgatgctgtaaaatggggactatatttagatacctctgtttcaaatgctcttgttaaaatgtatggagaatgtgggcggatgtcagaatgctgggaaattttcaactctatgtctgcacatgatgtagtttcttggaattctatcatgggtgttatggcgagttcacaagcacctattactgaatctgtacaagttttctccaatatgatgaagagtggtttggtcccaaacaaagtgacgtttgttaactttctagctgctttgactccattatctgttcttgaacttggaaagcagattcattctgtcatgctgaagcatggagttacagaagataatgcagtagataatgcactcatgtcatgctatgcaaagtcaggagatgtggattcctgtgagcggctgttttctagaatgtctggcagacgggatgctatctcatggaattcaatgatttcagggtacatctacaatggacatctgcaggaagctatggactgtgtttgtcttatgatgcatagtgaacaaatgatggatcactgcaccttctccattgtactgaatgcatgtgcttctgtggcagcattggagcgtggaatggagatgcatgcttttggtttaaggtcacacttggaatcagatgttgtggtcgagagtgctcttgttgatatgtactccaagtgtggaaggatagactatgcttcaaaggtatttcattccatgagtcagaaaaatgagttctcatggaactccatgatttctggttatgcgagacatggtctcggaaggaaagctttggagatatttgaggaaatgcaagagagcggagaaagtccagaccatgtcacgtttgtgagtgttttgtctgcctgtagtcacgctggtttagttgaaagaggccttgactactttgaattgatggaggattatggtatattacctcggattgagcattattcttgtgttatagaccttcttggtcgagctggggagcttgataagatacaggagtacatgaaaagaatgccaatgaaaccaaatactctcatatggaggacggtattagttgcttgtcaacaatcaaaacacagggctaagatagatctggggacagaagcttcaaggatgcttttggaattagaacctcaaaatcctgtaaattatgttctttcatctaagtttcatgcagcaataggaaggtgggaagacacagccaaagcccgggctgcaatgaagggagcagcagtgaaaaaagaggccggtcgcagttgggtaaccttaactgatggagttcataccttcattgctggtgacaggtcacatccaaacaccaaagaaatctatgagaagctcaactttttgattcagaagataaggaatgcaggttatgttccactgacagaatatgttttacatgatcttgaagaagagaacaaagaagaactgctaagatatcacagtgaaaagcttgcggttgcttttgttctgactcgttcctcctcaggtggccccataaggatcatgaagaaccttcgggtttgcggagattgccatacagctttcagatacatttctcagattgttggtcggcaaatcattttaagggattcaatccgatttcatcatttcaaggatgggaaatgttcttgtggggactactggtaa

SEQ ID NO: 53818 - DNA, 283 bp, Oryza sativa
  unsure (1)..(283): unsure at all n locations
  Clone ID: PAT_MRT4530_55982C.1
cggccatggggaaccaancacccattcagcctgcaaaaccattcgaatcaaaggagggggtcctatctggagtacagatcccgccaatccagccaatgcgtacaaaaataagcaaaaccgccagctcagcattcgccaaatgttccaacctatgttccaccgcccgaacgcgctaggcctgcggatgcagtgctgccagcagctgcaggacgtgagccgcgagtgccgctgcgccgccatccgccgcttaaaaattaattaaaaaaatggaaaatttgatcac

SEQ ID NO: 53819 - DNA, 167 bp, Oryza sativa
  Clone ID: PAT_MRT4530_55983C.1
atgtctggacgtagcagtggccatatcaccatttccgtcacgcacttctttgcatgttccaaaccagctattgcaggcgaggttccagatttctcagcttatcaggaagctcaccatcaggtccacaggggatcctctagagtcgacctgcaggcatgcaagcttga

SEQ ID NO: 53820 - DNA, 1164 bp, Oryza sativa
  Clone ID: PAT_MRT4530_55984C.1
atggcgtccacggcaggagttggcggcatcggcaaccccaccccgagaggcaagaagcccttcgccccgtggcgcgaggtgccaccccaggtgacccacacgctgccgccggagaagaaggaggtcttcgactccctggaggggtgggcggcggacaccatcctcccctacctcaagcccgtggaggagtcgtggcagccgcaggaccacctcccggacccgcgctcgccgtcgttcggcgacgaggtggcggcgctgcgggagcgcgcggcggggctccccgacgaccacctggtgtgcctcgtcggcgacatggtcaccgaggaggcgctccccacgtaccagacgatgctcaacaccatggacggcggggtgcgcgacgagaccggcgccggcggcagcgcctgggccgtgtggaccagggcgtgggccgccgaggagaaccggcacggcgacctgatgaacaagtacctctacctcaccggcagggtcgacatgaggcaggtcgagaagacgatacagtacctcattggctccggcatggtcgttggtagggccttgttaacgggtgttttaaaattcttagaagctgatccacgaacggagaacgacccgtacatggggttcatctacacgacgttccaggagcgcgccacctccatctcccacggcaacacggcgcgccacgcggggcgccacggcgacgccgccctggcccgcgtctgcggcaccgtcgccgccgacgagaagcgccacgaggccgcctacgccgccatcgtcgccaagctcttcgaggtggacccggactacacggtcagggccttcgcccgcatgatgcgccgcaaggtcgccatgccggcgcgcctcatgtacgacggcgccgacgaccgcctcttcgcccgcttcgccgccgtcgcgcagcgcctcggcgtgtacaccgccgccgactacgccgggatcatcgagttcctcgtcgcgaggtggggcgtccccggcctcgccgcggggctttccggcgaagggcggcgcgcgcaggacttcgtctgcagcctcgggccgaggttcaggaggatggaggagagggcgcaggaggcggcgaagcgggcgccgcccgccgccgccgctccgttcagctggatccatggccgtcaggtgcagctctga

SEQ ID NO: 53821 - DNA, 165 bp, Oryza sativa
  Clone ID: PAT_MRT4530_55985C.1
atgactactgagggcaccacggatgtcgtgaacctaagcgttatcagcgaggcccgaagcgatcgtgtgagacgttcggaatccagaacaacactgacgttcatgggattagatataaaaatatgggacccagctcacggcaaggaacaaaataattggacctaa

SEQ ID NO: 53822 - DNA, 314 bp, Oryza sativa
  Clone ID: PAT_MRT4530_55986C.1
gatttccccttgccaatagcattggtggagataaagtggaaggtggaaaactaatgaccatgggaagaaggtctgactatctcattgtcttatttgacctgtatttcagtatgcgtttagcttcttggcaatcaattgtggatgcaagagaactgtttgagcttcttggtactaaatctgggtggtacttgtatgagctagattcgtatttggatatcctggggaaaattgctcttacactctctaacatgctttgtgaagacatgaaggctggtccagatagggttcttgttctttatgatcagatgagttag

SEQ ID NO: 53823 - DNA, 576 bp, Oryza sativa
  Clone ID: PAT_MRT4530_55987C.1
atggatcaaatcaactggcacgctcataaacctaaaggcaagctttttggacctacgctggagttaagcagatctcccaggcctcgtgttttcacatcaacagatattgactatgaaaatcgattttcacaaacggatcgtaaagggtctttcccaccccaaaagctagccattgaggtgaggggctcccccacttatatcttaggtcatttgcccttccacaaccaatgtgggactattcaacaatctctcccttcacacattggtgtccctcagccccttcaccgtatttgggccccactggcccacggtccatcaggttaccctgagatgtcgagaagtattgataatgaagatacctcctacaaagccctgagaagtaggtctttgttttgcaatgaaaagattctgaaggcaccatcaaatttaccaccagcacgttgccatgcatgtgataagcctacatgtggaggagtagatatttatgcaagtcgagctaatgaaaagattctaagttacggtaccatcgaatatacaaacccaccaagttgccatgtggtacatgtcgatgagtag

SEQ ID NO: 53824 - DNA, 444 bp, Oryza sativa
  Clone ID: PAT_MRT4530_55988C.1
atgccatcttaaaaacgattcgttaaaatgccaagatgaagcgcgtgacactcgccgctttaccattttcaccattttatgcattttcgataggaatttcgcttctctgccaagtgaccagacgaaattgccctgcagttacatagaaaggggatcgagatccagaggctcgaggaggagcctgagcgtagtttagctgcggtagttggtgatgcaggagcggtagatgctgacgcaggagttaaaaccgttttctatgccgcacctaatggggttgtcgaacttgtgccacctccggccgatcaaggcccagctgttgatgcacctcctgatgtggacgacgacgccctctccgccgcccacgctgtcgacagcagaggtgctgtagtcactcgcgacggcgccaccttctctgccatagcccctgttcgcggttacggtgga

SEQ ID NO: 53825 - DNA, 255 bp, Oryza sativa
  Clone ID: PAT_MRT4530_55989C.1
atggcctgcctggatcccacaccgttggcgccgcacgcgatgctcctcgtcgtcgagcaacgctcagccacctccaccgattggaccgatggcggtgaagagggcatcgtcatcaccggttcctccaccgtaaccgcgaacaggggctatggcagagaaggtggcgccgtcgcgagtgactacagcacctctgctgtcgacagcgtgggcggcggagagggcgtcgtcgtcgtagtttccaacgtcgccccctag

SEQ ID NO: 53826 - DNA, 399 bp, Oryza sativa
  Clone ID: PAT_MRT4530_5598C.1
atgaaaaaagacagagtttggaagttagacccctttctaagactctctttcaaaaaagaggacattttgaaacttttaacaggcacaatcgtgagtcaacaagtgactcgaaatgctcgtaagaaaagagaattgattttcaaaatggtagaactagatgacgaagttttctataaccttgatgaagaggtagttttagtttacgactccgatcaagagcgagaagtctttcatttcagattggactgctatagaatctggacccatcgtagagacgttcaaaaggctcctgatgataagaatcatactttcgcggaactccatggggctatgggcttcaacgcggtagacgttttgttccgaatttttctggagcaaacctccgacccaacgatacaa

SEQ ID NO: 53827 - DNA, 708 bp, Oryza sativa
  Clone ID: PAT_MRT4530_55990C.1
atgtggcctgaatttagggggatagttaaggaaatgttggatgaattgcataaagggaatctggatactgacagattaaattatggggttatcactcttttaccaaaattagcagatgcaaacaacattaaacaatacatgccaatctgtcttcagaatgttatccttaagatcttgataaaggctataaatgagagggtggctaaggtggccgagaagataataagctggactcagactgcttttattcctggtaaaaatattttggaaggttatgtgatcttacatgaaactttgcatgagctgaagaaaagaaaaaaagaaaaagggataatcttcaaaattgacgttgaaaaggcttatggcagggttaattggaactttctatatgaggttacgaggaagaagaacttcagcactatcctgaaaaaggcaaaaacaagtagggttttagaaggtttgattcctgagctaattcctagagagatgttaggaatgaagataaattatcagaaaagtgagatctatgtgatgggtgtagagaaagatgaggagttaagaattaccaacatgtttaactgcaaagtgggaaacatgcctttcacttatttgggtttgcctatgcatacagagaaaatagggatgagggagttcagacaaataactcaaaatgtggaaaagagattgcagtcttggaagagtggttaa

SEQ ID NO: 53828 - DNA, 540 bp, Oryza sativa
  unsure (1)..(540): unsure at all n locations
  Clone ID: PAT_MRT4530_55991C.1
gggggtgtgtgtgttttttttttttttnttttttttttgtgggggtttttctttttttttattcataagaacaccgaggtaaacacgctgccagccaaaggaaagcccccgtctggcaaaagcccgcccgagttatgcaaacaaccccgcataagggggggggggggggggttcggagcccagggaccagctaccgggggcccaggacaaccgggcccgggggggacacccccggtgcaaaaggggaggggccccggggggaagcccgggaggcccaccgccgggcggcccggggccccgccccgggggccggcgaaccggaacgcgggggggcccccgggggggcccgaccgggccctgccggggggccaccttgagctgggccgggtcgtcgtaaaggctggcgccttcgtggtcagggctgccgcccgcggggccgcgtcccccggggacaggtccccccaccaaaattgccgggggcgtacagtgggggggctggggggcctaaaggggggggcccccaacgttcagtggcctgcc

SEQ ID NO: 53829 - DNA, 201 bp, Oryza sativa
  Clone ID: PAT_MRT4530_55992C.1
atggcggccgccgatgccaccaccgcccgcctccactccgtccaggccgccgcccctcccgcctcgccgagccgcagccgcctccatgccgccggatctggcggagacttgggccacatgggccatgtgcacttaacaggccaagttgtggaagacattcggcccatccttatgggcctaattgagttttatctattctga

SEQ ID NO: 53830 - DNA, 2073 bp, Oryza sativa
  Clone ID: PAT_MRT4530_55993C.1
ctatcttggttcaagttctgtgatcgtcaccttattgagtgaaggattcagattgttaataccatgatggatatggttctcatcattcagcctaaagagaaaggcaggcctggaaggagctggcaaggttgtagatttcccaacgatcatcagaatcacattggacatccggggcctatcacctggattctcttgaacacacaatagtccaatgtgtatgcacttgagaatctcgctttcggcacttctacagcgcaatgatggatccactatctctgttattgtgcccctagtccaattctcccatacatagcttaaaagatgctcagtccatattgtttcagatgagatagtgtttctcctcccagtcaatatttctagaataattactccaaagctaaagatatctgacttagtggaaacatgaccaagaactgcatactcaggtgccatatatccataggttccggcaactcgtcttgtgatatgatttgtgtggtctccctcaaaaacacttgccaagccgaagtcagatatcttaggattcaaatccatgtcaagtaatatattgcttggttttaaatccctatgtataactttcacacgagactcatcatgtaggtataccaagcctcgagcaataccacaaatgatcttgtaacgtgcatcccaagccaattgttcacgctttttgtcatctatatttaaatcttgctttgatccttttgctagtctttttactgctatttcttgaccatctggcattaagcccttatagactttgccaaatcctccttcccctagtttgttttcttcagcaaaattacctgtagctgatcttatcactgatgggtccaacaacactgatttaatatcttcaacttcctctgaacaagatgattgccttctcttcaaacttgatctgtttctccacaggcatattgaaatagctgagattataccaagtcctatcgacacaggaaggacaattggcaggattgcagggttactcttgctactgctttggctgctgctgctgtttccagttgagctattgccgtttgcctgctgattagtaccatttcctttatcaggaaccagccctggcaaggagatgccggcttggctgcagctgtagggacgctggccggcgacgttgcccggggggtcgtagttgcaggcgatgaacgttccgccacccgcactgtcgtcacaggtcacgctcgcgcacccaacccttgtggagttggtccacatgagctgggtgtattcaccgcactcctgcccgtctttgcacgtgttgccggtgcagttgtagttcttcgcctcccctagccaggagaagagcgcgtccgaggcggtccagcttatgtgggcgactccctggaacaggttctcgccgtacgggccattggagtgaacgttcctgcagtcgctcttccgcttctcggcgtagtctgcggcgtaggcggccacggtgctgtcccaagagagcatgcccgcgccaacgcctgcccgggctgcgttgtggaggttgaggaaatcttgcggtgaactctgcgctgtttgattgaagcggccgcatccgccgtacgccaggacacccagcacattgccggggggatcgtattcgcagattatgaacgtgccgcggtccgcatcgcagttcacggccgcgcacccgaccttggtcgtctttgcccacaccatctgcgtgtagtgaccgcatttgtagaactgcttctccgagtgcccaccttggtcaccggcgcacgagccgtcgctgcagttgtagaactgcttctccgaggcccacgaggctaccgcgttggcggccgtccagttggcgcccgcgctgccccagaatatgctctccccgtatggtccgccggagtgctccgtgcgtaggccgccaccgtgtcgtcccacgtgagcggtgcgacgccgacgtcggcgcgggctcggttctggaggtccagctaggaagggctgcgctgagcctagggaatcggctgcggcggcggcggcgggggcgacgagcacggtgaccacgcacagacacggcagcaggag

SEQ ID NO: 53831 - DNA, 523 bp, Oryza sativa
  Clone ID: PAT_MRT4530_55994C.1
ttttgctctcctctttctctcttctccagtcctctcttctccagcggcggagcaacgcgagcggtggggcgaggggcgccgccagcggtcgggggtggagggcggtgggtacgaaaggcggtgggggcggagggcggcgcgggctgcggggcgatgcgagccgccgtgcggaggagaggcgagcagcgcaagcggctggccgacggtgggagcggaggggcggcgcgagcagcggagcgacaggagcggctggatctggccggagcgcggtttgtcggcgacgacggcatggcgtgcagcgctgcgcatattctctaccttcgctcctccatgccttgatccggattggggcgggagaaccagatggatgcggcggttacgggatggcgttaggagagagaaactccaaatctgccgattctttcttcggaatagcgcatgcgttatttttggaggcttcgatggcgcatctactggagcctgattttctccttccatgtgctatatttgagatggaagattg

SEQ ID NO: 53832 - DNA, 342 bp, Oryza sativa
  Clone ID: PAT_MRT4530_55995C.1
atggctcaccgacctgcgtggctgcgtgtgcggttcggcggcggtggcggcgccagggaggagacggggctcaagatcctggcgttcgaggtggcggcagccatgtcgcggctcgtgtcgctctactgctcattgtctgacgtggaggacaggaggctccgcgtggacgcgctgctcgccgagggcgtcgcgcgcgtcacatccacggaccagtcgctcctgctctggctcgcgtgtggcgaggtcgtggcggacctcgactgtgccgccggcagcgccacgcggttcgggacgcggtgctgcgctgcgcgccgttcctgcacgattttcgaccgcgtctag

SEQ ID NO: 53833 - DNA, 2232 bp, Oryza sativa
  Clone ID: PAT_MRT4530_55996C.1
aggcaatcccctgtttcttgctcctcccctgtgttcccggcggcggcgatggggtgcgcggcgtccaagggcgcggcggtggcgtcgccggcgtacgaggcgaccacgacgtcgtcgtcgtcggcgtcggcggcgtacagcgtgtcgaggagcgcgtcgacgggcgcggcggcggcggaggtggcgtcgatttggagccggccggtgcggctcgacgcgtacgaggatgatggcgacgggaagaagaaggcggcggcgcgtgggggtggtgagtgttcgtccgtcgtcgtcgtcggcggtggcgtgcggctcgggaacatccacaggccgccaactacgagaagctcgacaaggcaagcaagaactcaaaccgtcgaacacctctccttctcaattaagctaacaatcaatggcggcggcaatggcggcgcgtccatgatccagattgggcaggggacgtacagcagcgtgttcagggcgcggaacgtggagacggggaggatggtggcgctgaagaaggtgcggttcgacagcggcgagccggagagcgtgcggttcatggcgcgcgagatcctcatccttcgccgcctccaccgccaccccaacgtcgtctccctcgacggcctcatcacctcccgctcctcccccaacctctacctcgtcttcgactactccgaccacgacctcgccggcctctcctccgacccctccctctccttctcccttcccgagatcaagtgctacatgcggcagctgctgctggggctcgagcactgccatgcgaggggggtgatgcaccgcgacatcaagtgcgcgaacctgctggtgagcggcggcggcgagctcaaggtcgccgacttcgggctcgccaacgtgttcgacgcgtcgtcggcggcggcgatgacgagcagggtggtgacgctgtggtaccggccaccggagctgctgctgggcgccacggcgtacgacgccagcgtcgacctgtggagcgccgggtgcgtgttcgccgagatgcacgcgcggcggccgatcctgcaggggaggacggaggtggagcagatccacaggatcttcaagctctgcggctcgccgggggacgcgtactggcgccgcgcggcggcgggcggcggcggcggcgccgggttccggccgcagcagccgtacgagagccggctcagggagacgttcgggggcatgatgggcgacgacgcgttcgcgctcctctccaagctcctctccgtcgagccctccgcccgtggcaccgccaccgaagccctcgcctccgagtatttcaggacggagccgtacgcctgcgagccatcgagcttgcccaagtacgcgcccaacaaggagatggacgccaagcttcgagaagattctagaaggagggtcaatgtcggcggcaggaaccacggcggcgtcggcggcggcgaggcgacgaagcggctgtcacgggggcacaagagcatgcaggacaccaccgccgccgccaccgcggccgccgtcgtcgccagccagaggcacggccacggccacgtccacgccgaggagtcgctcccccgcgccaacggcggcgaggcgaggctgttcgtcgacatgcaacccgtgccggtgatcgccagcaagcgccacgacgacccgacgccgccgccgcctccgccgccgatgtcccggagctaccaggacgacgccggcgaccgcctcccgctctccgggccggtgcagctcaccgcctccaccggcttcgcctgggccaagatgccacgaccagactccaccacgacggcggcggcggcggcgaagcggagctcctccaaggtgccaagaaccaacagcaatggcggcgcctacgaggcggagaagcaggaggcgatgaagcagtgggcgcaggtcgccgacgcgttcacctcgtcggaatcctacaacaaccggttcaaggagcccacggccaccgccggcgccggcgccgccgccgccaccaaggaggtcaagagcagcaaggtctcgtctccctccgatcacttccaccattgtcgtaatccttcctcaccggccatctcactgacgattttcccgccattggcagaagcacaaggtcggcggcgggaggttgcacagggtgggattctccgggccgttgctgtcgcagccgcggcgcatcgaggagctcctccagaaccacgagcagcagatccggcgagctggccgccactcgtggttccgcaaaggtga

SEQ ID NO: 53834 - DNA, 354 bp, Oryza sativa
  Clone ID: PAT_MRT4530_55997C.1
gtttgatatagatgggatagcaaactgcatgggggcctgagatgagaagcaggagtattctaaatgcagaagagtatccggtggaagtaggcatggagatcttatgctcaactgcgtttgtcagacaggacattgcagacagggtgaagaaccatggaaggtctgaagggatccatgcttagaagagcaaaacatggctactacgcatatccagacccagtggcgttgacacagaggaaactctaactatctaaaactgaagagagcagcactgacttatgaatgtgcttggagaataagggttgccagaagggagctgtgacagctcataatggctgcatgagatacacaagc

SEQ ID NO: 53835 - DNA, 913 bp, Oryza sativa
  Clone ID: PAT_MRT4530_55998C.1
attactcctgaacgttactccctcgcgcactataaaatcccacccgatgcgctagccactgcctcctcgatcctgttcacctgcgcgcacaagtgcacgggacgagcaggtgcctccgaaactccatccgcttgcgtacctgcacagataggtgggcaatcaagtttttggagagcgtctcggcgtgaccactcctgtcgactgcattgcaacctcttcatcgggctcttcttccattgctacaccatgtcggctgtcaacactgacaacaacacctacaccggcactggagaaggtgagaatggcaacaccaatggaggcaacaacaccaacaatgcctcatctattatcaccatgctatcctttggatctctatcctatgtgaatatacttgatgtttatgcttatattatcaaaagcatgctcatgtttaataccttcactagatcattcaactatatacatgtcatgtgtagtatcttaattttctggattaaaatatgccgatttatgaccaaattttcaacaatccaaaaacttgataggtatttttcggtagttggctttgcgacatcactaaaaccatatgctttcgatggttcaaattataaaggatggaaagcacgtgcactattctctcctgaggaggaggctaagttcgaggctgcggattgcctgttccgtggagcattgatcagtgtactagccgacaacatagtggacgtgtacatgcatatgccttcaaggaaggacatgtgggatgctcttaaggtcaagttcgaagtctccgatgtcagcagcaaactaccgaattcacacgcggtcaagccaaaccttcgccggtaagtattcaaacatggcctcctgccactcaaattgatcttggccgccctctcacagcctctgccgcccc

SEQ ID NO: 53836 - DNA, 348 bp, Oryza sativa
  Clone ID: PAT_MRT4530_55999C.1
atgttcgcctggctcctccgcggctgccgcgacgagtgctccgcctccgaccagctcaagcagggagttgtgaaagagaaaaacagatgctggttttggggtgcttttagtgtcaatgcccgtgatgtcttcgtggcaaaagaggcagttctgcaaaagaagatctctcaggagatggaacgtgccaaggagttcacaaaatcaggaaataagcaagcagcaatgcagtgcttgaagaggaagaaatactatgaaagccaaatgaatcaggttggaagtgtccagttgcgcattaataccaaggagaagatgattgctgatcatagcgggaataaagaagacaagtga

SEQ ID NO: 53837 - DNA, 520 bp, Oryza sativa
  unsure (1)..(520): unsure at all n locations
  Clone ID: PAT_MRT4530_5599C.1
ggggggggcgaaanccgggnancngaananttngggcctttntggccttggnacccagaataatccaaagccttcgncaagtttcccnaaaaagggcatccctgggggcatgtggggggaanggggctggggcggtgtttttnaaccaagtggtgaagtgggnngagaagtcaaggnggattttgacaagatggttgagggtgcaaagcaanccaangagcggngttaatttgatgangangnngattagctattttnanattggtttgtcagccaccagaattttttttttcagtttgtatggtttgnaaaaanggtttggaccatccatttgtagttgccgtatnaanacccggnttgcaatttnaaatgcggtgntgtgaataaantgttgttttcacaaaggangngatattttgcttgtatgngnaaccnattattgnaaaaaaaaaaaaaaaaaaaaaaaaaaaaaaaaaaaaaaaaaaaaaaaaaaaaaaaaaaaaaaaaaaaaaaaaaaaaa

SEQ ID NO: 53838 - DNA, 311 bp, Oryza sativa
  Clone ID: PAT_MRT4530_559C.1
atggagatctaatatgagcttaattcggataggaatccaaatatgagtcctacgggccttggaggtccgagtaatggatcttatatattcgtgaggagtgtgaccggcggagatattgcatcaccgtgggagtacggcgagcacgaggaggagaaggtcgagccggtgtgatcgactacttcctctacatcgacgcccgctacttcgcgagagttccttcaacttctcagcgtcttccgctgtgcagcttgtcgagtggtaacgatctatgatctaatacttcctgcccatcttatataggatgggcggca

SEQ ID NO: 53839 - DNA, 222 bp, Oryza sativa
  Clone ID: PAT_MRT4530_55C.1
tcgtccacgcgtccgtccacgcgaccgacaagtcaggctaatgtttcaggcctaatcctggctgattctgctgattttaagacagaattgagtaactctgacatgtttgatcaataacttcaagcaagatactgaatggggttgaggtgccctacgggggcaaaaaatcgtttcaaacaagctattgcatcgtcaactgagaatgtagcaggcgtcaaaggt

SEQ ID NO: 53840 - DNA, 428 bp, Oryza sativa
  Clone ID: PAT_MRT4530_56000C.1
aaaggaaaaaaaaaggctttttcatcattagccaaaaaacgggccaggccaaaacaacaaaacaatggctggcaattaatttattaagtttttctttacccccaacccccccaaaaaggattccgccccattaaaaacccctgggaaccccttgttttggatgggagggaatgcccccaacccatccccttttttatgctggaccccctgaccccttttttttgaaaagcgatatgcctttgctaaaacacctttggggaaaccccggaaaaaggaacccttccccgcaagggggcccaccaaaaagtaaggatgggccttaaaagcaaaggaaccccatccttttttttgggccttttttacaccgcataggggggggggaaaaaaagcaactgccccggggaaacccccccgttgaacaccggccc

SEQ ID NO: 53841 - DNA, 2765 bp, Oryza sativa
  Clone ID: PAT_MRT4530_56001C.1
tcggcacgagggccaaacagcagcccgctcttttgatcttttcctccctctcttcttctccctccgaaccacgagtcgccgccaatggcctcctgacaaggcctcgtctcggttctctgctcgtggttgggggcttcttggcgttcttgattttttggtttgggtgccttggtgctcgttcttgaggcgttcgttttcccttggtttgatgcggcggcggtggtgagggtgggagcagccgcaggtcgggaatggaaggggacgagggcgcggcggcggcggcgaggataaggctagtgcggtgccccaagtgcgacaagttcttgccggagctccccgcctactccgtctacgtctgcggcggctgcggcgccgctctccaagcaaagaagaagtactcagcccaaggttctgataactctgataatggacatgtgaagtaccttgaggtactagagagtgttgcggaggcgcctgaagcaatggatggtgctaccgctgatggtagatctatacccaatagaatttcagctttgcacagtagatcagtttacaaccatgaagacaatcgaatggcaagaggtccaagtacttcaacaggtgaagctactattagaaacgatggtagggaggcaaagtacatgcgcatccgtaatgtggaaaatgctgacatgatgaaatcagtaagaggaagaggtatatctgacatatctccgaggtctccaatcgatggaattccacccacctcttaccaagcggaaagccttgtcaactaccaattacagtcaaaatacagattctccaacagggagcatgccaatgatagggacttggatggtccaagcagagttaggggccttgagaaagatcgtgctgagctcttgaagatgcttgatgagttgagagaccaggtgcagcaatcatgtgaggttactgatgcaccaagtagaagtgctacaactaatagacctgcagatgcctcaagttcacatggtgcgcatgatcagccaaatcagctgaggcatgatccatctgtattgcattggaatggttctcatcactcgccatccttgaatgtgcaaagtcctaatatcccacaagtccatgctccattgcctactcgacagaatcttcatggatatgcagagcccatcccgcatgcgagagcctctagctatcatgctggtgctggttacccctgcagaaatgttgataatttcttctttggacatcatgatcctgaccctttgctctcatgtcaccatgaaggcttgtaccatcagcccgtctgttcttgcttcaattgttaccaccgagagtttttgcctgtacagggaactccccttggttttactgatcaaagggcaccataccttatgaacagttatggagcatatcctgtagagggtcccctatatggtcagcagagatacacttcaagaggtactaatacttctttacagaggaatcacctgaggaccaatgtaaggaagaaaccggcacaaacttgtgagccgattgcaggtggtgcccctttcaccatatgctacaattgctatgaagtgctgcgaataccaatgaaacattctttgttgggaaaggagtataagctgatgtgtggatcatgctcacatgcaattctagtcaaccttgatggaagcaggctcaatgtttcagaacctgcgcccggtataaatttatctgctgcactgcaaaatggtattggtgatagcatgagaaacaatgggcatgctaatgctgatgagaggttgcttccacaatattgtttttctaatggaagtcatgaatctcaagaaaaagatctagaatcaaattcaagtgaatcagatagcaaacacactcctctagggactgattctgaaaatactccccagtccagggatcttccttctgaagccaatgtaatttcccatgtaccaagtttaccgcatcatgatcgttgtggattctcaccatcggaagattctggaaagggaagtagaagtacccattctgaacatgaaaaggctatcctatttactgaaagttgcaaacggaactcaattaaagatgtatgtgtagccaatgagacacagtctccagtcgatgagtttgatgatactttatatgcacaagatatgctaaatttgccacaaaatgttggccatactaggtctacaaaggcaggcgattcatttctaaccaatctcattaaaaggagcttcaaaatgaacaatggaacacgcaatggaagagcaaggatttttgttaatggctttcctatctctgaccgtgcagtcaggaaggctgagaagctagctggagaaatctgtcctggtgattactggtatgattatcgtgctgggttctggggtgttatggggcgaccctgccttggcatgatacctccttatattccagagttcaattatcctatgcccaagaactgtggtggtggaaacaccggcatatttattaatgggagagaacttcatcagaaggatttggatctacttgtgtctcgaggactgtctgattcccctggcagatcttatatagttgaaaattctgggaaagtttcagatgaagtttctggtgaagagctttatggccttggcaagcttgcaccgacctacacccatctgcccagtataatttctaaacctttcacaaaagaatacagcctaacaacagttgagttgtgtggagaaaatgaggcgcggatttggcatgcgagtcccaagaatcatccagtgacaaactga

SEQ ID NO: 53842 - DNA, 459 bp, Oryza sativa
  unsure (1)..(459): unsure at all n locations
  Clone ID: PAT_MRT4530_56002C.1
actgtttgacatgcaaaggttcaggggtggtagatggcatgaaatatgtaaatgtgaccattccagcaggtgctgtgcagctaaccttaaattatggttgatagccagctcctttccatgaaacggctacaattgtcaaaatgatttacattttttctattccacttaaaaaaacttcaaataaatttcacaaaaccccaggtttgcgggtatgcataacacgacttttaccagtcattgtagctatattacagacacatgtcaggctaacacatgccaaaacctagctctattactgcgccttatccacatatattgcacatgcattctcgtgaaaaatgtaaaatctaagttagcttgcatatatattgctccatctctttgccgtgacaggttcattcaaggaacatctggcatctggggctgctatgtgncattctagnttctagtttttctttt

SEQ ID NO: 53843 - DNA, 159 bp, Oryza sativa
  Clone ID: PAT_MRT4530_56003C.1
ctaggcaagcaacttaacattcttgacaaggctgtattttgctttggcattgccctggatttgaaacctcctgctgctgacgttgctataatcaaggtatagtacactatctttgcttatcccactcccaaagctccacctgcctccctccacccccat

SEQ ID NO: 53844 - DNA, 418 bp, Oryza sativa
  unsure (1)..(418): unsure at all n locations
  Clone ID: PAT_MRT4530_56004C.1
ggagccttggtatgggctaatgacacgagcgtnagctaggtggtggggattgtttcgganggatattcgngggggtcttgtctaaccgtcgagcagcattgtgatgtgtgccgtgtgaagctantagttagttacctacggtntgtacttggaagagcttgcaggtgggttgtagcaccacacgagagaagagataactcgttatattcggatgatcggtgttnggagtatatctacttagattnatcatggatgtgttggatgctgacatagtttattttctggctagcactatgttcgctcgcttgttgtagtactgaaggtctaaaatagttgtgcaattcgtttgtctgacagtagttgtgagtgaaatgtggtatgcagtggnttgaacatccaaaaaaaaaaaaaaaaaaaa

SEQ ID NO: 53845 - DNA, 2015 bp, Oryza sativa
  Clone ID: PAT_MRT4530_56005C.1
gctatcaaagcactatttcctcctgactcaaatccattctatgctggatttggaaatagagatacagatgagcttagttacctcaaggttgggattcctatgggcaaaatttttattataaatcccaagggtgaagttgcggtgaatcgtcgagtagatacaaaatcatacacatccctccatgctcttgtcaatgggatgttccctccgatatcaacgtcatctgagcagaacctcaagaaccctagacaattggcgacctcgaaaagccctagagccgtctccaatggcggaccaccagcccgccgcctcctcccccaagaggaagaagaagcactccaagaagccggaggacagcaatgccaccgtcgacgactccctcgccgccgccgcctccccctcccccaagaagaaggagaagcactccaagaagaagcgggaagccatcgatgccaccatggccgctgcctcccccaagaagaaggagaagaagcactccaagaagcaggaagacaccaatgtccccgagaagaagcgggaagtcgtccatgtcaccgtggacgcctccctcaccggcgccgccgccgcgggcgcagcccccgtcgtcgcctacttcccgaccggctacgaccccctggccgccggcggcggcaggaagggtagagaggccccccgcacgaggctgttccgccacacgaagcacccatcccgcatcgagctcgtggtcggcgccgccactggtggcggcggagggccggacttcgtcgggcggagctacgccggcgaggccgtgctgccgcagctcactggctacgcgctcggtgtcctcgacaaggcctccggcaccctcaaggtcgtccccatcgccgccaacaagattcttaggctagatccgcaccttgaagtgcagaaactggcgcattcgcagcactctggggcagtaggggaggcagtatcatcagcaggagatgctgacttgaaggtacaggatattaccaaggcgtttggaacccagaaagacaaggccaaggatattaagtggcagtcattaaatgaacaaaggaatgatccttctgcttttatggaccttgaccttgggaatgctgataccagtgtgggtgctaatgaaagtcaagaaccaactgtacggaacattccaccttatgatcctgcagcagatacatcagaaagggcatatctttttgatgagattattccaaagagtataaggccgcaccttgtggatattataggacattttgagtcaggagaaatttcttcaaaaggctatgggagttttgtgtcaaatcgtgttaataaattacaggagcttcagggtgaagataaggagaggcttgcttggatactgtcctacatcacacatctcctatccctgctggcacggaacagctccatgtccaagcggcacagaaaggaaaaccaggctaccagtggaccagtgatcccacagtatgtatatcgtaagatggtgctaatgtttacggaaccaggatctagcgccttgtcaacagagaaacacgagcttctgatcaactacattctcgtactcacgctctacgctgatgacttcagatccgaccctaaggatatatgtgaagacctgaaaatgacccgccagatgattaaaccatattatgaccagctgggatgcaaatcttcgtcggccggtgcatttaaatcctctgtaatgacacttccagctcccctcaagttcccaaaagaagctacaaggagaaagcgacgaaggttctgatcatctcagaaggatctttagccttatctgaatgtgggtgtgataggaaaagattgttcgaagttgggcctgagtttatgcatgctcagcccagccttccgaattactgaaacatgtggaatatggcttttgccttgtttttgtttccccttgtcacctggagttgctgtcacaaaggcagaatattgtttatgtattgatgacattttttaaccctttttttttctcaaaaaaaaaaaaa

SEQ ID NO: 53846 - DNA, 228 bp, Oryza sativa
  Clone ID: PAT_MRT4530_56006C.1
atggtggtggtggtgagaggattgaaggagcactccggcactagtgcttggaggtggtggcctcgtcgttggatcggtgcaaccatgatccaagtttggggtactgacaaccttgaattgcatgtgccccagcggatccaaccgctgacacactcaatggcaaaaggagggattaggctatcagtgcacttgacgaagatgaaggatggccgatgtgtgagaagatag

SEQ ID NO: 53847 - DNA, 463 bp, Oryza sativa
  unsure (1)..(463): unsure at all n locations
  Clone ID: PAT_MRT4530_56007C.1
gaaacacaacgacacagtagctcagcaaagttgaaacaaactagcagaggaaatccggctccagtttgtggttcagttcatcgatcacacagtcgtttttgtagtaactgtttagtcatgggaggcaagaagaggaaatccggctccagtttgtggttggccgtggcgtcttggttcgcgcgattgggctcaaaggtggtggcgagctctggctccgccggtggccgcgcagggtatgatgcggctggcgagatggtcagggcggctaaacatttctccagcgctcataagataaactttggttgagtacaatagtactcaagtatcatgtttttgtacataatagatttatatatgtggttttcgctttgactttattgtagcacaagtgtacatgtatagtgacaatgcattagatttggggttaaaagttgtttgcttggagcaaaaanaaaaanaaaaa

SEQ ID NO: 53848 - DNA, 124 bp, Oryza sativa
  Clone ID: PAT_MRT4530_56008C.1
aaaaaacagaccctcatccccaaattgacgacctgccgacattaaagcttgcagatgttgacaaattggaaccagcggcaaaggaccacatgatcccagaaggggtagattctccagaactctg

SEQ ID NO: 53849 - DNA, 968 bp, Oryza sativa
  Clone ID: PAT_MRT4530_56009C.1
tcactgttggatcctacttgggcttctcaagaccaatacatcttagctataggtaacatcgttgcccttcttcactcgtttttcagcaatcttccacatgaatggcttgaatctacccataccgtcatcaagcatcttcggccagtcaactcagttgccatgttaagaattgctttccgcatattgggtcccttgttgcctcgtctagcctttgctcgacctctgttcatgaagaccttggctttgctgttcaatgtgttgggggatgtatttgggaagaattctcaggcttcacctcctgtggaggcatcggaaattgctgacataattgacttcttgcaccatgcagtcatgtatgagggtcaaggaggtcccgttcagagcactagcaagcccaaactaggagatattagacgttaaagtgggaaagtaatggaaattctgtggccagatgtgcaacatcttctatcccacctgaagactgatccaaactcttcagtttacgcagctactcaccccaagttagttcaaaacccatcttagtattacaaggccatggaggagaactgacatatttcagtcggaaagatgggaggttgttcgaatgtgtttctagaaagcgagattctaattgccgctgcttgttaaatagaaaatttgcttgctccttatggccatcacaaattcatgaatgaaaattagcctgttaaatgaaaattacaagttcatgaatgttgtaaaatagaccagacctcatcccctagatcttgctggagggataaaggttgatgatttacagtagttgtaactaatagcttcattaggccgggatgtagattgagattgccctagtggttagagagagacattattctcccgatccatgttttcactttgtagctagcgttgttgtacatgaatgtaaaatacttgattcagaatttataacataaacaccgcattctatc

SEQ ID NO: 53850 - DNA, 708 bp, Oryza sativa
  unsure (1)..(708): unsure at all n locations
  Clone ID: PAT_MRT4530_5600C.1
gaagcagcagnagaacacgatacanactacaaagacggacgacggnaccgataatatatttttttttttttttttaataatataataaacccttaatntacttaatattatnaggcaataagccacacacataaattcagggtccgataaagatactaaaagcacaacccaaaaaaaagtacaaacattcaaaacttaaataaagacctaaataataataaaggcataataagcctaacaaaaatatcaccctaacaaaacaaaaacaaaaaccaacatagggttacaattcccgttcatcctccaatcccaataataacaagcctaataattaaatataaaatcacatcccaataatagtaagaatcatcaagagcaacataacaaagagaagcaaacccaccagatatcatcctatagagcagaagacagagcagccagaaatcatacgaatcagcccaatattcaganntaacacaccagagacagccaagcacaagcacaagaggcagaaacangcccccccaaagaagaccccccnaagaagaagagcccacacaaaatatatcaatccacccccaaagaatatacaaatatacaagccaacaagaggcccccccccctaatccccccaaagaagaacagaagacagagattctccacatagaaggataatccaacaataaaggcccaaaagaaattattccc

SEQ ID NO: 53851 - DNA, 3432 bp, Oryza sativa
  Clone ID: PAT_MRT4530_56010C.1
atggcgtcggcggcggcggagggggaggaggccccgatcgcggcgttcgcggtgtccaaggggggagtcgtgctgaagaacatcttcctcaacgcgcccccgtcgccgctgcctgtggaggaggcggcgcgggggcggggtggggaggaggaggatccgccggtgatgttcgggcggcacccggagtgccacgtcctcgtcgaccaccccagcgtcagcaggttccacctcgaggtccgctcccgccgccgccagcggcggatcaccgtcaccgacctctcctccgtgcatgggacttggatctcgggacgaaggatcccaccgaacactccggtggagctgacagccggtgatgtactgcggcttgggagctcgaggagggaataccggcttcactggctgtcgctcccggaagcatttgacatggaggatctgctgccaccgctgctggaggaggataaggaggagcttagtacttgtcaggaggcaagcaagcagttggagcctgatcaaaaggagtcagcggatactgagactcatcaggagacaagccaacaagttgtgtcagaacaaattgattttcatgctaatgtgattccctcagcaccacctatacctgagttcgctgatttatttgctctggaagaatcttcagttccagaatttgatgacagcagagagggaaggattgagggaaatttgattgaagagaaccatgttatatattctgttgaatcttcgattacacaaccaatgcttgccacagtggaagatgctggaagatcagtcaagtcaggcgaaaaggacacttcaaatgccaggaggtccaagttgaagtcagtcaaaaccctccgcattgagactggcagaagcaaggaaagaattactcctttgagttacagctatcagaaagaagaaaaccaaaatgagaatcctatatgttctcagaactgtgggatagaatgtgaagcctgcatggttttgtttaataattcttatgtcggagaagctgaagaaaaggaaaagatgaatatcttggacagaattatgatggaggagaatcaggaacagacaaatcatcttcaatccaaagaatttgtgcattatgttgcccctctgaatttggactatgaaacattttcagataatgaaaactgcgtgctgagtgttgctaaggagacagagcataatgatttcaactctgtgaattgtatctcacaagattcagtttgtgaaaatccacagaagatatcagaattattgcattttgtttcccctctggttttcaaaggcgatgacttcactgacagcaaaatcctacagctttgtgcttctgtacataaggagttgtctgggcccatcttagaaaatccattcatgcaagacatatctgatgaaaatacaaacagcaacaaagacacagggcatgaaggtttaacccttcttaacttggatgcaactctcacaagcaatgagaattttgctcaaagtaagatttttgtggctcctgaggactctgagagtgaaggcacaatcagtgagaatctatttgaaatttcgaacatgaaaggaaatgaagaaaatgaagagaacagtccatgggacaaggagaacatcaccccctttgtctcaggagatataatagtggagagaagtcagctaaggttgaagcccactaccatttcccaagaattgatggattccatttcccctcttaatttggaacataacgacttttcagatgatgaaagttccatattgagcattggagaacagatgaattcaaatgaacttatcgccaagaatcttatcccgctaacttcagttgatgcaaatatgcagaagagccatgcagggtttatgacaattgcacatctagatttcaaagatagcatccttacagacgaggaaacctcagtgctttctcctgaaaagtatgatactatatcccctgtgagacaaggaaacctgttcccagacaaagagaatgtgacaccagcctccagggatctgaagcccatcattggtaggaaggttcttggaccaagggtggataattcgctgtctgtagaatgcacttcaaaaaggaggatccatagacaagaacccaatgaattatcagcaaagtccaaagtttgtcacgcagtagatgatgatgttttctattctgataaggaaaatttgacacctatatcttcaggaggcattaaagcaaggagatgtcttccaaagagcctcacagtggatgctgaccaagatcaagaggccttctactctgacaaagagaacttgacgccagtatcttctgcttctcggaaaacaaaggatttgtctgaaaaccgtgcacgaatggaaagtactatcacaaagaaaagggtggttgataggctccccttccagacactcttgtcgaattctcccttaagacacactagttcacttgatagtacccaggttaatcctagagcagttgatgtggcaatgaagttggagggtgaactgaataatgttccacacaaaggacaagagtctgaaaagaccaaagaaggaatgaaagtctggaccatggtaactgatatggaatgtcttcttgatgatgaatctaggaagtccatcatgctgctaagaggcttaaaaggaactcaattggtcataccaatgattgtgatcagggagcttgagtgcttgaaaaagcgggagagattgttcagaatgttatcaaaggccacctccatgctccaatggatcaatgagtgcatggaaaaggagagctggtggatccatgttcagagttcaaccgagatgctgccagtagcaccaactccacctgcaacccctacagcgctatgcaacaatggagaaagagaaatctctgccggcaccttcaatccgatagccttgttctccccgagaagcttctcagatatcgtctccccgaaaacagaagatcgcgttcttgactgcgccctccttttcaacaaactaaaaggaaaccagaacatcgtcatcctgtccaacagcgtcacgcttaagatcaaagctatggcagagttcatgcaaattagagccactgaaccagagtataaaccatactccacccatttaaaattgagttcattgtgtttctgtcttattgaagggattcccttgcgagggagcaaaggaattcagggagaccctggtgaacccgtgctccagcaggttcatgtgggcggccagcgcgccgagaggttcagcctggtcgtgcctggacgagactaccctggaggagaactactacaacagccaccatggagccaggaggaggatcccaaggcccatggagcccgccaagggcctgaagctgatcctgctgcacaattctcactatgggcaggcgacgaacttcgtcgagaatcggccattggctccaatggcctcgtggtgaactga

SEQ ID NO: 53852 - DNA, 1818 bp, Oryza sativa
  Clone ID: PAT_MRT4530_56011C.1
atggcggacgggtggggcacggggaagggggacgtggaggaggagcggaaccagattatgcagaagatcttcggcgacgagtccggcgaggaggtggtggtggaggaggaggaggaggaggacccggaggagtacctggcgcacgacggcgacgatgcgacgagtggcggtgatcgcggtagcggcggcggcggcggggatgggggccagctgcaggaccgccgcctcgcgtcccctgcggcggaggtggtcgaggagtacgggttggaggacaacggccacggcggcgaccaatgggaggaagggcaaggtgaaagccaagggtcaagtggcatggcccaggaaattgagggtgactctcatgatgtggaacttggcaatcagagtacacaagttcacatgaaaggcgtgaatactgcagagggaggtcatgtcaagagaacaataaccagcgaaacaaggtcaacagagaacgaagaagaccatgaagttctccatgatgcttttgatgataacgatgaggatgggcttgctccatatggttctcgagatgacaataaacatgcccatgaatcacttatgaatgatgaaggcccctatgaggaattacttccagaggacatggttgatgaagataagcattatgaaccggatgaaaatattgaacatgaactgaaagataagccacttggtcctccgctgaatttggtggttccacgtatgctgccacctggtcaacctgacagaatgaatgtgatcaaggtttcaaatattatgggggttaatccaaaaccttttgatcctgaaacatatgtggaggaggatgctttgacagatgaatctgggagcaggaaaaagatacgcttggaggataatattgtccgctggaaaatcgttaagaacgctgatggcaccgaatctcgtgaaagcaatgcacgttttgtaaagtggaaagatggaagcatacaactgctgattggcaatgaagttcttgatatatctgtaaatgactcaaatcatgataattccaacctgtttctgaggaatggaaaggcaattatacaatctcttcccctgcctcttttatccattgatcatcaccatgttcataaactcacaactgactttttctcaggggcttatgcaatcacaaggaaggcttctacagaagatgagaaaacaatcaagatgcaaacatggattgatgaaaatgatcccgagaaagtgaaggaagaaagagaaaaggctgaaggagaaaatattcgagctagttcaagtcttcaacgaaaaagagaacaggtgaagcgcaaatacagtcagcctcttaggaaaaggcggaagcttaccccaggttttctggaagatgcattagaggaggatgaggcacctggtgttggttataatcagcgccgaggcccaggccatgcacattttgaggatagcttggaggctgaagcactttctaagagacacgtaactaatgcaaagaaggcaaatgtagggaaagctgttccttctcccagtgtacccaagcatcaggtgaatgagtattccaagagtgaaagtgaggaatcagagtatgaaacagatgtcgaggatatagataattcaccaacaaatggaagggaagatgacatggatgaagaggaagaagacccagaagaagtcataggtgatacttccatgtcagatgaaaataatgaggaacaagagcatgtaaaggagcgcaaagggttcaactctgacgacgaatctccaccaaggaaacagcctcttaatcgtagaaagacggttgtttttgacagtgatgacgagtga

SEQ ID NO: 53853 - DNA, 288 bp, Oryza sativa
  Clone ID: PAT_MRT4530_56012C.1
ggcggggcgctagtgtcgctgaggtacgcaccaaaccggcaagtcacaaaacggcaatggtgaaactccagcaggagtccacccttttcttttctgcatttccatccttccagttgtatcaggtggtggcagaaataatcagaaatatctgtgtgatccttaatatcaggtggtggcaaaattattgatacctaattgctgagtcaatgcttgttttatgtgtactctggaaattgccctactactaataaatggctgctttttatctaaaaaaaaaaaaaaaaaaaa

SEQ ID NO: 53854 - DNA, 376 bp, Oryza sativa
  unsure (1)..(376): unsure at all n locations
  Clone ID: PAT_MRT4530_56013C.1
ccgcataaaccctactagtgctaccatggcttaacccaaaaactaaaccgagtgccccgtgcccactgtcacacaatacagaccagccccccgtcaccttcgagctcgagccaagccaaacgatgtccgtcgcctccccgcaccatctccgcccctcgccgntggcgccggcatgccgtgctggcggcgtccccgcgcgcgccgcggnggcgcaccggccatggtgcccgcgcgtccgccgggccgtcgccgcaggcctcctccggcggttgnggcggcgaggcggtgacggtngtgagtgcggcggnggtgggggcgcccganagcgccgcgagggacacggaatgcagggtgntggtccacangattctgtgtt

SEQ ID NO: 53855 - DNA, 975 bp, Oryza sativa
  Clone ID: PAT_MRT4530_56014C.1
atggcggcggcggcggtgcggcaccgcgaggtggaggtggcgagcggggtgcggctgcacgtggcggagtcgggaccggagggcgggcccgtggcgctgctcgtgcacggcttcccggagctctggtactcgtggcgccaccagatgcgcgcgctcgccgcgcgggggttccgcgccgtggcgcccgacctccgcggctacggcgactccgacgcgccgcagggcagggactcctacaccgtcctccacctcgtcggcgacctcgtcgccctcatcgccgacctcggccggccccaggtgttcgtcgcggggcacgactggggcgccgtcgtggcgtggcagctgtgcctgctccgggcggacctggtgacggcgcatgtcagcctcagcgtggagtaccagccgaggcatccccggatgagcgtgctccaggccgtcagggttctctgcggggacgatcactacgtgtgccgcttccagaaacccggagtggctgaagctgaatttgctcgactcgatttaaaccatctgtttaaaatggtgtttggaatgcgcaaaccggcaactattattctaccccaggacaagacattctttgatgcaattgattcagatggtacttgccctccatggctatcagaggaagacatttcctactacgctgacaaattcggcaaaacagggttcacaggaggattcaactactacagatgcattgacctggattgggagctgactgcaccatggactggggctctgataaatgttccgataaaattcatcgtcggtgacctggatctcacatacaacacaccaggtgtgaaggattacattcacaagggtggattcaaagccaatgtgccgaatctggaggatgtggttgtcctggagggagttggccacttcatcaaccaggagaagcctgatgaggtttctgaacacatctgtgagttctttagcaagtttctgatgtaa

SEQ ID NO: 53856 - DNA, 279 bp, Oryza sativa
  unsure (1)..(279): unsure at all n locations
  Clone ID: PAT_MRT4530_56015C.1
aatataagctaagatgcggaggcggctaccccggtgggcagtgccatcacggatgctgcggcggctacggggaccacggcggctgccgccgttgctgcnctaccgccaactagaagagtactgccgtgtaccgnccctaggctcacaactaatggagtctcagacgatcgtccaacgtacgtacgtactgcctgcgccgaaactctcataaaaactactcatgaactanaccaagtgaatactgaataatgaaaatgtgtatgccagcacgtatatatg

SEQ ID NO: 53857 - DNA, 396 bp, Oryza sativa
  Clone ID: PAT_MRT4530_56016C.1
atggacctgaataatcgtggcagccaaaaacaattggaaggccaacagccatcgcgcttttgtactcatcaaacgaccgtggatagtagcagtgttgattttgttgtggatgaggctggactgaaagaaattggatttgtgccaaaccagcctaggggcgacccagacggcacccaagcagtagccgtccacccccttgttactctcccctgcctcgccgctgccagagcaggctgccggcaagccagtggggcacctttccttcctccctcctccctcaatgacgcgggcatctggcagtgtctggcgacggtgaggacagcgatgggggccaacgccgactgcggcggtcgacgacacgttggttggccggagctggaaatacatatacttatt

SEQ ID NO: 53858 - DNA, 129 bp, Oryza sativa
  Clone ID: PAT_MRT4530_56017C.1
atgtatgaggggagggagaagtcagaatttgggcagctgttcatggaggtcacgcagggggcggttcttttattcatgggcatgaagaactccattcccaagaggcaggccaagaataaggctcattag

SEQ ID NO: 53859 - DNA, 248 bp, Oryza sativa
  Clone ID: PAT_MRT4530_56018C.1
acgaggcggacaaagccggcggctcggcttgcacgtggacggtgagctacggtggtcggcagcgaagggggaaaggctgccgaggttccccacggcttggcgcacctaacggcggcgagggaaagcgccggcgacggttgaggaggcgcgacggcacggctggacgatggccggcggcggcggcggcttgctcggcgtggcggcggcgctacggagcacgggagagcacgggaaagggggcaaactaa

SEQ ID NO: 53860 - DNA, 237 bp, Oryza sativa
  Clone ID: PAT_MRT4530_56019C.1
gtggtggattcctaggcacccagtgactaggatgggcgtacatggcgcctgaacgctctggactgtcgtacttccgtgtcataacggttagtgaagcacaggtcaagcgctacatgaaccagttactgccaggactggagcattgacatccacgtggactggtacatcgcgacatcaagggtgccaatctgcttgtgaataatgaaggggatctaaaagcgacttgggaggagccta

SEQ ID NO: 53861 - DNA, 319 bp, Oryza sativa
  Clone ID: PAT_MRT4530_5601C.1
acagcgctcgccctttttttttgttgaatctaaaccaggggtgggttcggaacaccatatttcattgatccaggtcaaaacctgcacagaaatacacactaccgggacagatcttaccctgtatgcaatactcgtacattcatccacgcggaacacacgaatacgtgcatatatacggtacacgtgcggacatctacctggccgagtgcacacacttactctttggtgtagagacgatgatggaagccaacctaactaggttagctgaaggcgatgcgtcgtcatggcagcacagcggcggcggcgctcatttgccggg

SEQ ID NO: 53862 - DNA, 498 bp, Oryza sativa
  Clone ID: PAT_MRT4530_56020C.1
ggaaagggacagaattttaatcaaaaggttcttattagaaggggtggaacaaaaaagggtgcaacaccaaaaaccaagggaggggggaaccaaggtgggggcaacaacaaccacaggaagagggggggaagtcgacaggggcaatggtggacatggagggcaaccacaaaaaaattttaaaaagctgcgggggaccgggcaaaaaaaaaaaaaatgggggcagggccggaaaaatcggggaagggggcccaaagggggccggaggaacaacgccttggaccagaagaaaacaatggggggggaggaaccccctagcgtgggaaaaaaaaaggggtggggagcaacccaggcccaacgggggaataagggtggggcaaaacggatccagggggcccaaggataaggggggggggaaaaacgggctaggggggacagcagaaagggcctttgggggaagggcgctaaaggggaacaggcaaaaaaactgggggggaaaag

SEQ ID NO: 53863 - DNA, 384 bp, Oryza sativa
  Clone ID: PAT_MRT4530_56021C.1
atggctgatgtgagatcgagatgcaaggaaaggaaatcaggcacacgtgagcatgcggcagtaggagcagtggtacatgaggtgatgggacaatggcatggcgaagctgcaggcagaggagaagagcagcagcagcagcagcaaagacaatctgatcagctcatcgcagcattgcatgcatacaaagatttcagggtgacaggacgtacccatgctaccctgccctgcaatgcaagcagatcagactactacagacttttctcttcgccacttgatcagaattcagaacttgagatcagatcagacaccttggggattgttgatgtaatggaaaatgactggagtttggatccaaactttggatctgaacacaaccctagataa

SEQ ID NO: 53864 - DNA, 321 bp, Oryza sativa
  Clone ID: PAT_MRT4530_56022C.1
atggagttggggatagactacaagcatggcaagggaagaagaggggactaccatgccgcacggagctcgctagggtctcagcaattgcctccattgctcggagtgaggtggacaaccacgggcaatgagaaggaggggccggagaagggaacggccatctatcgcctggtccatgccattgccggctgcagcttcctccatgtcgccttcagatctgaagtgcccagcaaggacaagaactccccaaccccctcattgttgagcctcggcctcctagctcccctcatacctcccgctgcatcctcctcactctcgcaatag

SEQ ID NO: 53865 - DNA, 1644 bp, Oryza sativa
  Clone ID: PAT_MRT4530_56023C.1
aggcaggcgcgaggctccctccctcgaagaagtcccctgctgcccccccctctctctctctctccaccccgcgcggcggccgcttccgatccctctccgaccgaccaagcgccgcctccaagaatggggagctcggagaagaacggaactgcttatggcgagtacacctatgctgaactggagagggagcagtactggccgtctgagaagctgaggatatcgatcaccggagctggtggtttcattggatcccacattgctcgccgtctgaagagcgaggggcattacatcatcgcctccgactggaagaagaatgagcacatgactgaggacatgttctgccatgagttccaccttgttgaccttagggtcatggacaactgcctcaaggtcaccaacggcgtcgaccatgtgttcaaccttgccgctgatatgggtggtatggggttcattcagtccaaccactctgtgatcatgtacaacaacaccatgatcagtttcaacatgctcgaggctgcacgtatcaatggtgtgaagaggttcttctatgcctcaagtgcatgcatttaccctgaattcaagcagcttgaaactaacgttagcctgaaggaatctgatgcctggcctgctgagcctcaagatgcctatggtttggagaagcttgcaactgaggagctctgcaagcactacaccaaggactttggcattgagtgccgtgttggccgcttccacaacatatatggcccctttggaacatggaaaggtggccgtgagaaggcaccagctgcattctgcaggaaggctcagacttccactgacaggtttgagatgtggggtgatggcctccagacccggtccttcacattcatagatgagtgtgttgagggtgttctgaggttgacaaagtcggacttccgtgagccagtgaacattggaagcgatgaaatggtaagcatgaacgagatggctgaaatcattctcagcttcgaggatagggagctgcccatccaccacatccctggacccgagggtgtccgtggccgtaactccgacaacaccctcatcaaggagaagcttggctgggcacccacaatgaagctcaaggacgggctgaggttcacctacttctggatcaaggagcagatagagaaggagaagacccagggcgtcgacatcgcgggttacggctcatccaaggtggtgtccacccaggccccggttcagctgggctccctccgtgctgccgatggcaaggagtaatttcaaagctgctacaccatgaagatcaatcagctcctctcagcttgatcgtggccataccttacttcgctacagatagctcacagaaatgaattcttcttggaaatcttgcaacctttcagaacaacaacagccgttcttcctgtcgttataactcatatgcagtacaccggtttcttgtgtttaaaaagctatactcgagatttcttcctcttttttttttcgcgtcgtgttggaaattcttcgtatggattacattttgtcatatgaacaatgaaacaatgggaatgctctgcattacctttatgaatagatgatgtgttcttcctaaaaaaaaaaaaaaaaaacgcgagactagttctctcctgtgccgaatcgggtggg

SEQ ID NO: 53866 - DNA, 234 bp, Oryza sativa
  Clone ID: PAT_MRT4530_56024C.1
atggcgatggcgcggcacggtgatgggacggcgacgggcaagcggcgtagcgcggggctcggtgtggctcggcatggggctcggcgcggcgggggtagcggagagcggcgacggcgacgggcgcgcggcgatcagacgtcgatggcgatggacggcgacggcagctcagggctcaaggccagcaagggcggcacagcagtggggagggagagggctaggctaggacctcattga

SEQ ID NO: 53867 - DNA, 187 bp, Oryza sativa
  unsure (1)..(187): unsure at all n locations
  Clone ID: PAT_MRT4530_56025C.1
gaataaaccataagctttagctttgcccatcaacttctcatccaagccaactctcccctcctctagtaggtttcgcctccgccgacgccgaacgacgccgccgtcgncgtcgtagatcgatcgagcgggagtggcgaggatgacgacctcgcagaggcagccgcgcccggaccgcatcctggcacga

SEQ ID NO: 53868 - DNA, 2127 bp, Oryza sativa
  unsure (1)..(2127): unsure at all n locations
  Clone ID: PAT_MRT4530_56026C.1
atgggtacggccgccgaacaaaatgcagagcctgaagaacaagncaagtttcgtggagtgccgcggggaaacgccggcgtggggttcaacgaggggcggtggctgaccagggtgagggagagcatggcgaagcggccgtggaaggagctcggggcgccgccggtaaaggtgttcaacgtgccgagggtgctgaggtcgacgaggcccgaggcgtacgcgccgcaccatttcgccctgggcccctaccactgccgccgccccgagctgcgcgacatggagcgctacaagctcgccgccgccaagcgcgccgagaagctcttcgccgccggcaagaggttcgacgacctcgtccgccgattctccgacatccacgacaagatcctcgccccctaccacaggctgctgcagccgctgccgcgccgcccgccgcgaggccccgcggtccgccgccgcaccgtcatgaggccgcgccacagcgccgtccgccgccgcccgggcctctgcccgccggtgcgccgcggcgaggccgccggccgccggatctatcagtgggatgatggggagggaaggagaggagttagaggagagaagttagagaagaggaagaggaagggatgctgggggagggaaggagaggagttagaggagaggaggagaaggaagaggaagagatgggatgaagagataaggttactggagctgaacgagcagacgctggcatggatgatggccatcgacacgtgcttcctcctcgacttcctcgagagctaccaccgcgacgaggccaccgacatggtctcgtcggcggccaactggatcaacgccgtcgtgcgcgacgccatcatgctcgagaaccagatcccgctcttcctcttcgccgccgccctcgagctccgccacggcaccgaccaggcccaggccgcctccgccgccgccgacgccctccgcggcgtcctcggccgcttcatcaccgaggtgtcccccatcaagaccaccgccagcgccgccctcgccgtcgccggcgacgacctcgccaggcacgcccacctgctcgagctgctctaccacttcctcgtccccaccgacgccgtcgccgaggccgtcggtaacgagccgccgccgctcgtccccgaggacttctccgccgtcgacgtgttcgaccaaatgcagaaggagatccccgactacgacaaggtgaagcaggcgtgcgtgcaggtgtccagcctcgacatggcgccgatccggttcatcaagaagaacctcatctcccggccgatgggcctcgcggcgagcctcccggggaagctgatgcgcaaggtgccgctgctctcggcggtggcgccgctggtcgggaagctgtggtcgtcttcgtcgtcggcggcggacatggaggcgcggctcaagggggtgaacctgggcaccatcatcaactccccgctggcgcaggagctgatgatcccgtcggtggcgcagctcgcggcgtgcggcgtgcgcttcgccccggcgcccgagggcatcgccgggatcgagttcgacgccccggctgcgacgctgaagctcccggtgatcaccgtcgacggcaacacggagacggtcctccgcaacctggtcgcgtacgaggcggtggccgtgcgcgggccgctggtgctggcgcgctacacggagctgatgaacggcatcatcgacacggccaaggacgtgaagatcctgaggcagagcggggtggtggtgaaccggatgaagagcgacggcgaggcggcggagatgtggaacgggatgtgcagggcgacgcggctgagcagggtgccgaggctggacggggtgatccgggcggtgaacgagcaccggagcaggagggcggcggttcggctgaggaggatgatgaagcgctacgtgttccggtcgtggcgggtgctcacgctgctcgccgccgtcgtgctgctgctcatgacggcgctgcagaccttctgctcggtgtaccagtgcaaccgctggttcggcaacatgctgcagatgccgcagcctggagccgagtggcactatggtggctacggtggtggaggtgctacagcgaggggaactcagcatgttggggttcacggctatcagagaagcacggacatctag

SEQ ID NO: 53869 - DNA, 969 bp, Oryza sativa
  Clone ID: PAT_MRT4530_56027C.1
atgaactttcgaccacggaagccgccgaaagacggcagggtgttcgtccgcggtctcgccgcgggcaccggcgaggcggacctcctccgccacttcgatcgttacggggtggtggacgaagtctccatcccgggggtcgaggccgacaccctcaccggcctcccggccctccgcttcgccatcgtcaagttcggccacccggagttcgccggcctcgccctcgccgatcgggagcaggtcatcgacggccagacggttcatgttggaagagaagacccaagacaatcgggatgccatagttcaggatacaagcctctcaagcagagcactcgtcagattggtgaaagaaaacgccgtgttggggatatgattaaggtagtaattggcccattgccagaggattctttagaaagagggcttttgaagtacctaaaacaatttggatccgtggatgctggaatgctgatcattgattgtatcatcaaatatatctccagagatgggcaagagttaactgtgaagattgacaagtccaaaaatgcagcttggtcaacctgtgaagacactttccacttttctgatagacgcaagaacagcgatggcagaatcaaccccaatatctaccgtggattaataaataaaactcctcctcctgctgcatgtgcttactcctacaaccgaactggaggcattgccggaaaaaaatgcaacatccccaatggttcttgcaactatcctacatgccccaagtcctatcatggatcaattgtgaatcaaacacattttcctcatccggctgcatatgcttactcctgcaaccgaactggaggcattgcggaacaaatgtgcaacattcccaatggtttttgcaactatcctacatacaagttgaatcccaatttctatcgtggatcatcaattgtgaatcaaattccatttccttatcctgctgcctatagttatttctga

SEQ ID NO: 53870 - DNA, 3663 bp, Oryza sativa
  Clone ID: PAT_MRT4530_56028C.1
atggaggtgatggaggcgcgcgtcatggaagtgttgacgaagttggcggggaaggtggagggcatggacgtcatcaccaatcacttgggggagattgacgccaagctcgtcacgcaaggggagcggctggatcgggttcaagcgaagatggatctctcgattactttgttgggtcaggttcagcaagagcagtcgcgccctgaaggcgacgtgagagtgtggctggataactgtgaaacttactttgggttttatcaaatcgctgagggttttcaagtttctgccgcttctctgaatatgattggggatgccgctaattggtatcaagcatggaagttagaaataggtgtacatgattgggccactttgaaggcattagtcttaactgaatttgaggcatacttggtggctttggctcatgagtctgctctgtctggggctggtactaagaaggtgcatgttaagaaggaccatctttctgttaagaattatgataaacctaagttggcaccgggtgaattgtggaaggctcagcaacttaaggagtatcgtcgtgctcagggactatgtttcaaatgtggggataaatatgttcctggccatgtttgtgcaaagactgaacctgctcagttgaaagctattcagttgcagtccgactctgaagttctttctgatgacttgttggatgttatcactgctctggatatttctgagacttcttctcatctctctttacatgccttagctggcacttgcaatagtgatacaattcagttgcgtgctttggttcaaaatcaagtggttatcattttggtggattcaggcagcacacacagttttattgatgctggattgtgtgaccgactgcatttatctcctgatatgattcagtctactgttgtcagggtggccaatggtgatactgtctattgtacagctaaaattccccagtttacttggtgggttcagggttatgaattttcctttcctctgagagtgttacctatgggtgggtatgatgttgtgctgggtatggactggttgagtcaatttagcccggtgacatgtgattgggctgctaaacagttacagttctcttacaagggttctccgatttctttgcaaggcatgtcagtccctgattcaattggtcctgtcaatgaagtttctgctgttcaggtgttaaagtggaccaagggcaatgatgtttgggccgtggcagtagtggaacaatcttctgaggtgatcgctccctcctctagtttccctgaaattcaggctttgctgcaagagtttcagtctgtgtttcaggactctactactttaccacctcacagggtgttggatcatactattgccctggttccaaatgctgtacctgtgaatgctcacccgtacagatactctccagctcaaaaggatgagactaagcgtcagtttgttttagtcttcatggatgacattcttgtttacagtaaatcttgggcagagcatctccaccatctaagatgtgttttgcagttgctccaagaacatcaactttgtgccaaactgtcaaaatgttcttttgccacacctcacttagagtatttgggacacataatttcagctgttggggtagccactaaccctgataagatccaagtaatgttgcaatggcctgtgcccaccaatcttattgagctaagaggttttttgggactcactggttattataggaagtttattaagagctatggcattttagctaaacccttgacagtactgttacagaagaattccaaatttgtgtggtctgacactgctcagcaagcatttgatgcattgaaacatgctatgacatctgctttagtgttggtattacctgattttgccaagtcatttgttatagaaactgatgcttgctcaacaggtattggtgctgttctctgtcaagaggggcatccagtggctttttacagtaaagctttgggggtcaataaccaaaaattatccatttatgaaaaggagtttttagccatcatgatggcggttgataaatggaggccatatttgttaataggaccatttacaattaaaacagatcaccagtccttgtgccatttggatgatcaagtgctggtttctgaactccaaaagaaggctatgactaagttgattggtttgcaatataaatttcagtataagaaggggtctgaaaataagtctgctgatgctctttctcgagtgggtcatttcttctctctgcaagccatttcagtagctcagccagtctggatacaagtggtgggttattgcagcctcttccaattccttctggggcatggcaagacatttccatggattttattgagggccttccagtctccaagggttttgatgtcattttggttggtagatcgatacaccaagtatgcacattttcttcccttgaaacatcctttttctgcacttcaagtggttgacagttatttaagcagagtagcttctttgtatggcatgcccaagtcgattgtgtcggatagagacaagattttcacaagtcatttttggcagaatatgttcaaaaggtttgctatccctttgaatctcaccactgcatatcatcctcagtctgatggacagactgagcgtgtgaatcagtgccttgaaatgtatttgtgttgtgctattgcttctactcccactaagtggtcgacatggcttcctttggctcaatattggtataacaccagttttcactcagccttgaagtgttctccacatcgcgctctttatggtagtgatcccacttatggtattctgtctgctctacctgagtctactgatgaagctgtcactgatgcagatgtcctcctgagagagtgtgatctgttttcttctatgttacagcaccatttagctcgtgctgaaaatcacatgaagcagttggctgattctaaacgcactgctcgtcaatatcaagtgggggatttggtgcttctgaagctgcaaccttatgcccagcgttctgtggtttctcgcctatttcccaagttggctttcaagtactttggtcccttcgagattctggctgcgattgggtcggtggcttataaactcaagttacctgaggattgtctcatccatcccgtgtttcatgtttctcaattgaagccctctattccggataacaagcctgtgttttctctgttaccgactgctgctcagttggatattgctgaattacttccttcagagattttggactgggcacatggtgaaaaaggcaatgctgcggtggttcagattctggtgggttggggctctcttcctgctgctttggcaacctgggaggattttgatgttgttcgcacaagatttccagatgctgtcgcttggggacaagctccaattccagggggagcaactgttacgcctgtgccggatgagccacagtgaaggcgggattccgaaatgtgtaatcgagtagcagatacgtatgaaatgggtctgttgagtttagatgctaatatgtgggaccgggggttgttgagttgtgtgtaaggcgtatataacgctagcctgtaagcgcgagacaatctatcgatgaattgggtgaatattctccgtccctctatatggtacagatcccacttatggtattctgtatgctctacctga

SEQ ID NO: 53871 - DNA, 111 bp, Oryza sativa
  Clone ID: PAT_MRT4530_56029C.1
tcgacccacgcgttcttagcacaaccgatggcagcagaggccggttggtctctaaaggcgcggacggaggatatttacctccccttggatcgagcaggctcgtctctattt

SEQ ID NO: 53872 - DNA, 555 bp, Oryza sativa
  Clone ID: PAT_MRT4530_5602C.1
cccgggctgcaggaattcggcacgagggcaatcagaaatccagtaaatatctcatggttatcaaatcccatggcagttcgctatgttacatgtaatcaaattactgatgaagtattttcaacccaagtaaccatggcgacagtttcaaactttcagttcacctaagctcaaaagttcaaagggcagtacgactcaacattggtacagtacgcggagactaacaagccaaagtgaataatataaggttacaattatctggtagtactatctacgcactagactcagttctactacaaaaagacgtcaaggcaggcacttgggcaataacatcattctccagcatccacgtgagtttagctgcggtaaaagttcgcctgcattgtatggtggccaactgaccatcctgcacgcccaagcacttcgatgcgctgagcgcgttgattatggaatcatggaatggagagatcctgactaatttttgttgagtgactacggcttagccatcacgatttactggaaaataatgtggacagtgaaggacggcttccgtcagca

SEQ ID NO: 53873 - DNA, 537 bp, Oryza sativa
  Clone ID: PAT_MRT4530_56030C.1
ttccaaatgctgtacctgtgaatgctcacccgtacagatactctccagctcaaaaggatgagactaagcgtcaggtatctgatatgttagcagcaggactaatctgcccaagttgtagcccctttgcttctcctgtgctgttagttaagaaaaaggacaattcttggcgtttttgtgtggattaccgacggttgaattctgttactgtcaaaaacaagtttcctctacccattgtggatgagttgcttgatgagttacctggcacaaaatatttttccaaattggaccttcgcagtggttatcatcagattagaatgttggaagctaatgagtttaaagctgctctcaagacacatgatggacatttccaattgcgggtcatgccttttggtctgtccaatgccccagctacttttcaatatctcatgaattccatctttgctcttttttgcgcaggtttgttttagtcttcatggatgacattcttgtttacagtaaatcttgggcagagcatcttcaccatctaagatgtgtttt

SEQ ID NO: 53874 - DNA, 1518 bp, Oryza sativa
  Clone ID: PAT_MRT4530_56031C.1
atgcatgacctcatcgaccgccttgagtggcatagccacaaagaaacagaagctgggcaccttcgccagataaaggatgtagtgtacgatgccgaggacctccttgatgagtacaattattatgctctcaaggtgaaggtgaaggcgagcaagaatttagggcaagatcacttgcatgaaccctttttggagttcttgggcaatgttaacttcagtggcaaattcaggaaagtgatggaaatccaagaaagactgaagcatgtttttgaccaatctaacagtttaggcttgcacaaaacacccaagaagtttgacaaaattgtcagaccagagacatgtcatgtcctcgacgagccagatgagatttttggtcgtgaaaaagaactggaggacttgaaacaaaagctaagagtacgtggacacaagagaggcaggcctgtggcatgcaacactacagctgaagcaaggaggacagagttgcttgtgttgccaatagttggcatgggaggtgtcgggaagacaaccatggcccaacaaatctgtgtggatggagtggtgcggaatcacttcaacaactgcataatttggatatgtgtctcggatgaattcgaggtaaacaggttaacaagagatgttctgaagtctcttggagtaaagttacaagattctgatacaagggatactcttatggttaatttacgtgatagtgtcaagtcaaagaagtttttactcgtccttgatgacatgtgggatgatgtcttaaaagatgagaaaggatggagaacatttcatagaactttaagcaatggtcttgagggcagtatgattttggtcaccactagatcttccaaggttgctaacctagtcagcaacagtaatcactatgaactgaagggattgcaacatggtgttttctggaatttcttcaaactatgtgcattcggatccgtccagagttggagcaacagttgtcgcaacaggccagagctggagcgcattggtgaagctatacttcccaagttgaagggttcacctttggccgccaaaactcttggacacttattgaaaagcaacctaagcatagagcactgggaggacatattgaaaagtgagctatggcgattagaacaagaggagactgacattttgccagcccttcgactaagttacgtttacctgccacaggacataaaaagatgcttctcaatctgtgccatgtatccaaaggatcacaaatttgaaaaggattttctagcagatatttcggtagcacaaggttatgtggagcttgaaaatgcaccctcttgctttgatgaccttttaaatcggtcattctttcagaaagcagctggtgagcatggtacgtatgtaattcatgacttgatgcatgatactgcacagctagtctctaaagatgagtgcttcatcatacaacatagtctatcattctttgaaccacagtttcctgattcagaagaatcaaagaacgtttgtcaccttgaggtgctggaaatctga

SEQ ID NO: 53875 - DNA, 1485 bp, Oryza sativa
  Clone ID: PAT_MRT4530_56032C.1
gggctacaaacaagcgcgagtcttttcttaatcaaatggcagtcgtcctgccgcttcattacattacattacattcctaaacttgctacagaaaacaaaatagctttctcacacgaatccttaataacaaagataaattattttagcacacgatgtagcttattataatttgagcaagcagagcccagtaaacgggcccataaaaccataacagaagccccgggttgatcagcccagcatgacgggcctatcgaagatccagctgaaacgggccatggcgggctcgatgcgggccgccctccggtgggccagctcctccatcctccggatcttgggcgccaacccgcacaggtactcctgcgcgcgtcggccctcgccggagagccccgccgcgagctccgccacccgccacctccgcacgaagtgctcgacgaggtcgccgtagtccctcgccgtgtacacgccggcgcgctccgccacggcggagaaccgggcgaacaggctgtgctcgccgtcgccgtcgcggccgtccgacatgagctgccccggcatggtcaccttcccgcgcatgacgtccgccagcgcgcgcgccatgccgtccgggtcgagctcgaacagcctgccggacgccatcgtgtagcccgcctcgtgccgcctctcgtcggcggcgatcacgccgcagatcttggcgagcgcccggtcgccgtgctgccccgcgagcctcgccgtgtggccgtgggagatgaaggtggcgcgctcctggaacgcgccgtagatcaggccgtggtacgggctcgccggcgccagcatctccatgccgttgcggaggaggcggtgcacggtggcctcgacctggcgcatgtcgacgcggccggagaggtagaggtagcggttgaggaggtcgccgtggcggttctcctcggcggtccagccgcggagccagcgcgcccaggggagggggctcacgccggtgccgtcggcgaggccctcggcgcggttgcccatgctctggtacgtcgggagcgcctcctccgtcaccatgttccccacgaggcagaccagcacctcgtccggcacgccggcggcgcccgcgcgcagctcggccacgccctccgtgaacgccgccagcgcctcgccgccgcccgcggccgagcagggaaggaagtcgtgcggctgccacgcggagtcgacgggggtgagcagcgggagcatgttctcctccacccacgcgttcagcgaccgggcgatctccacctgctcccgccgcgccgacgccgccgtgtccgccggcgctgctgcggtggccgccgccgcagtccacaccggcggccgtcgtcccctagtacgtgcaggtgcagacccgtacaggccatggagaagaagatgcttgcgagatctgctgctgctggtatggatgtgatgattggggcagcagagccaggctgacgaggctgttgctgcaactgcgaggcctgaagacgccat

SEQ ID NO: 53876 - DNA, 345 bp, Oryza sativa
  Clone ID: PAT_MRT4530_56033C.1
ttgacttgttctagatcgcgagcggccgccctgctgttttattttattaggtgtaccttcccaccttgtccacatcctcgtcgggcgccggctcaccacctccaaggggaggtccacgacgccgcgcacaggaccgctacttctgatacaacaccatccgacgacgtttaaccgaataatacccaccacgtgctgtcacttcctgaggcggagctcatgggcgtgctcgactccggagttcagaccacccgcggcgtcgtggaccactgtcagcgagatcgctctgacctccagaccaaacggtgctcgagctcctcgaggccttcagggcaagaggagatgggc

SEQ ID NO: 53877 - DNA, 1042 bp, Oryza sativa
  Clone ID: PAT_MRT4530_56034C.1
gggtagatctcatctcttatttatcttttattcatttatttatgcatcatcacaaagacaagatgcatgttggcataccaacacagagacatgttcaagctatgcatacataccaacacgtatatgaacacaaagagacatgttcaagctatgcatataccaacacgtacatgaacacagagacatgttcaagctagcagagaatacgtacgatgagcctctctgcttgttatacagagaagtagttctcttcttagttgtgcatttcaggtgtgcacctggggcctgggtccccggtgaaggagtcacggcagacgaagagagggcgccacgaccacgagtccaccatctcgcactgcccgcacgcggcggcgcacgactccacctcgtcggagcagtggcagatgggagggagcgacttggtgcagacggcgatgtcgcagcacgggccccacggccactccgacgacggcgcgcacgaggtgcccgggtcgtcgccccagaagacgtcgtcgcagatgagcggccggccggggaacggccgccccggcggatcccggcacgcctcgcactggcggaagcactgcccgggctccagctcgtcgtcgcactgccagaacggcgggttgatcctctccggcagcctcacgatgttgtcgcagcacttccacggcctcgtcctccttcgcgccgccactgctccgtcgatcgggaggcgtatggtgttggtggtggtggtcgtggtgtcgtccgctgtgctgccgtgggcggcggcgaggccggcgaggaagaagaacaggatggaagtagcagccatggtgcgcttcatcttcttgaccttttgcacggacatctcgatgttgtcgcagcactcccacggtctggatttcgcctgtttgtttccatcggtttcgccggcggcgccgttgctggggaggcgaatgttgctgtcggtggtggtggtggtggcggtgacgatgccggcgaggacgaggaggaagagcagcatggaagcagccatcatggtgctcttcactttcat

SEQ ID NO: 53878 - DNA, 2533 bp, Oryza sativa
  unsure (1)..(2533): unsure at all n locations
  Clone ID: PAT_MRT4530_56035C.1
atgaagatcgcaaaaataatactaagtgcaattctttcctgcattattataggaggagtcgcgctaggatttacatatatttatatcaaacaaagtttgccagatgtatccacattaaaaacggttgaattacagcaacctatgcaaatctttactgccgatggtaaattaattggtgaagtgggtgaacaacgccgcattcctgttaaattagcagagataccgcaaacgttaattgatgccattattgccactgaagatgtacgtttttatgaacacaaaggcgtagatccaaaagggattattcgtgctgtatggcgttcaagccaaggtgatactcaaggcgcaagtaccattacgcaacaattagcacgtaatttctttttaacgcctgaacgtaatttagaacgtaaaataaaagaagctattttagcgcttgaaattgaacacgtgctaaacaaagaagagatccttgaactttatctcaataaaatttacttaggctatcgttcctatggcgtagccgcagcagcaaaaacttattttggcaaaagtttagatcaattaaccctcagtgaaattgcgattattgccggcttaccgaaagcaccgtctacgatgaatccgctctattccgttaaacgcgcagaaaaacgccggaatgtcgtattaggtagaatgttagaggtcggtaaaattactcaacagcaatatgaacaagctaaagctgaaacagttactgcgacgttctatggcactgcactagagtttcgtgctgattatgtgaccgagatgatccgtcaggaaatggtcaaacgctatggtgaagatgttgcttataataaaggctttaaagtttatgccacggtactttctaccgatcagaaagcggcgcaagatgcattaagtgaaaatgtaattaattatgacccccgtcatggctggcgtggtgctgaaatactgtggacaggtaatgcttgggatgatgaaaaaatcattgaacatttaagcaaattgccacattcagaaccttttattggtgcagcgattatcgggttcaataaaaatagctacacgattatgttacctaatggcgataaagctgaattgaaaaaagcaaatgcaatatttggcaaagaaattagcttacacttaggtgagcaaatttggatctaccaaggtaaaaaaaaggaatggttgttagggcaaattcctgaagtcaattcagcattagtttcacttaacagtgataacggtgcaattgaagcaattgtaggtggttttagttttgaacaaagccgttttaatcgtgcaacacaatcattagtacaggttggttcatcgattaaaccttttatttacgctgctgcaatgaataaaggtttaagcctttctacgaccttaagtgatacacccatcacgattaataaacaaggacaaaaaccgtgggaacctaaaaatgcggataaacgttacgaaggacctttacgtttacgtgttgcattaggtaagtcaaaaaatatggtcgctattcgggcattacaaatgtcaggtgtagattatgtagcagattatttaagtcgttttggctttaatccagatcagtttatggcaacagaagcacttgcgctaggcgcagcctcttttacaccgcttgaaatggctcgtgcctatgctgtatttgataatggtggctatttaatcgagccttacattatcgatcgtattttagataaccaaggcaatgaattatttaaagcaaatcctgcattggcttgtttagaatgtaatcacattgatttagcataccaagaaccaacctattttgatggtgttaaaattcacgatgaagatcaattaagagcagaaattgatgaaataaatgctaatccagcagccagcaatacgcaaactgaagatgatcaggaacctgaaattgcaaccacaattaaacctcaagcgccaagtttgatgacagagtctatcaaaaatgatgcaagtatgcgctacgcccccgcgggttatcaatggagagcttgccttcttaatgcgcaatgcgtttaatagtgcaatttatggtgaacctgggcagaatttggatggtacaagtagagccattgccaaggcgtttaaacgttaagatattggtgggtaagacggcacaacgaataattccaaagttacttggtatgctgggtttggtgctaatattgttaccacagtttatgttggatttgacgataatagacgtgatctaggtaaaggtgaagcgggagcaaaanccgcaatgcccgcttggattaaatatatgaaagttgcgctagctgataaaaaagagcgcatctcgccactaccaccgaatattattgaaactaaaattgatgctacgacaggcttcttaggcgatgatttaatggaatactttattaaaggcactgaaccgacaaaaaaatatattgtcgaaaaagcttatcaaattcctgatggtctgcaagaacaagaaagtcctagttctctaccggaaggaacgagt

SEQ ID NO: 53879 - DNA, 1477 bp, Oryza sativa
  Clone ID: PAT_MRT4530_56036C.1
tttattacccaaacaaaaggatgctaagcgaattcagcaataaagtcatatatgactgttgaatgtgagtttcaaaatttacatggagctaacagctaacagctcaaaaggtcattagaccttcacaaacaacgtttttaccaggaaggaacataacagaaggtgcaattattttacatgaaacaatttatgaaatgcataggaagaagaatgatggggtaatttttaaactcgactttggaaaagcttatggcaaagtagactagaggtttttataacagacgttgagaatgaaaggcttcttgccactatggtgtcagtggatagataatattgttagagggggtagtgtagcaattaaagtgaatgatgaagtaggaaacctctttcaaacaaaaaaaaaggcttaatacaaggggatctgttatcatcaatcctttttaatttagtggctggcatgttagcaatcctgattaggaagggcaaatggacgagagagctttcatagggtgataccacatctagtagataatgggttgtctatcttgcaatatgcagatgatacaaacatctttatgcaacatgatttagaagaagccaaaaacctcaaacttgtactaagtacattcgagaggttatcatgtcaaaagatcaactttcacaagagtgaattgttctgttttggcaaggctaaggaaggggataaagagtatgttatgttatttggttgcggttctggtaggtatccctttagatatctagggatcctaatgcatcataaaaaaatgtcaaacaaagactggctcgcaatcaaagagagaatacagaaaaaactgattagttggaaaagaaaacatctgtcgataggtggtagattagtgttgataaacttggtgcttagtagcctggctatgttcatgctttctttttttgaggtacctaaaggtattcttgagaagttgtactattataggtcatgattcttttgacaatgtgaagaatataataagaagtataggttgaccaaatggagcattttatgcaagccaaaggaatgtgggggtcttgggatacataatctagaactacaaaacaaatgcccgttaagcaaatggttatataaacattggaatgaagagggagtttggcacaacttactaagaaggaaatacttatcaaagaaaactttgactcttgtagaaaaaaaactaggggattctcattatggttaggactcatgattgttaaggacatcttcctttcttgtggatcattaaaagtgcacaatgagactcaggttagattctaggaggatcaattgaacgggaatgctccctttgctgctcgttacctggccttgtacaacctcttgataaacaagaatgaatcaatggcaggggttacgagtaaaaggcctctaaaagtgtcctttaggagggttatagcgggacataatttaaaagcttggttggaagtg

SEQ ID NO: 53880 - DNA, 573 bp, Oryza sativa
  Clone ID: PAT_MRT4530_56037C.1
atgagcatcgagtacgattacctgttcaagctgctcctcatcggcgactcctccgtcggcaagtcctgcctcctcctccgatttgctaaaatccgaaccattgaactcgatgggaagacagtgaagctacagatttgggacacagcaggtcaggaaaggttcaggacaataacaagcagttattaccggggagctcatggaatcattattgtttatgatgtgacagacatggaaagcttcaataatgtgaagcagtggttgagtgagattgataggtatgccagtgacagtgtatgcaagcttctagttgggaacaagtgtgatttggttgacagtaaggttgttgatacagaagaagccaaggcttttgcagagtcattagggatttcttttcttgagacaagtgcaaaggaatccatcaatgtggaggaagctttcttaaccatgtcgtcagacatcaagaaaaggatggcaacccaacctgccgtggagaggaaaccaactgtccatattcacatgagaggccagcccattcaacagcagaacagcagcagtagctgctgctcatcatga

SEQ ID NO: 53881 - DNA, 300 bp, Oryza sativa
  unsure (1)..(300): unsure at all n locations
  Clone ID: PAT_MRT4530_56038C.1
gtcgtcggaggcgttcctggtgaacttcaccgggnctggtcgtcgcgctgttcggcgtccgccgtcgtcgtggccgccgtcgcgtccggctcatcgtcgaggaaccccgagggctatgctccaagttccggtcaactagctatgtttcgcggttgctggaagtgatcattaataccacgaaatcaaaggtgtaaccagcagaattcatataccgatttgtttgtattcggtggactgatactgtgcgataattcaacactatccaggtaatttacggtttaaaaaaaaaaaaaaaaaaaa

SEQ ID NO: 53882 - DNA, 287 bp, Oryza sativa
  Clone ID: PAT_MRT4530_56039C.1
ggggacgcaatggcaaaaactttataacttttaatttttatttggaacttttcaactgtctcccgtttaccggaaaatccctttggccctaccggactccaagttgggtgtttccaccccctgtccaaggttgacccctgggattttactgtgggcttgaaaagccacctacgaaccctttacccccaattattccggataacgcttgcattctttttttttccggggtttgtggcacaaaattagcccatgctttttcctcaaatacccgcatttttttttttccg

SEQ ID NO: 53883 - DNA, 156 bp, Oryza sativa
  Clone ID: PAT_MRT4530_5603C.1
ggagaacagaactgcattttacctggttctattatggaggcctgccaatgcaatgaatgttactctcttcatcaaaggtcttaccgtaagctgcatgtttgcttccggaggatccagctttctccactccacttacgcagggaaatgcattcctct

SEQ ID NO: 53884 - DNA, 292 bp, Oryza sativa
  Clone ID: PAT_MRT4530_56040C.1
tcctctacatcatcctccctttttttttttttttaattaataacactataagagggtttttaatatacatgaaacaccccctttcctgctcaaattttttacaccatacttttatacattaacaccatactttatccatacatttcatactactcactttttaactttttcaccatataaactttttatttacaatctcatttcatatcaactctcattaacttattcacatactcaacccttctttactatactttaatatctattaatccaatcaattacaacatctata

SEQ ID NO: 53885 - DNA, 381 bp, Oryza sativa
  Clone ID: PAT_MRT4530_56042C.1
atggctttctatgtgaggctagtgctgacggcgagcctgtggatcctcttcgctttggctgttggtggggcgacgttgcatgccgacgagagcggcggagcggggaagttgtggtcagtggtcaccgttgtgttcggttggtcggggcagcccgactacattgatgcgcagccggcagcaccagaggaggagtggtcaatggtggtggcggcggggtggcccgtgaatgcaattttaatttggttcaaaattttggacccccactccaaaacccatggcgctgaacttagacacctcaacgccacgtcaactggcgctgaatgtcatgccaccgtagatgggagtctgagtcggactatccttcgggacagtctcgactag

SEQ ID NO: 53886 - DNA, 1067 bp, Oryza sativa
  Clone ID: PAT_MRT4530_56043C.1
gatttcggctatgcttggtgatgctgccgttcgcgagcattttaaatacggtgtgggggcgttcctcctaatggcgaccctactacttattgcttgcctccccacccggcgcccccatctctctttgcgccaaagatcctacaaactcgccccccgaataaccatggcgtcgtcttcgtcgtcgtcgccgccgtcgtctgacccgtccttggagacggtagcgccgcacgcggctgttacgggggagcggaagctcaaccccaacctgcaggagcagcttcccaagccatatctcgcgagggctctcgcggcggtggacccgagccacccgcaggggacccgtgggcgcgacgcccgcggcatgagcgtgctccagcagcacgccgcgttcttcgaccgcaacggcgacggcatcatctacccctgggagaccttccaagggctgagagcgataggttgcgggtatcccgtgtcgattgctggtgccatactcatcaacctcgtcctcagctatcctactcaaccggggtggatgccttctcctctgttttccatccatataaagaacattcacaagggtaagcatgggagtgactctgaagcatatgatactgaagggaggtttgatccatcgaaatttgatgctatattcagcaagtatggcagaactcatccaaatgctttgacaaaagatgagctgaactcgatgattaaagcaaaccgcaatatgtatgatttcattggctggattactagcgctggtgaatggatgctactgtacagcgtggccaaggataaagaagggctgttgcaacgagaaactgttagaggcgccttcgatggcagcctgtttgagcgacttcaggacagcaagaaatctgcttgaatatagcaatgagctgtgctgctcgaagaaagcgttgacagtaaagaatctaataagattagaaaaaaaaagggtctttgctttgtgtaattcaaatgaaaaatgttaattaccccatgacagtatttatgatgtttgcaatgatcaccacctcaaaaaaaaaaaaaaaaaaggggcggcc

SEQ ID NO: 53887 - DNA, 596 bp, Oryza sativa
  unsure (1)..(596): unsure at all n locations
  Clone ID: PAT_MRT4530_56044C.1
acncnanacncntnttctttaaactgaaaaaaatcaaataantcctcnccntncctcccantnaaaaaaaaaaaaaatttttttnttggccnccnccccnaaaaantggggcgaaancacacccncccnccctcncaccaccgccgaatctttttttattttcacaaatcccccccccncnanaaccncncgacaacgganacncccccccaacaacaacaaaacggatctcccccaggcggntntanggggntntatctccccnaaaaggtttcccaanccngcggttnccanggnaggcggccccaaagggcccccgggggnggggtctgaaaaggcgcccngtnccgcccttttttngctncccnnaaaccacaaaggaggcggngatggggggacccaacccnnctctcaaacngcctttntnngancccgaaaagatagggnncnctnttatttttttggnnaaancanaaatggttttttnncttccaatcccccccngggntctttttttancgcnccccggngagccccttttccntttnggntttccaccgggnttctgcccccttncntttatntttnncccnnnc

SEQ ID NO: 53888 - DNA, 221 bp, Oryza sativa
  Clone ID: PAT_MRT4530_56045C.1
tcgtttcgaattcccatatcagaatccgagggcttggggctcttctacgatcccccgcctccttctcctacttcatacgggatatttctcggtggcatctcgaaatcctcatccggtttttggtgaaggtttccgtggcgaggattaaggggtggtgtgttctttggagaggaaagaaaccggatcgtacgggtttgaattacaggggtaacaggaaactt

SEQ ID NO: 53889 - DNA, 166 bp, Oryza sativa
  Clone ID: PAT_MRT4530_56046C.1
atggcggatccacccacccccgagcttgcggcggcgtatccgtccaccaccaaggggtgggcgcaaggcggcagttctgcccacccccgagtgcacggcggtgaatacggcagctcctatgctcgtggagtagatctagccagcctcaagagagaaatgaagcgat

SEQ ID NO: 53890 - DNA, 1725 bp, Oryza sativa
  Clone ID: PAT_MRT4530_56047C.1
atgctccccttcgtccgctcactccgtaggctcggccctgccgcggccgatgggcgcctccttctccccctcgctccgctctcctcgaaggcggccgcgccgccgccggagtacgagatgccgtcggtgacgtggggcgtgatccaggggaggaaggagcggctcgtctcccgcgtgctcgcgctcgacttcctccgctccgccggcgtctccgaccccgccggcgagctcgaggccgtcgagctcccctcctccctcgaggtgctccaggagcggctcgacttcctcctccgcctcggcctctccaccgacgacctctccgcctacccgctcctcctcgcctgctccctccgcaagaacgccatccccgtcctctcctacctcgagaagctcggcgtcacgcgcgcgcgcctcgccgccttcgtccgcgcctacccggcctgcctccacgcctccgtcgccgtcgacctcacccccgtcgtcaagtccctccgcggcctcgacgtcgaccgccaggacctcccccgcgtcctcgagaggtaccctgacatcctcggcctcaagcccgatggcaccatcagcacctccgtcgcgtacctcgtcggcatcgtcggcgtggcgccgcgcgacatcggccccatggtgacgcacttccctttcttcctcggcatgcgcgtgggcaccaccatcaagcctctgtgcgagtacatcacttctctcgggctgccaatgcggatcctcgcgaggattctcgagaagcggccatacattcttggctatgatcttgaggagacggtcaagccaaatgtggaggcattgctcagctttggcattcgaaaggagatgttgccgctggtgattgcgcagtatccgcctattcttggattaccgctgaaaacgaagttagcagcccagcagtacttcttcaacttgaagctccaaattgaccctgatgcgtttgcctgtgctattgagaaattgccgcagcttgtaagtttgcatcagaatatcatactgaagctggtggagtttctccgtgggcgagggattagtaatgaggatgttgcgcggatggtggttcgatgccctcagattttgttgcttcggatggagctcatgaagaacagtctttacttcttcaagagcgagatgaagcgcccaataagtgaattgttagattaccctgagtattttacttacagtttggagtcaaggatcaagcctaggtacatgagagtttcaactaaggggattagatgcagcttggattggttcctaaactgcagtgatcagagatttgaggaaagaatgagaggggattttattgaaggcgatgcaccaggaccctcctttacaatgggagggaagcttcagatgccaggcagccagttagtgtcggatgatgataatgcggaaagtgacgatgagatttggtggaggataatcccaaagatctttcgtgatgtgctcctgacagcatcatgcacgcaagctataccatcattatcggtaaatagctgcctggttatttgcatttgcaaactgaaattcgctaaccacgcaggcatcctcaactgcaagatgaaaaaggctttggcgttaatggaacattctcacaccaacagaggtcattggagtgctggcctaagcaacagctcgaagggattaacaaaggtattgtacagaacattgttgaagaaaaactccaacaactcacccagttaa

SEQ ID NO: 53891 - DNA, 418 bp, Oryza sativa
  Clone ID: PAT_MRT4530_56048C.1
aattaatagaggagaacatggccaatatgagtaaaacatatattgccgctgaggccaattatattaggagagggagacgatacacacgctcatccgtatgcttttatcatgtccccacaactaatatgtaacaggcaactgtacgatgtatgcgcatcagcttcacttgaccctctgactgtggcgccagccgctattcactaatcaagaaaccgtggtatccgctgggaactcggtttgggagggaatcaactgccgccatatcaattgacatcggcgttgcatgactcacatagactgaacatttccctgtgtccctgctcaggtacaaggagtatatatcgaccactatatggttctcacagacacaccggcctacgtaagcccaaagatcgcctacaaccctgatttaccaagt

SEQ ID NO: 53892 - DNA, 873 bp, Oryza sativa
  Clone ID: PAT_MRT4530_56049C.1
atgatgaaacagacacaacaacagttcatgaattcattcatagagactcggcatgggagagttgttcaaaagtacaagttgaagctagttgccgatgtccctggaacaggttcttctaaagatggtgaggtgcaaaaaactcaagttagtatagatgattcgggtgataaaggcaccacaggcggctcaagcggcaaaggtgacggttttcaggaaggaatggttgaggatcttggtccagatggtagtggattacaaccatactttaacaatttccaagatcagattgactacgctgtgcaacatgctttgatcaatcaatcaggagtcttagtcaacactttaaccaacatggactacattctaaggtttagagagacaaggaataggtgttacagcttggctctaacagattcccagctagccgatttggctttccaaggtttgatagctccgattaaagaaaagttttcatcccaggagtttgaaagcttatctcacattgcacaagtgatgttgcatgagcaaaggtttgcagaggctaagaagaatttcaagaaaatcaatcatgtgtatccttacatgtatggatctgatgatgaggatgactccgaagtagcagaagtcgaatgggtcaggtgcaaaaaggttgtgccatgcccatgggtgaggagttctggaaaagaagaaagatttgattttgatatcaccaaggctgataagattttcgacttgttacttcgggataagcagattcaacttcctgctggtcatatcataccatcggctgaggaactaggcaaaagaaggtattgcaaatggcataattctggttctcactctactaatgattgcaaggttttcacacaatag

SEQ ID NO: 53893 - DNA, 507 bp, Oryza sativa
  Clone ID: PAT_MRT4530_5604C.1
atgggcctctcgcgtcagtttctgaatctgctcgtggacaatggcatccctagagccaaatctctgcactgcgtcaaactgacgcgccacaggttgttcaacacaacaaaacctactatgctgccactgattggagatggaaacgaaccgaagaacaataatcagtccatggagaagattgtgcttccgagaccaagcttcaacctgcaattactagggcaagaggaagaccgaaggagcgaaatgcaggaacagagggatgccaatgacgacgacaaggaagtcactgatgacgaagattattctatggacattctatttccaaaaagtagacaccgtgatggttctatatacaggggcatcatggatacatggtggaaaaaggaattgcgtattgcagatcgtaatgagatgattctagatggtatcgagttgtatcaccaatggactggaaaccatcccagccaactcctaccaaactactactaccaaactgatctcatctaa

SEQ ID NO: 53894 - DNA, 1617 bp, Oryza sativa
  Clone ID: PAT_MRT4530_56050C.1
atgtcatcctctgccagcccgtctgccgtgccgtcagccaagtatgctgagcatctgtccaatctgattgcgattccaagtctatcgcatgaggaacattatttcctcggtccgattggcaatctagaccctactgacttcatcatcggcaaaaccaatagaatcccctttagattagccaaccctaatctaggtcactggaggaacaccttcaagttttggccgtctctcgagaaaaccacccctgagaagagttggactacatggtacaagcgtgtatcggctagcaagcaaacacattgggatgaaattggaatcggtcaagcacttgccctcactatagcaaattcagctaaagatgaacccttaatggccgccgccacctacttctggtccaatactatcaacacctttctattcaaccaagggccgatgacaccaactctgatagatattactatgatcactggtctagatgtatcctcattggctaatcccatgaacctgaacaccaaaaaccaatacgatttcaggaccaaaagcatatgtggcctaatcagagaaccagccgatgcaggaaagaagagaagaaccaggtcatcggctgtggacacattggctccagccccaaagaagaaggccaaactcaagaagcctaaaccaaccgatgacctgcctgccctagatccatccattgaacaagctctggatgaagaagaaatcggcgaggatattgaccaagccgcagatgaaattttaaggttgcagaagaagaaaattgctatgaagaagaagtcggcagcaccaattcccaaaccggctccaccacctcctcctccttcttctcctattcagcaaccatcaagcgatcacactccatcggctgcagggagttatcatgttgaagaagaagtacaaccagctgctcctaccatcccagccttagcccatctgttctctttcgatattaaagattatcttgatgaagaaacagaagaagacactactagcaagtctttagctcccttgtccgataatgtgaagaaaacccttgaagacatctctcatcggctagaggcatcatcattagacagcttagtggtaaattgtgggccaattaggactcggttacatgaggttcaagccctaatcccagatgaactagccgatgtcctcactccggctgtctaccttgagcagcatcaggagaaagccaaactaagactagccgaacgtcgggagcgcaaggatattgaagccacaatccaagccaatcggcagcttgtgcacgaagagaagtccaagcttgatcagctatctgagggcccgatcaaatccaacattgatcggctcgaggctcacaagattgagctcttggcacaacttgaagaatgcaacaccgagctggatatggaacacaaaaagctggccgatcttccaaaatctgtcgaagaacagaaggcaagactaaaatcggctatcaagaatgttgctgatctcaccaagtctttgaaagtcattcctagaaccgacactcaagatgcccaagccattgaagaagtagaacaaatgaggcaaagggctatttcagctatccaacaatatttgtctcggtga

SEQ ID NO: 53895 - DNA, 519 bp, Oryza sativa
  Clone ID: PAT_MRT4530_56051C.1
ttaactctgaattttcagatggggaagtcctccatcgaacacggtgacgaacacggaaagcaaccacgtggcgacgaacacggctccgacggcagccacgagcggcactcccggctcccgcgatggcgatgccacggcggtcagtccgccgtccgcgcgctccggtgggcagtgccggcttgccgccgtcacagagtcacacacacctatgttgtatctcctcatcttgctcttgatctttgccccctcagcatcggcgaccgggggagcgagtggcacagtgccagttcttttgctagtctggtcgctgcaatcgtggcgaacgcctcggcgtccggtggcttctccgctggctccattggcgccgccccagacaccgtctacggcctcacgctctgccgaggggacgtcacgggtgcggaatgccagctttggttctccgagcaggactttgtctctgctgccagtaatatcccagagaagcaccaaaaagcgatttgccaccgcgaagatggacat

SEQ ID NO: 53896 - DNA, 2631 bp, Oryza sativa
  Clone ID: PAT_MRT4530_56052C.1
atgtcgtcctccgccagcccgtctaccgcgccgtcggccgaatacgctgagcatctgtccaatctgtttgcgattccaagtctatcgcatgagggacattatttccttggttcgatccgcaatctagatcgcactgacttcatcattggcgaaaccaatagaatccccttcaaattagccaaccctaatctaggtcactgaaagaacaccttcaagtcttggccgtctctcgagaaaaccacccctgagaagagttggacctcatggtacaagcgtgtatcgaccagcaagcaaacacattgggatgaaattggaatcggccaagcacttgccctcaccatatcaaattcagccaaagatgaacccttaatggccatcgccacctacttctggtccaatactatcaacgcctttctgttcaaccaagggccgatgacaccaactctgatagatattactatgatcactggtctagatgtatcctcatctgctaatcccatgaacctgaacaccaagaaccaatacgatttcaggaccaaaagcataggtggttggtctggttatgtggcagcatatatgggccatagatttgttactcctcgagagcatgtggcatttttactcatgtggctagaaaagtttcttttctgtggatccagttgtggccctacaaccaactggcagtttgcagccaaagctcttgagtcaaaaagagaatttcctctaggcaaaatcctcctcggctacttatacaaaatgttgaacaatgcatcggccaaaatagccgtcggctcggtggttgaagcaggtggaccatggtggctactacaatcttggctcaacttaatggtcatgaaagttgtcaattggccatcagtgacagaagccgaattcccaaggctggagccgatcacagaagatgatggagaagaacgcacccatcgcagatgcatgttatatggagagtatgcatccacaccagccaatgctggagcaaaactatcggctgaactgctcaaggattggttctgcagcttttatgaggactcagcagaccttgagctcccgtcagactttagattttaagatatcaatcataaaagataccaaaagtctagggaagttttctcagttgcaatcagcccatgcatcctttctatcggcattcatcagggaagaaacattcaagtctcttatgaattctatcacccaatgagctcagccagacaacttggaatgggccaactcccaatcggcttatttttcgccgataagatccagtgccgaggggaaatttcatcaaccttgatgatggatcgactgctcaatctccaaggacctcctctgggcagcattgagaatatcgagctggcgggattcaagagcaaaaactttgacatatggtggggtgaatggaagctgcatctattccaccaaccggcctcgatgtacatgacagatctcttccctgatgttgtacctcagacaaccgaatcttcccctccacatgaaagcaacagtgacagagacattgaatatgccccaggtctgattcccaatggaggtgggccatctcctcctatcatcggctatcatgcccccaagacttcaactcttctccaaggcctaatcagagaaccagccgatgcaggcaagaagagaagaactaggtcatcggctgtggacacattggctccagccccaaagaagaaggccaaactcaagaagcctaaaccaaccgatgacctgcctgccctagatccatccattgaacaagctctgggtgaagaagaaatcggcgaggatgttgatcaagccacagataagaagaagaaaattgctataaagaagaagtcggcagcaccaattcccaaaccggctccaccaatacctcctcctcctccttctcctgttcagcaaccatcaagtgatcaaactccatcggctgcaaggggtcatcatgttgaagaagaagtacaaccagctgctcttgccattccagccttagccgatctgttctctttcgatattaaagactatcttgatgaagaaacagaagaagacactactagcaagtctttagctcccttgtctgataatgtgaagaaaacccttgaagacatctctcttcggctagaggcatcatcattagacagcttggtggtaaactgtgggccaattaggactcggtcacacgaggttcaagctctaatcccaaatgagctagtcgatgtccttacaccagctgtctaccttgagcagcatcaattcaagctggagaaagccaaactaagattagccaaacgtcgggagcgcaaggacattgaagccacaatccaagccaatcggcagcttgtgcacgaagagaagtccaagcttgatctgctatccgagggcccgatcaaatccaacgttaatcggctcgaagctcgcaagattgagctcttggcccaacttcaagaatgcaatgccgaactggatctggaacacaaaaagctagccgatctcccgcgagtcgttgaagaacaaaaggcgaagctgaaatcggccatcaaaaatgtcgctgatatgaccaagtccttgaaaatcatccctggaaccgacgctcaagatgcccaagctattgaagaa

SEQ ID NO: 53897 - DNA, 342 bp, Oryza sativa
  Clone ID: PAT_MRT4530_56053C.1
cttgtgcacgaagagaagtccaagcttgatcagctatctgagggcccgatcaaatccaacattgatcggctcgaggctcacaagattgagctcttggcacaacttgaagaatgcaacaccgagctggatatggaacacaaaaagctggccgatcttccaaaatctgtcgaagaacagaaggcaagactaaaatcggctatcaagaatgttgctgatctcaccaagtctttgaaagtcattcctagaaccgacactcaagatgcccaagccattgaagaatttatgcatacaggggactcggagggcacagccaacaatcagtgcaggcaagacatagattga

SEQ ID NO: 53898 - DNA, 237 bp, Oryza sativa
  Clone ID: PAT_MRT4530_56054C.1
atggctgctcttttctcgggccacttctctatgtggatctcccaccctctttctcgtgtgcagctccatggtgtggtgcggcagtggaatgtgaccggggcgatggacggacatcttcgacagcttggtacctggtggcattgcgtggctttcatcgtggacgcggtgggcaaaagccttgcacaccttaccatcgctaacaacggcgacgcccttaggtgtcgtacaccttcttga

SEQ ID NO: 53899 - DNA, 130 bp, Oryza sativa
  unsure (1)..(130): unsure at all n locations
  Clone ID: PAT_MRT4530_56055C.1
gaggaaccccacagnnccacggaacagggagaagagacgncnngcaccaggcaaacgcccctggnnnatagngatgagagtatggattatctgtttgtcccctttaccatggtagtagagnactcaatgg

SEQ ID NO: 53900 - DNA, 303 bp, Oryza sativa
  Clone ID: PAT_MRT4530_56056C.1
cccccaaaaaaaaaattcaatttttttcagaggccgggcgggccaattcaaaatggcaaacctaacaaaggggaaaaaaagaaaacaccccccctggaaaccattccacacacttaaaggcccctttaggggggggaaaaaaagggaagcccccgcgatttttgaacaaagggggggaaaaaacagggcccccacactttactttttatccagggaaaaaaagatttgaatccgaagccgggccggggggtcaaaaaatccggggctatgccaaaacccaaaggcgtttcacgggcccccaaa

SEQ ID NO: 53901 - DNA, 750 bp, Oryza sativa
  Clone ID: PAT_MRT4530_56057C.1
atggcgctccgccgcatcaacctctggaagaatccgctcctcctcccccggccattctcctcgtcctcctcacccatcccgaccgctccgccggcgtcctccatcgacgacatccgtcgccagatcgagtccctcgccgcgaggggcgcccctcctggctcctccgccgcctcccgctccccaccggaacccggcgagggggaggggcgcaacccggagacctcgctcttccaggagatgcacgatcagatcccgatcgctccgtcgttccatcaccatcagggtgggcaccaccttgttgcatcggcgccgactgtcattgaggaagtagctctcctctttatgcggcacgatgtcaacgacaaagatgatgatgacatggtggaaggcgtcgggagagatgttgctcattgcaacgaggggctcgagctccagatggcgtccttgatctggcatggcaaggagcagcagaccaacatcagccacagaagtagcagttgtgcgttcttggcgttcactgagttggtgatagtgagcccatctctcgacttgctctctcctttcctaactgttgtggctgttgctacctcgatgttgcgtgcttcttcatggacccacccgcacccatgcctctacactcctgccgcgtgcagctcgatggccggcaaggaggcgggagaggacggcagtgccgacgtcgacgccgacgagatcgagcggggagatggcggtcgacggcacgacacctaa

SEQ ID NO: 53902 - DNA, 543 bp, Oryza sativa
  Clone ID: PAT_MRT4530_56058C.1
atggaaaagttaaaagtttatatcggtccagctccgctcctcattggatcgatcgagcgactggctgctaggctcttcatggtgaccgttcggctgtgggccgtgacgggacacgcacgcgctatctgggctgagccttcggcgtgtacggacatgccgggtagcttatgggccgtcccgctgccacgtgaacaaccatgtcgactaaaatcactctcaaagcagtttcttgtgagtggtgatatacccaattttacagctgagtgctccctgtccggctatcgacgctccgcacgtcgcttgatgggacccgagatgcgcgaggaggtcttacagcaggcaatccgacagatcactgagttggtcctcctccacggcggccccgtcactgtctctaccgccttcgtcgatgcgggaagaagattagatgagaaggaaccgcttcccaaaccaccaaaagagtcaatttacaccggtttgcaagatgagaaagacgttataactggttttacggttgagccaagggattcgaacaagacgtga

SEQ ID NO: 53903 - DNA, 444 bp, Oryza sativa
  Clone ID: PAT_MRT4530_56059C.1
ccactccggcggtgtaaggcccagtgcgtggccacggcgcacccgcggcgccgtggacgagcaaactccggcaggactctccggcagctcgcccgtcgacgacagctggtgccagtgctcggcgctcaaccacatgtttggaggcatctacagggagctcggcgccaccgatgttggcaccccatgccgaggtgttccccggctgccggagaggggacttggagcgcgcggcggcgacctcccggcgttctgccacgtggacatccccaatggcacagtggtgtcgctactggttagttatctagaccccgagaactgttcattaggctataaagctagctgtgtgtagactctgggttgctaaataattagtgctttcatttcagaagcatataacatatggtgatccatctgactcatgtcttcggaataaaaaaaaaaaaa

SEQ ID NO: 53904 - DNA, 762 bp, Oryza sativa
  Clone ID: PAT_MRT4530_5605C.1
atggcgacggcggcggagaacaagaacgagccggcgcggccattcgcggtgccatccccgtcggtccacccggcggcgaccggcgtgggggaggaggaggaggcgcaggcggcgacggggtggcggtccatgcagtacctccggaagcggcggcgcgcgctctgctgctgcggctgctgcgtgaccaccctggtcgtcgtcggcctcgtcatcctcgtcctcgcgctcaccgtgttcagggtgaaggacccccgcatcaccatgaacggcgtgtgggtgacggccatcagcaccggccccggcaccggcgccggcatcgggagcaccgtggcgaccaacgcgacgctcaccgccgacgtctcggtcaagaaccccaacgccgcgtcgctccggttctcccggagcgagacggacgtgtactacaaggggaagacggtgagcgtggcgtacgtccccgccggcagcgtcggcgccgaccggacggtgcggatgaacatcacgctcgacctgctcgccgaccgcctcgcgtcggtgctcaacggcacggggctgatactcgggcaggagtacgacctgaccacctacacggcgatgagggcgagggtcagcgtgctggggatcatcaagaagagcctcgacgttcggatgaactgctcggtcatcttggacgtcgccggcatcgccggcgtgctgctgcccggggacggggccaagtcgggcgtgcagactaggagcgtggattgcgttgcaatcgtgagctga

SEQ ID NO: 53905 - DNA, 684 bp, Oryza sativa
  Clone ID: PAT_MRT4530_56060C.1
atgcgggacccacgggtcagcgacacaacaggaggaggaggtggcctggcgggtgggccccaccaggcggtggttcaaaggggaggaggaaggcgccagcctggctcggctcgacttcaagccgaccggctaagcatggcgagcggcggcggcatgcggtcgccggcgacggcaaccggcggcgcgggaggcggcggcggacagcgcggaaggcagcggcgtcggccgaaggtgacggcggtgcacgcgcggagaacggcggtgcacacgggggaaagggaaagagggaggagaggggaacctcaccggcgggtatggcggccggagcggaaggcgaaggcagcggtgatgatcggcgacgcgaagggacggacgggcggcgacggcaccctaggagagagaggagaggggttagggcttgggaggaaacccgcggcgaccaaaaatggccagccagagatggagagaatggaggggaagctctggaggagtgcccggaagtttggcgctcatctgacttctacctcggtacactctgctccgggttcagagaacttcttctataaagatatttcatgtaatttccttagagatatatttgggcaagagtttgctacaaagactaatggtatcttagagtttgttagagataagagtcgtgtccgacacgaacatattttgtaa

SEQ ID NO: 53906 - DNA, 603 bp, Oryza sativa
  Clone ID: PAT_MRT4530_56061C.1
atggctaaacttcttgttgttgtgctgctactatctcttctcatctatgcggccacagcatgggatgccgagagcttcttcaacttcaagagttgtccaccaaatcagtgcagcaaacatggaccaaaagtccggttcccactccgccttgcatcacaatctccgtcgtgcggcacacctctcatggagttatcatgttctggacaggacaccatcctgtatcacccagttctaggctcctgcaaggtgactgcaatatcttacaagcatgctgccatgtccatcatcctgcttgtagattccacacctcactgcccacttcagaagctcatctcgacaaatttatcaactgatgtgtacaaacctcaaaaattggaagctgcaagcttaccagactgcaaagttgttagtaatggcatccaggcaccctcaacttttaaggaaacagaaaatggagtaatcggtgttgatgagttggtattcacttggtactccagtgacataaccagagattgtcaaaaatgtgaaaatgaaggcaaacactgtggtttcagctcacaaaggggccgagcattctgcaattatggtattttctctttctga

SEQ ID NO: 53907 - DNA, 711 bp, Oryza sativa
  Clone ID: PAT_MRT4530_56062C.1
cggaaaaaaatcttcaacagcactacagaaacatggctaaacttcttgttgttgtgctgctactatctcttctcatctatgcggccacagcatgggatgccgagagcttcttcaacttcaagagttgtccaccaaatcagtacagcaaacatggaccaaaagtccggttcccactccgccttgcatcacaatctccgtcgtgcggcacacctctcatggagttatcatgttctggacaggacaccatcctgtatcacccagttctaggctcctgcaaggtgactgcaatatcttacaagcatgctgccatgtccatcatcctgcttgtagattccacacctcactgcccacttcagaagctcatctcgacaaatttatcaactgatgtgtacaaacctcaaaaattggaagctgcaagcttagtaagttgttcaagagatttaccaagagatcagcacggtgtagttggcccaataacttgcctcagtaacaacacaagccagtggtatttgatacatccttatgcatattgtctgttcttcagccagactgcaaagttgttagtaaaggcatccaggcaccctcaacttttaaggaaacagaaaatggagtaatcggtgttgatgagttggtattcacttggtactccagtgacataaccagagattgtcaaaaatgtgaaaatgaaggcaaacactgtggtttcagctc

SEQ ID NO: 53908 - DNA, 208 bp, Oryza sativa
  Clone ID: PAT_MRT4530_56063C.1
cgttcaacgtttttcttggcgcgacactagtacgatggaacaaaaagccagcaacctactagatgcgctgcataagttaagtactctatctaagtccagacgatgaatgagggaattattattattagcctttacccaacctgtacaatccattaagagagagtatatcccaaggcgatgcttcgttccttctaatttttcaaaagtg

SEQ ID NO: 53909 - DNA, 192 bp, Oryza sativa
  Clone ID: PAT_MRT4530_56064C.1
atggcggatccgcaagccgtcgccgctccagagttcggcggcggcggatccaacctctgccgccgcaactctcgagttaggcgaaatcgcaagtttagcaccctgtcgaacaaccgcggttcgacagggatacctatcgaacaaccacagttcgacaggtacatgtcgaactgcgtcagttcgacagggtag

SEQ ID NO: 53910 - DNA, 1572 bp, Oryza sativa
  Clone ID: PAT_MRT4530_56065C.1
atgtcgagaatcagacttatatatgaatgggccaagaactctgaattgacacgggttggcggtggacggtggattgcctccctatggcagttggaggatgagaggtgggccgctgatggtgacagctcagtacgggtattcctccgcacggctcgcatcttccaagtctgccatttccagtccatggcgaagaccgctctggcgacggcattggacatcgccgagctccctttctcggatcttctcctcctcatctcaccggatcttccggacgatggccggcgcggccgtctcctcaccaccgtcgctacctcccttggtcgcggcgggtccggtttgcttgccatcaccaacgtgcctctcgcagccgccctccgccgccggcttctcccgctggctcgccgccttgccgtcatggaccacccctcccgctcccagctcctcaagaagcacggtttgggtagcgacgtgcctctgaagaagctggaccggcgcgtttcctcatttgcgcggcttttgcgtcattcaggtgagttccaattgctggagtcgatgaaagaaatcgagagcatcaagaacgaccctgattatctggagaaagctttggatggtgttgtaattggggaacccatgggcgatggtaccgagaagcttggtgagctcgttgaggagcttggtctttgcatgatggaacttgggattttggttgcacgagcctgcgacactgttactggtggaaatcagttggagaaaagcattactgactttgggaccgcaaaggcaaggctcattcactaccactctgagttggataacattattatcaagaatagtagcagcaagagaaaagttccgataaataaaatcgcaaaggcaacagcttatgagtcatgctctcgaaggtctgcatcatcacaaggatcctgtatcagatcagaatgtgctatgacggacacattaaaggattccaatgataagtcgattcatggtcagggtagtgttgtttctctcacaaacttatggcaagagtggcactatgactatggggtccttactgttttaacagcaccattattcttgtgctccacaatgggagaagattgttccatcaacaaagaatgctctcctcctgacgagcacacgtacttgcagctattcaataggaggaaggtattctcggtgagatgctctccagagagcttcattgtgcaggtcggggagacagcagacatcttgtcaggcgggaagctgaggtctacacttcatgctgtgagtagaccatacggctcaacaaacatcagccgggaaacttttgtggtcttcttacagccatcatgggacaaaaagttgccttactctggtcactgttttgctggtgatgatgaacctagtgaaggcgatgactcaacattcagtgatggacaacgaaacagtattatggtggtggaggtatccaacaaaacaattaaaaagcagtactatggtgttccatgctcatcatctcaagtcatggagaacgtctttggacattttattatttggcactaccgcaagcaccagacaagtccataa

SEQ ID NO: 53911 - DNA, 507 bp, Oryza sativa
  Clone ID: PAT_MRT4530_56066C.1
cccacgcgtccgcccacgcgtccgcccacgcgtccgcccacgcgtccgaatggatcctagccactacaagggcaaccatactatgttccagtctctcagaagggatattggcagtttgagatgggcgatgtcctgattggaggaaagaccacaggattttgtgctagcggttgttcagctatagcagactctggaacatcattgcttgctggccccacagccataatcactgaaatcaatgagaagatcggtgctactggggtagtcagccaagaatgcaagacagttgtttctcaatatggacaacagatcctagatctgttgcttgctgagacacagccatcaaaaatctgctctcaggttggtctgtgtacttttgatgggaagcatggtgttagtgctggaattaagagcgtagtagatgatgaagctggggaatcgaatggtctccaaagtggtcccatgtgcaatgcctgtgagatggctgttgtatggatgcagaaccaa

SEQ ID NO: 53912 - DNA, 219 bp, Oryza sativa
  Clone ID: PAT_MRT4530_56067C.1
atgagccaatgccagccagatctgccggcagtcaaagtggcaggggcgactagcgataactgtaatgagtacgacgactgctacaacgactacggttgtagcgagcacggtggtggcaacaacgacgactacggtgatggaggtgttgacgttggcatagtccaaggagttcctcaaaaccgtcaaggaggaggcggcccagataaaagtaacccgtga

SEQ ID NO: 53913 - DNA, 1764 bp, Oryza sativa
  Clone ID: PAT_MRT4530_56068C.1
ggaggaagaagagtcatcgccccgccgccgccaccgcccccgccctgcgcccccatcgccaaaccctaaccctagcctccaatcgagtaggatcgagcccggccgcccgccggaatggcggagaaggggaaccgattcgctctcctggagcacggctgggacctctccggcgacatggccgtcgacaacatcctcgcgtcccagaacgtcggaacccagctacgcgcctaccctcctcccatcaagtacttcgaggccttgctccgccaggagcacgctgagctgctggaatatgtcgacgacgtagatcgcgtcgtcgcgctgctcaagccgctgccgccaccaaaaactgtcagataccctgttctttttgagcgagcgtggggattcggcagactatttccttgcgatgtgacggatgagtctcctcagtatcatgcctacctccaggaattctacagacgcaattgcagtgctcctccatctgttgctgccgccatctcgctgtgtctgaagaatgagcgcatcttgaggtctgagtggcagaatcgaggtgtccaagtccacccttacaacctcagcctcagtgacaacattctagaatgcgcttcaaaccttgtggacaagatgaacgccgagtctgctactgtcgcctacgctgctttatgtgtcgccaaggaggctgagctaatggttcagcggctgcgtctaggagatcgcatctacgtgcactacagtgatcgcaacctgagtacaaggattcggcatgaggctttgggccttatggctggcacgggacctacttcttcatcggtcactgaccctatggttcattctgcacttttgggcatagcgagagaagctgaatggtcgtggaagatcataagccacaaggatgttggccccttaggagacagaagaagcgaagcaatcaggggctctgccctgtgtatcataaaggacgaattggatgaatatgctgccgcagctgccacagctgctgacttgagcagtgaaccttttgttgtttggcaacggaatatgattgctgtcatcgaaggtggctatcctaactggggcactactgttaagaaattggattctgcagtttatgtcgctgaagactattccaaagactcattagataatatatttgacgaggatatgatgagcaagtacatcaatggctctcacaagaggaagatgaaaaaaccgaggggaaagaattcactgaaggaagaactgaagtacttcaagaaagatattctttagttcttctgagcagaggaaagggatagatgatgcataggcatatttggaagcaatggttgtcgcggtcgcaagcactatcctacgatttcctaggagaaattgtctttcttctgaagatgaggaaaggtgcatcttcattgacttttatgttttcctgcaaagggtgaattgattggttatgtctagatggaaaatctgtgcgttctctttctttctttttcacaatcaagaacttggaagagcgttttttgttttcctagtttgcaaaatatcatgtgtcattttaataacaaaatgaaatagatgaatccttctgccttgtttcaataaacatgtttgccttgtcattgtgatgtttctaagatatggcctcaagatgtaggtatcatgttctttccacactgtcctttctcatgtccttgactagataactatactaatttcatgtactaattgctgcagggatagatgatgcataggacaaatgggaag

SEQ ID NO: 53914 - DNA, 554 bp, Oryza sativa
  Clone ID: PAT_MRT4530_56069C.1
aaataaaaataaaaaaaaaaaaaaaaagaaacgaaaaaaaggaaggaaacacaagaaaaaaaaaaaaaaaaaaaaaaaaaaaaacaagaaagaaagggcaggcaaaagaaaaaagccaaaaccaaaaaaaaaaaccaaaacaaaaaaaaaaacaaaacaaagaacaaaaggcacaaaaacaaaaaaagccaccaaaaccaaaaaaaaaaaaaaaggaaaaggcaaaaaaaaaagagaaaaaaaaaaaaaaagcccggaaaaggaaaagaaaagacaccagaaaaagagcaaggcgataaaggagaaagacgcaaaccagccacaccaagaaagagcaaaccccccccacccagaccggacaccccaaccagaccggctgccccaaaaaaaagaacactctcggaaacaagcccagggccggggaaaaaaacgataccggggccaaaaaaacccgtgccagcgcctttccccatccccgtgcccatccctgtccccgtgccgggcccggggtcgggccctttcccaagaacgggcactatccccctacctagaaa

SEQ ID NO: 53915 - DNA, 244 bp, Oryza sativa
  Clone ID: PAT_MRT4530_5606C.1
gtaaactgaatttctccatttggttctctctgaacgaacaagagaatttgttttgtctgcattgaggctgcatttctgcattgaccatcctagttgggtttctgttgctggttatgaaaccttatgtagttatgcaacgtaagaacctgttcggaattttggaggcgaagaatcacgaataggaaaatttcctgaatttgtatcgttgtttgcttgagccatatttatgttacattttctgccg

SEQ ID NO: 53916 - DNA, 261 bp, Oryza sativa
  Clone ID: PAT_MRT4530_56070C.1
atgtcgctccttgtccggtgcaagctgccccgcatccgtgctggcccccctcccatcgcttgcctcgtcacgccccatggtcgtcgcctgacgcctgccttcatcgcgccctacctcattgcgcttggccaccactcgccgcgcctaggagcggccaccgtgggaagccccacaaccgccgccccaccggagactcgccggagcgccgtcccacgctcgctgccgccgcgcacatgcccgaactgctgccgccgtctatag

SEQ ID NO: 53917 - DNA, 193 bp, Oryza sativa
  Clone ID: PAT_MRT4530_56071C.1
ccctgaaactgatacccaatttcaatcacaatttcacaacacacaacctagttttcttggtctcttgttgcattcgcggtgaaaatgaccctatgatagactaaattccatcgctttacatgaccaaaactagggccaaaactgcccacacaagagtacagatagaccaaaatcatttctcacacaatatagc

SEQ ID NO: 53918 - DNA, 1910 bp, Oryza sativa
  Clone ID: PAT_MRT4530_56072C.1
gtcgtgtgtttccttgcttgtataacagcaaaagacttagatctgttaaggtcctatccttagtttctaatctgtctctcccctttgttttccctctctccctctccaaacctttgcaaagatggctgacaatgagaaaggcaataaggtcagaagtcaggacattggtacctcaagctcccgagtgaatgaagcaccagacaccagttgtgcggcagtggtccaacacctgattaaccagaacaaattgcttatagagatactacagcagcatcggatgccgattttgaacccgagtcagatgcaaccctcaagtgcagttggaggcagtccaagcattcacaccacaagtcagcgcaccgccaacatcccagaaggcccctcatgccataccacatgttgacccaaaagaagcaagtatcatctgttttatgtgtgatgagcaagggcactatgcaaggaactgtcctcagcagaaaagaaaagcaccaatgcgaaccgaagatgaagtccgtaagatgatcattaccagcacagaatggcctacaccaggaatgacaagacgtcagagaagaaataccttccgaggtgcaccacagttgacagagcatcttttagctaatggaggtagagtgtctgatagtgaagattcagatcaagtctcctcagatgatgaaggtgcgaagtctccccaaggttttaaccagaataaaatagaacttaaggcatgctctcgttgtggagaaatcggtcatgttgccagctcgtgtgcctctgcatgcgttcatggtgaggaaggccatccacccgacaggtgtccaacgagcaggatcacttgtttcttttgtgaaggaactgatcacgtaccaaaagattgtcaattcagttttctgctgacgaagaagatggccaaccaacccgccagttccaacggagagaagcatcaaggcaacacaaatcctcgccaagattccagcttcagcctaactccagtgccaggatagaggaaacaaaatgagaaaagaaaatgccgagtccgggaagatatctgttgcttcaattgtcaaggaatgggtcatttcgccgacaagtgcccaaaaccgagaaacgtagctgccagcacgtcagtccacgcaaacccccgcaatcagaagcttgctcctcaacgaattgtcatccatgcatcccgaagcagtcctataacccgcgttgcaacagctccaattccaatgagtgcactaccacaaggtgtcaatgctcaatttcagccccagccaccagctgacaagacagaggccagtatctgcgttgtacctttggaagttccaatacagcagctgagaaatcaagtacaagatgaagaacccgagaagaagggcattactccaaaaactgtccccaaccaaggcaaaatcgacctccacattaccgccaatttacacgaagcagacattccaatcgtattgtggtcactggagcaaacgccgtaccaaggagtgaaatcttcaactcggtatcagatgctacacggagtgaaaagtgcaggcaccggttaccaggcaatgccatgtcttggaagatgatccaatgggaaggaactcatcaaggtcgaaggtgtaaaggaatacgttgaatgctaaatgatgacaaccatgatattcttatgatgacaaacatgtcaaagtcagctagaggtgcaaccagggaaaagtcaggtgaagagaagattccatttataacaggagatcgagccaagcactccagagcggagaagttttgttacgcaagtttgttatagaagacggagcggaagaagtcagtccagaagagaagacatcccaacctatattcttgctagcgttctcgaatctcggggacgagattccttaaaaagaaaaaccttaaaaccc

SEQ ID NO: 53919 - DNA, 4029 bp, Oryza sativa
  Clone ID: PAT_MRT4530_56073C.1
ggccggcctggtggtgtgcgcggggaggagctgtggggtggtggactgggctagctggtggctgagaagatgatgtggtggttcagcgacggttgttgtctcgtcgccggaaacgccctagcgccgtgagacctcgagccgccgtcgccgccgtcgctccagccgtgcgccgccgtcgttcccgtcgtcgtcatcgctcgggaaggccaccgtcttggtcgccgtagcgtcgccgtcttcgtccgccccttcgccgccgccggagaccgccggagcaccgtcgccgtcgtcaagccgaagagcgccgccgcttcttcttcgtcgccgtcgccgtccgttgatcttccgccgtcgctttggtcgccaatgccgcgctacaagcctgagtacttgtttgatgttgagggttttgtccaggagtcgcgtacgatgtcctttgtcattggatttgggactgcccctttttatgcccagattcctcatgatcgtcatgaagagaagtgccaagtcaaagtcaccttgaacagtaatagtgaagatatcccctcagtgatgttcgaagctagaggaagaaactacatccatgcatgtcaggaggtggcaaggatcgccataggagagctccgtgatcgctacagtgatcagttggccgacactgagtatcgttaccatcctcgccaaccccagggaagtgaccgtggcagctaccttgagactgaaggaattgagaatgatgctactacaagacatttggttgagatgctgtgggctatggatgaaagtcgtgcggagactgtgttagcagctcaagatcgtgaagaccggaatcgtggtaagatttgcaagctagaagacaaggtggatcgtttggagaaggaactagccgcgttgaagggagaagcaccgccgcagaaggccaggattcgtctcaccgcaaggaagagagctctatttgtccctcgctatcaattggcgccaaaggtccgtgtggtggagaaagaagttgccccaaccctagcagattccccggtcaccatcataagtgatgatgaagaagaaggatccaagcgcaaccattccaagattgagtgggtagctacccaagatgatgaagacgagccgaacgagccttcaatcgacctccgatgctcggaagaactagacaacgggaatggccccagtaacaataacaatggagagaatcccactcttgctcaagttcttgctcaacagacacagctaatgaacatgatgatgcaacaactccagaaccagcagaaccaaggaaataatcatgtacctcctcagaataagttagcagaatttcttcgtgtgaggccgcctgttttctctagtaccactaatcctgttgaagctggtgattggctgcatgccatagagaagaagttggatttacttcagtgcactgatcaggagaaggtctcatttgcatcacatcagttgcaaggccctgcctctgaatggtgggatcacttccgcctgaataggattactgctgaacctatcacttggcttgaattcaccgctgctttccagaagacgcatataccatcgggagtggtgtctctgaagaagaaggagttcaggtcgcttacccagggatctcgctctgttacggagtatctgcacgagttcaatcgtctggctcgttatgctccggaagatgtgcgcaatggtgaagagcgtcaggagaagtttttggaaggacttaatgatgagctttcttacccactcatgactggagattatcatgatttccagaagctagtggataaggctattcgtcaggaggacaaatacaatcgcatggagcagaagaaacgtcggattgctcaattcaagacacaacaggggaataatcagaagccgcgtcttactttaagaccccagtccatgccacatggaggttcttcgtttgttgttcgtccgcagcgtcagttcttcaacaacaatgctggcaacaacatccgcaatcaagctccacgtcctgttgcagctccaacacagcaacaacctgccaagagggagcaaggcagcaagcccgtggtgtgtttcaactgtggagacccaggacattatgctgacaagtgtccgaagccccgacgcgtgaaggttgtccctacccagagcaactctacggtaccagcatcaaaggcccgtgtcaatcatgttgctgctgcaagaggttcaagatgctccagatgtgattttgggtacgttccttgttaactcagttcctgcaacagtacttttcgattctggtgctacacattcattcttatctatgagttttgcgggaaatcatgggatggaagtagaagatcttagacgtcctttgatggttagtaccccaagtaatcaagcactctctttgcatcgtagcccctctgtcagaatagaaattcaaggagtaccatttctggccaatcttatcctgttagaatccaaagacctagatgtcatcctagggatggactggttagccagacataaaggtgtgatagactgtgctaacagaaaagtaactctcaccagcaatgatggtcgagttgtgactgtttatgcattgtcttctgagtctttaaggtcaagattaaaccaaataactttggaagagattcctatagtccgggagtatcccgatgtgttcccagatgatttacctggtatgccgcctaaaagggatatagagttcagaatagatctggtaccaggaacaactccgatccataagagaccttatagaatggcagccaatgagttggcagaagtcaagaggcacgtagatgatttgcttcagaagggatacatcagaccgagttcatcaccatggggagctccagttatttttgtggaaaagaaagaccatacccagagaatgtgtgtggattatcgtgcattaaacgatgtgactatcaagaataagtatccgctacccagaattgatgatttgtttgatcagcttaaaggtgccactgttttctccaagatcgatcttcgatcaggatatcaccagttgagaatcaaagaggaagatatacctaagacagcttttaccactaggtatgggttgttcgaatgtactgttatgtcttttggacttaccaatgcccctgctttcttcatgaacttgatgaataaggtgtttatggaatacctagacaagttcgtggtggtctttattgatgatattcttatctactcccgaaccaaagaagagcatgaagaacatcttcgccttgcattggagaagctacgagaacatcaactgtatgctaagtttagcaagtgtgaattttggttgtccgaagtgcttttctcctttggaatctttggttaaatcactttggaaagctttggaatcgagttcgattcggatcggttttccctctctccaagccgcgagtttccttcgccgttgccgtcgccgtgggcctccgccgtcgcctccgagccccggagcttcgtcgccgtcgacaacccgaagtagccgccgcttccttctcgtcgccgtcgtcgtccgttccttttccgccgccgttttggtcaccggtgtgttcgccgtgttgtcctctacgtgctggtgccctccgttggtgccgtggtgccgccgttcgccggcgagtgtccgccgcccgagccgtcttcttcgccgagccgccgccgtcgtcggtgatgtcatcgttgacgtcatcgggatcctctcccgtaagccggtcgtggaccgatcgatctcggccatccgatttggatcggatcaatctcgaccgtccgttcgtgtgaaccgccgcccgtgcgccggtccacccaaaccctagcccgctgacgcaataaatccccttttccttgcaatcattcatcagaggaagagttctacaatgaggctgatggtgtggaggattaggtgtagccttggtcaagctgcctgtggagtggagccgtctgcgccgtttatttattttccgctgcttagaactttattgattgagaggaactatctacctctgt

SEQ ID NO: 53920 - DNA, 462 bp, Oryza sativa
  Clone ID: PAT_MRT4530_56074C.1
aaaaaaccatccacccatgaattcatttcccctgattcatgtcgaacccctctcttctctacaatgttggcgtagatgcccctcctgtctctctctccacaccattcttagtgttccatctcctacggactggcacgcaccatctttagtccactgatctaatatcatatgtacatggttttcaaagcatttgataccatagaaccctgtgaaattgatttcgattctatatacagttgatgttctgatggcatcgctacgtaagtccttgcatcatcctatttgaagatgtgatttcagtgtcattgtcgtaatagtgcttttaatatggtaatgtcttcaaagaaggaacttgtgctgcagaataagcaaatgtttttttagttcatgttatatattgcatatgcaaccacatgaacaaattgaatgtttaattatttactactgttgagaaatcataac

SEQ ID NO: 53921 - DNA, 885 bp, Oryza sativa
  Clone ID: PAT_MRT4530_56075C.1
atgaggttcaccctagaagctgcacatattttggctcctgggtccattgcggccaaaccagggaggatcaaactgactggcacgcccgcatctcatcatatttggacctgcactggagctaagcagatctcccaggccgagaagattcacctgacacaggtgtggagtaagtttcccacctctaatgggacgcaaactttccgcccgtcagaggtgaccgctgacgagttgcaaaccatcttggtttggtggtattttgagggctatcagaggtggcagttacctctgcccgtcgaaattgctcaggctgctgttgtggagcacaccttcaatgttggcaacttctccatcagccaactttgccagccgccgctgatcatcaccgccgtcaatggccagctgcccggcccgacgatctacgctcgcgagggcgacacggtggtcgtacacctcgtcaacacctcgccatacagcatgaccctccactggcatggtgtgctccaacgtggcacgccgtgggcggacggtccggcgatggtgacgcagtgcccggtgcagcccggcggcaactacacgtaccggttcaacgtcgacgggcaggagggcacgctgtggtggcacgcccacgtctcgttccaccgcgccaccgtctacggcgcactcgtcatcaggccccgcggcggcgccaaggcctacccgttccccaagcccgacaaggagcacgtcgtcatcctcggcgagtggtggaacgccaccgtctacgacatggagcgcatggcgttcctcaccggcatcccggcgccccacgccgacgcctacaccatcaacggcaagcccggcgacttctacaactgctccgcccctaatcagacggccaagttcgag

SEQ ID NO: 53922 - DNA, 3191 bp, Oryza sativa
  Clone ID: PAT_MRT4530_56076C.1
agccgaaaggggcaagcgtaccggaccaaaccgcaccaagcagcctgcctcagcctctcgagccgcccccaccgcccctcacgcacgccgcacgcgcgctgaccgcgcgtcccgccgccggccacgaattccgccgccgttccccgcctctcccgtggccggctccctctcctcccctataaaatggaaccccctcgccgcctctccctcctcgccggagcgccgttcggctgcgccgtcgccaccctcggactcgcagccgcctcctctcccccgggccgtcctccgtttagcgcggagagaaccggacgcgcgttcccgccggcgtctagtggcgtcgtcgccactacaccgtctccggccggctgctgttcgtcgccggtacgccaaccgacatcgccgtctcctccatcgacgtcgcagcgtcgtcctctcctccggctgctcctcggttttgccggaacaccgcagccgccgcgccggcctctccttcctcctcgtcgacgtcgccttcggcagccccttccgccgtgcccgtgcgccggccgacgttgccatctccacctccggcatcgcaacggcgagccagcgacgtcgtcctcggcatcgcctcctctccatcctcgtcgtcgccgacgtcccttcggtcggccgctcctcctcgccggctcatcgtctcgcggccgcctccgtcgtcggattcgcagcggcgtgtcccacgccggcctcacctctgtgcagctgctgccggctgccctcgtcgcctcctcgcaggccccggtcgtcgtcgtcgtcgtccgcgttcgccgcccgtggtttgtcaagcgagccgctgcagccccgtcgtcgtcttcgtcctcggctccatgtcgtcaagtctcgtgtcggccgtgtcacgccttcgtccaatgatcgccgccgaagccgtcccctcgccgttcgtctccgttgtgcccgtccgtctccgccgcgcccgttcgtcatcgtcgttctctcgtctcgtcgcgtggtggtaaggatccgtcctctcgctgccccgtcctagtcctttcggtgtcgcccgtgcccattgtgcggttgtcgaccccggtacccgtgtactggtgtcggtagtcgttcgtgcttgtagctttgcttgtgtgcttcgcgtagcttctgtcgttccgaaggttctcgaagcgtggtttgcggtcgtcgccgaagtcctgaataaaaggacacggatagagatggatgaagtcgttgcgacgatggatatctctgaggcaaatgaaggctacacgagctgcggctcggtaatcgagatgtctaggcaaatgaagactacacgggtcggtgcccgggctcaaccctggcctgcctgtcccgggataccggccgtaggcagggttgggtcggtacttttgttcacggctaggatgggtgaagggttatgtcacatgtttacgacgggttccaaggccatggaatgcggagtaaagatgtgtcttgtgggttggcctgggttggcttgggacgagctgggacccaggtcgggttgccagttcggtctgaatcatcgtaggccttgggttaaggcagtactagttggtcagctttgtgaagaagatgtcgtcagttgtttgccgaagctccggaagactgcaggatccgctagtgaagtgaaggaagcagtgaagccagctgtgaaggacagcaaaagacttagatctgttaaggtcctatccttagtttctaatctgtctctcccctttgttttccctctctccctctccaaacctttgcaacagatggctgacaatgagaaaggcaataaggtcagaagtcaggacattggtacctcaagctcccgagtgaatgaagcaccagacaccagttgtgtgacactagtccaacacctgattaaccagaaccgattgcttatagagatactacagcagcaccagacgccaattctgaacttgagtcaaatacaacctcaagtacagttggaggcagtccaagcactcacaccacaagtcagcgcaccgccaacatcccagaaggcccctcatgccatgccacatgttgacccaaaagaagcaagtatcatctgttttatgtgtgatgagcaagggcactatgcaaggaactgtccccagcagaaaagaaaagcaccactgcgaaccgaagatgaagtccgtaagatgatcattaccagcacagaatggcctccaccaggaatgacaaaacatcagagaagaaattccttccgaggtgcacaatagttgacagagcatcttttagctaatggaggtagagtgtctgatagtgaagattcagatcaagtctcctcagatgatgaaaataaaatagaacttaaggcatgctctcgttgtggagaaatcggtcatgttgccagctcgtgtgcctttacatgcgttcgttgtgaggaagaccatccacccgataggtgccctatgagcaggatcacttgtttcttgtgtgaaggaactgatcatgtaccaaaagattgtcaactcagttttctgctgacgaagaagatggccgaccaacacgcccattctaatggagagaagcatcaaggaagcacaaatcctcgccaagattacagtttcagcctaactccagtgccaggacagaggaaacaaaatgagaaaagaaaatgccgagtccgggaagatatccgttgcttcaattgtcaaggaatgggtcatttcgccgacaagtgcccaaaaccgagaaacatagctgccggcacgtcagtccacgcaactccctgcaatcagcagcttgctcctcaacgaattgtcatccatgcatcccgaagcagtcctttagcccgcgttgcaacaactccaattccaatgagtgcactaccacaaggtgtcaatgctcaatttcacccccagccaccagctgacaagacagaggccagtatctgcgttgtacctttggaagttccaatacagcagctgagaaatcaagtacaagatgaagaacccgagtgtaagaaagttattgtttgttacaactgcagtgaagaagggcattactccaaaaactgtccccaaccaaggcaaaatcgacctccacattaccgccaatttacacgaagcagacattccaatcgtattgtggtcactggagcaaacgccgtacccgtaaggcctcgtgttaatcaggaccca

SEQ ID NO: 53923 - DNA, 2890 bp, Oryza sativa
  Clone ID: PAT_MRT4530_56077C.1
ctaaaccaagtcctccctttcatcggccataaggttacaatactcatcagctgttaaattatcttgcagctcagttctgcttgagccgattctaacctcgcatggcaaaacagcttcatgtccataaacaagcttataaggagggacttggatcgatccatgacaagccatccgataagaccacaacgcttcagccaaccgagtatgccgttgccgaggataatcagaaatctttcttttaatcagtttgttcaaactcttgttagatgcctcagcttgcccattagcttgtgcataatatggcgaagaattcaacaatttgacacccatgctgtcggcaaactgaacaaactcatcggatacaaaaattgaaccctgatcggttgtaatggtttgagggataccaaatcgatagattatatgttcttgaataaaatgtatcgcatccccagaatcaaccttcttcaagggaatcgcctctacccatttggtgaaataatcggtcgccaccaatataaacttatctcctttacgaaattccttcatcaattcttggcacttctcattataaaccattaatgtatcattcttgcactcatattctcctgccaattgacttattgctagcaaagaatcccccatgatttcaatagcatcggcttcaacctccttgagtaactgtaaccctttgagcactgcttcatactcagcggccgacagatataaccgaaaaggtacccccttctggggaggaatcaaaactggaggagagctaagatattccttaatatcgtccaacgctttttgttgctctaccccccaagtaaactgttgatcggcattcaatctcaacaatggtgtaaaaggctctaatcttccagacaaattagaaataaaccttctaacaaaatttatcttgccgatcatctcctgtagttctatcttgttcttcggaggctgaatcttcttgattgcattaacactcctttgagttacctcgattcccctatcgtgaacaagaaatcccaaaaactggccagccgatatgccgaaagcacactttgtcgggttcatctttaggccatatttcctggttctctcaaaaaccttccttaaatcggctatgtggtcttctacctctttagactttacaaccacatcatcaatgtagacctgaactaaccagccgatcagatcgtgatatatataattcatggctctttgatatgtagcccaagcactcttcaagccgaaagtcatcacaacccactcaaacgagccgattgcaccaggacgcctaaaagttgtcttatggatatcttcttcagccataaaggtctgattgtatcccgcattaccatccataaaactcaaaattttgtgtcccgaggcagcatcaactagctcataggctactggcattggatattcgtctgtcggggtagccttattcaggtttcggaaatcaatacataccctgatcttgccgtttttcttgataacatgaactgccttaacccaaggcctacgatgatttggaccgaactggcaacccgacctgggtcccagctcgtcccaagccaacccaggccaaccattccacattttagttgttaagcagactgagccacaaactaagccttacccactagacatgtggaagtacggtagtgctttgcaacagaggcccgaagaccggtccttatatggccgagccgaggggaggggcacgcggaccgggtccacgggagtggggcccacgcggcagcctcacggtccacggtggaccgggtgcacgcggctcactccgaccggcgccgcgggccccacgcgtcagccgcacccgagggcgcgggcggctgacggccgggccccacgcggcagccactcggtgcgcccgaaggcagccacggcggcgcggccggcgggaggcagcgccctcgccccgatggtcgccgccggcgaccaccggcacggcggagcagcggccgagagaggggagggaaagggggaaacgaaacggcggtccacggctcaccccgagtcgacggcgacgacgaaaacggcggccggagcggaggaaggcggcggcgcggctcgggtcgacggggtcgacggcgttccggcggtcggcgagcgaagcggaggggtggacgaggtcggcgaggatgcggcgaagccgaaggaggcggcgccggggcgggagatggtccggggcgacgacggcggcggaccggagctcggcggcgacggcggagagagagtgcgacggcgcgggctcgattctgacggggaggaagggcggcgagtggcggaaacggtggaggggagcacggggatgcttaagaagcttgaggtggacagcatctcagcggtgtttgttgcccccatttgcagcctcctcgcttccaccctctacaggttgaggttcacttatgatttgtggatgaaaaatttcacaaaagagcaggagcaggcacttcagctcctcacctccctccgaaatctagaattctatgagtgccaccgtctgcagtcccttcccgaaggcgacaacgtcagcgatgacgtcagcaccggcggcgactcgggcggctcgggcgcgtatgctcgccggcgaacggcggctctacggcacaaacggagggcaccaagacgtagatcacggcgcggcgaactcaccgatgaccaaaacgtcggcggaagaccaacggacggcggcggcgtcgaggaaaaggcggcggagaagatcgggtcgacggcggcgacggtgctccgatggtcttcggcggcggtgaagcggtggacgaggacggcgacgcgacggcgaccacgatggcgatcttcccgagcgacggcgacgtctggaacggcggcggcgcacggctga

SEQ ID NO: 53924 - DNA, 2968 bp, Oryza sativa
  Clone ID: PAT_MRT4530_56078C.1
cccgcgtccggcgcgcgcgcgccgccgatctgtggctggctgcggcgcggcattgggagggcctcctgagttggggggaggttgctgaagcttcgattcggttgaccccgtggctggggtttgccaccttttagctcgtctggcggttttgggtaagcatttcggtggggttcggcctctgggttagctggtattggagggaaccatggcggagaacatcgatctggtgctggagttcctgcagaagaaccgcttcgccaaggccgaggccgcgctccgaggggagctaaatggccgaggggatgcgagcaacgggccgacggtgcagaggcgtgtagcggagcccaaggaggacgatgagcaagatggctccgaggcaggttccaatgcagggcctagaggtgctgcatcggtgaggagcgcggactcgtcgagggagtttatcgtgaaggagattgatgttggaggcctgccgaatgggtctgatgggaggaaagggttggggattggcctggctcaggagaacaatacaggggatctgtatccttggaattttagcattgcaaacagcactatggagcaactggcagagctattggtgtcggaggaggtgccaagacatcggcgcggcgccgttgtagctgagaagagagatcgtggtgttgggaccgagcaacctggtcctgtgcttgagcaaaaggtttcttttggaagaggaaaggggaaagtggatgttgcagggacagggagaaatgaaataaatgaaccaggccattccagggataaaaatcttgttccagaaaaagaggagctcttgaatggatgtacagttaagacagtgcttccattccctgcagaaaatccatcatccagttaccatacagcacaccatgatggaaatgagaggaaagacgctaagaaaagcattgatgcggactgtgttgaaagcaactaaggggcagcttgatgaggggaacaggcagtattactcagggaagtcccaggagaacgcagatcaggttgctgaccgttgcttcgatctgcagcttattggagacaatcaacgtgaggagcttccaaagttacctcctgtgaggctcaagtctgaggacaagctagttaatatgaattgggaggaaaaggtcaaccataacgggtcaggagccaagcaccccagtgctgaccatgcttttatgattgggtcttatcttgatgttcccatcggacaagaaataacaccatcaggtggaagacgcacaattagtaataactggttctctgtcagtcaaggtattgcagaggatacttctgacttggtatcgggctttgcaacaattggtgatgattcacttgaatatccaaatgaatactgggattctgatgaatacgatgatgatgacgatgttgggtacacccggcaaccaattgaggatgaaacctggtttttagcacatgaaattgactatcctagtgacaatgagaaggcaactggtcacacaagtgggcctgatcggcatgatcgtcccacaaaggatgatgatgatgaccaatcatttgttgaggaggattcttacatatctggcgaacaatattttcacgggaagaacattgcacaaataggtacttcggaggggccaatggggcatggaattcctgataatgatttgattgctcagtatgatggccagcttttggacccagaagaactaaatttgatgcattcagaaccagtctggcagggtttcgtttcacagaatagtgaattaggcatgttaggaaatggaaaattccttaatgattctgaacgtcctcatcctgatgacccatttgtggaggatgatcagcatggttcagttaggtcaattggtgttggcattagcagtgatgctgctgatattggcagtgaggtgcgtgaaagtctgattggaggaagcagcgaaggagatattgaatactttaatgaaagtaatctgagtgttagtggaaaaagaaattctcagcaggaaacagaaaagaaaagaataaatgcgaaaggggcaaaacaggaacaattgaattttattgataatcagaagggcgttttaccaccaggtgcatcatatgctgacggtggattctcctttcctccaccattgcatagtggaaaaaatgttgaatctgatgttaaaccgttatggtcaaagaaggttgatatgtataccatcaatgatcctgatgacttgcaaaacggcatggtatcagatgatatgcttgccacatggaggaaaaagaatagtgagtcttccctaaggagctctcgagatgaaatggcttctgatgttgttaggtcaagaaattcaagtgcatcatctgctttgaataatacttatgatgaaatagatgacacaatgaattctcggcatcacaagctagacgacgctcaagaagaggacactggaaccacattggatgatgaggaagcagcagcattgcaagagcaagtaaggcagataaaggcccaggaagaagaatttgaaacttttaatctaaagattgtgcatagaaaaaacagaactggttttgaagaagacaaaaatttccatgttgttctcaactctgtcattgctggacgttaccatgtcacagaatatctgggttcagcagcattcagtaaagctatacaagcacatgatttacacacaggaatggatgtgtgtgttaaaatcataaaaaacaacaaagatttttttgaccagagccttgatgaaatcaagctcctgaagtatgtcaacaagcatgaccctgctgacaagtaccatcttttacgtctgtacgattacttctattatcgggaacatttgcttatagtctgtgagcttctgaaggcaaatttgtatgaatttcaaaagttcaacagagaatcacggaggcgaggtctatttcacaatgccaagactgcagtcaatagctattcagtgtttggaggcac

SEQ ID NO: 53925 - DNA, 2565 bp, Oryza sativa
  Clone ID: PAT_MRT4530_56079C.1
caagcttgcatgcctgcaggtcgactctagaggatccccaaatattgctaaggctcgggatctaaggctcgtcctagggtcaagggggctctgataccaacttgtcacgaccggaactgacccaacgggtgttccttgcgtgcgtgcattaatccttgtcccaggaggcaaggcccagcacacacaaagacaaacgagaaacagcggaagactagggcgacgaccacaggcacttgacggcaggcacgagctagacaccaaagccttcatcttccaggaactcctcttctgggtttggaaaaattgagcaagactgagtacaaccaccgtactcaacaagacacacccacaagtgccacaagacacatcttcctcacgtgtaaccacgtgccacataccaccacggcatacggacaaaagacgtgacatagtttccaacccatcctagccatagacaagagtaccgacccaaccccacctacggccggaacctcccggacaggtaggcaggactgagcccctagcagcaggacaccagccctgtgccatgacatctcgactaccgggccgcagctcgtgtagccttcattttccctagagatgtccatcgacccccgacttcgtccatctccatccgtgtacctttgtttataactagactgagccacaaactaagccttacccactagacatgtgcaagtacagtagtgctttgcaacagaggcccgagcttaatccttatagaacccgaggtacgactaacaaaacccaaccacgcacctcgagcccagcctaaaaccattttgggggttttgaatagagggggagagagagaacggccttccgaaccttcggcgacgaccacgaaccacgcttcgggaacctccggaacgacagaagctacgcgaagcacacaagcaaagctacaagcctataaagaagcaataacaatacataaaaatgaaaccgggtacacagagacggtccacaggtcgacggaagcggaccccgtgtctcaaccgaggcgagtggccgacaaacggactccactagacaccacacggcctgcacacgtggaaaccacgcggctaccgagcgggcacactaacacggtcaccacacgcacaagcgaacgactaccgacactggtacacgagcgagacgcggccgacgcaacgcttggcgacgcggaggcgaggacgaagacgacgacggggctgcagcggcacacttgacggacgcggacgacggacgagaacggcttgacggagggacgaacgccacgacgatcgggaacgacgagaggacgagggcgacgacgaccggggccggcgaggaggcgacgagggcagccggcagcggcttgcacggagacgaggacggcgtggaacacgccgctgcgatgatgatgacggaggcggcgccgcgagacgacgagccgggcgaggaggaacgtcgatcggcgaggacgaacggtgacgaggaaacgacgatggcagccagcagcggctgcgcggaggaaggggacggcgtggaacacgccgctgcgatgttggagaaggtggtggtgcagcggggcgacgagccgacgaggaggaatgggtggccgaaaggacgccggcgacgaagaggatggagaggccggcgcggcgacggcgttccggcgaaaccgaggagcagccggggtggagggcggcgtcgcggagccgagggaggtggtggcgacgtcggccggcgcacgggaaccgcgacagtggcagccggaggtggaacagtggcggcaacgccactgttttgccggcgaggacgcgtctccggtgctttccccgcgaaacggagggctgaccgagggagaggaggtggctgcgaggccgagggagaagacggcgcggccggacggtgctccggcgaggagggagaggcggctggaggcggccggcgcggaggaaagagaagggcgacggtgggaacgcgcctccggcggtcaccgcgcgaaacggagggcaggccggggtggaggaggtggcggcgacgctggaggaggcgacggcgcggccggccggcgcacggtcgaggcggcacaggcggctggaggcagccggcagcgtgggagagagaggagggcggcggggagagggctagggaccacggggaggctcgggatggggttaaaacgatagaacgggggatgaggatcccattttatatgagagaagagagagccggccacgggggaggtcggaacggcggcgggaatggcggccggcggccatgggaggcagccgaggaagacgcgagcgcggcgtcgtcagcgcgcgcacgcgcgcggcacggacgggagggcgccgctcggcttgggccgggcggcggcccaggtgggaggggcggggaggcttgggccgagaggcggcccaggaggagaggagggcgaggaggcccgggagagagaggggagggaagggagctgggccgggagggggagggaaggcccaagagagaaggagagggagaggaaaaagagggatgagagagggacttcggccgcgggccgagagagagagagag

SEQ ID NO: 53926 - DNA, 4090 bp, Oryza sativa
  Clone ID: PAT_MRT4530_5607C.1
atgcttgcaagattcaagttgattcgggaggctgaagttctagataaaacatcacaataccgagtttggacttcgaaaaacttttcacactacaaagctcgtattgctctgcaaaactttgatgtgctcctagatgatcatgattattgtgccgatttgtggtcactagctccatctaaaggatcaggttctcctagccctaagggtgatttatgtgttgataacaatttctcgtttgaagaagaatactctgataaactaatcggacctcacctcctgagtaaccgtgaaacttgtgttggagcttctcaactactagaggaagataaatctgccttgggtaagaggaaaaggtgccaccgtcctacttcaattcgtgatgatcaaagacctaaaaggattcttcatatgttgaagaaaaagaaatttgtactgatggtggagttacataaatggctagagagacttgagaaggagaatggaaaaataatggataggaagacattgactagcacagtgaataagcttcagaaagagggcagctgcaagtgtatcaaagttagtgtccccttggtcacaaactatgctcgcaatcatcttgttgacgtaatactgcattcttctgttggggacttgtcaatggaacttgttaatgagatcaaggacaggcaaaggaattttgatactgaaactcgttctcgtgcagtaactaaattgaggaagaaacagcagacggctgccatacatggtttgaggattcgacgtagagtcaaagtcaacaaaccattagtgttagaagctatttatgccaatggtttcataggcgcaaagatgattcgggcaaagctgttacataaatttctgtggttatatgttagcagtttgtcaaattggtgcagcccatctgattatgccaaagaagggcatctcaacaagaaccttaatcagtcatgtcttttgttttcaatgtcggcagctataaaagaaatgccacttgaactctttctacaagttgtaggatcaggaaagaagattgattgtgtcataactaagtgtagtcttggagaaacactttcagaaattcctaccaaggaatatgatcagctcatggacactcatgccaagggtcgactctcacgcttaataactattttagataagctcaagttgatccaacttgcaaaagcatctgtagaggattctggcgtgcaatcagatgctgcgcctacatattcactggtgctcaggccttatattgaagaacctacaccaataattttaccctcatcacacatcaatgagtctgttgatgcttattgggaaacgttagagtactgtcatttaacagctggatttgctaagccgtcaagtaccttccctggctattctgtacctgaggtttctcatcctcgttcatggagttcacttagggtaatgactactgaacaacgactagaattacaacagcgtgttatgaatgtcactgagaaggggaaactttcttataaagattgtcgcataattgcaaaggatttaaatctctctgtgcagcaggtgctttgtgtctcctcccagaatagacgtcatagacagccgagagttcctgtttcacaaagtcagccaaaagttagctctgggtcaacctctcagaaaaggaaaagatctgctgatgagattaccctgaaggaaattgttgatgatatacactagataccgtgcagcacgtggagcaagatcttcccgtgtagattggaactctctctctgatcttccagcttcaccagcagcatgttgtagaaggatgtcagacttacgagcaaaaatgtacataagattagcagtgagccaaatctgcaaccttcttgggatacgttatgctaagcaccttgaaagggaaaggatatcaaaagcgaaaggattactttcccaagtctcagattctaacaaagagaactgtgtagattcagattctgagcaattaaattgggataattttgaagatcaggaaataagaggtgcgctcgatgaagtccttgagttcattcaactagaaaaaatggaccgaaccaagcaaatcagttctaagaatgaagtgagcaatgattctaatgctgacgaagctccaactgggcaggaacagacaattatgcaatatgtaaccagctcaagcactgaagttccagaaagcggactccatgaacatgtaaaaccgtatagacatccaactgcaatccatgcaagtaaaaacatggaaaatttctttagatatcatgaagaagtcattatacctaacaaagatgaaattactaaaagagatgtatgcaagtccttggctgttgccaatgcattagagctcctcaagatggtttatctcagcacatcatctggaccagaagtacaagcttcattaacagccaccttcaagctttattcggagagggaaatttttacagccttttgctttctgagagatagaaacttcacagtcactagaaatggaacaaagcctgcaacactttctggaaaattcttctttaatgcttcccactcacccttcccatttggttcagggaagaaggcttctgaattctcaaaatggcttatagcgcagcaaaagaataccatggacagtagagtatatttgtatccagatctacaatgtggggaaattgttcacctcttttctctggttttgtcaggagaaatgtgcatttcaccttccttgccaagtaaaggagtaggtgaggccgatgaacctaacagccatattcctttagatgaggctgatgagcctgacgaccgtattccttctgttgaagatactagtgagttggatgacagcactcacaaacgcaaggctgataaagtgaaactgaaaagtagtaagagtaagaaacacaaacctttgccgaagatagaaagtgatttttgctatcgccgcgagaaaggcttccctggaatccaagtggctttgaatcaagagaaaaaccaaacaagcaatctcatgcatgcattacatgatgaagaatgccttatttttaccttagccagggaaatgggcagcaaggatgttagttcacaggtggaaagccaaaatatgctatcatatttaaacaactccagttcatgtcgttgtttattgtctgcgtctcatttggagaggtcttacagcggatggccttgggatgctatgaatatatatgccaaacagttaccatcattatcttgttgtaaagatgaatcattcatattgtcttctgacatgttcagaaatgcattttctgttattcatcaaactggtgagcaaggaattgatttaagagaaatgtcacaggcactgcatccactaggcatgcagtttgtcaaggtgattattgatacgcttgagatatttaagctagtttttaaggtcaatgcatacgatggtgtgcagatcgttgacacgctacataagtcgaagtatcatataaccacacttgcaaaatacagtggttgcagctgtttgcgagatccagcttctgaaatagcagcaactggagatgccgaaaatacactcaaagataagcatggggtggctagtaatttgcagcgaactgtaaaaatgcttggtgatgtgcacactgttacagtccttgatgtccaaagcaattcgagctcacctcatatgcacagtggagaggatgagaggctatcaactccaacacaagacaatgggggcagtggttgctgtcatgcttgtggaaggcatatttatcagccaatattaccgtggataaatggtgatggtagcatgaatgaaactgtctatgaaggttttagccgtcgaattattggatatgtcatgcaatatccaggagttgtggaggagcaccttatctgtcggatggatgtactgaaccctcagacatgcagaaccttgctggaacaactggcagttgataaacacatctacgttcgggtgtttgatgaacctgtgcctgtggctccgaccacatttcagtctcttttgaagcaacatggccactgtaaagaaccatccaagtgtagaaggcgttactttgctaatccaacgagtacatttcagttgtaa

SEQ ID NO: 53927 - DNA, 1848 bp, Oryza sativa
  Clone ID: PAT_MRT4530_56080C.1
ttttttttttttaagcaacaaaaagacaccatataggcatatacgaggcacatacaatttacagagctactataagttagatcattgtcagcgagttgttcatgagatgaagaacacggacatagtcagtaagagcagcatgttagagttagcaagtaggttctgcagagtcgtcgatccgccagaggacggagccctgcctgcgacagccggcgtgacagccggagaggtctgctgctcgtttgacggtagggggtcctctggactgttatgctgtgatggacctaaggacaccgtcgtgctgttgtcaagatcatggcattcagagcggtaccagcccagcttcatattttctctgtcaaaaactacgtgatagccaaccatgaaattctgcccaataatcccaacaggttcaggtgatggtagtactgctaagcaaaagacagcaaattctccctgtctgtcattaaatggaagtataggattaacagcctggaaactcttgttctcagcaaaagtcagagttatagttggaacatcaggcatctcaagaggaccggtgctgtagcaatattcgaaagaataatcatcagaagatgctcttgatgcattgatttgtttgtcgaactccatagtgatactcttgtaggcatcgaggggaagactggtgaaggatgttccagtgtctactaatgcctggaagccagctccctccgtacacttatgtccaatacaatatttgtcaacattaacagcataagtctgaagcttgccattcatcgggacaaatggtgtagactgttgggtaggtactccttgatcaccaaagaaaattctcccagaatcatctttcttgaaacacagtgaaaaggaatttcgtactaatccagctcttgcaaggaaactaggtactgagatatctgccattccaagaccaagaagtccatctggtgcaataccttccaaatagctaccactctgctttttaccacagcctataatgacagaagcattcacaggtgcatggcccccccgtgcctcctcctctgacatatcttcaattagcaaaccggagctggttgtattttctgaaaagtagtcaatattgtatggacaaggctgcttcgggtttgtgcaacctgaagccggtgagcaaagctcatggctacagggcagatgccgacttgtagttgattcagatggcttgtaaatcccaagatctctatccaaacttccatggtagctggacaatggcgcacattggatacaatcacaaggcacccaaaacaagtcacttccagtatccaatgcgaccaggaaggaagtatttggcgtcccaacgtccacccaagtgtagtataaccagcccaagtcgttgccggaggggaagatactgccgccctgggagagggagaggagctggtacttgccgccgacccgccgcttctgccgctggaggtcgctccgcaccagcgcgcggaagtaatccccgctcccgcgacggggccagcgccgccccccacgcgcgcccgccgcgagccgagcctcgtcggacagccggtgcaccatcctcgccgaaagcgtcgccgcttccgccgccgccaccgccgctgccgcggcgagcagcagcagcagcagcgggagtagcaccgggaggcgcatgggtggatctgggccggaggcggtggatctgggggtaatgcggcaaggcggaggggaggagaggacctggggctaggttttgcggggtgcgaggtgaggaggaggaggcggtggtggtggtcgagcgggtgggagtgagagcgtcagggggaagaagaagaagaagaagaagaaaagaagagcgag

SEQ ID NO: 53928 - DNA, 3244 bp, Oryza sativa
  Clone ID: PAT_MRT4530_56081C.1
attttctcccccttcccaacattatataaacactccccgtgcctccctccaccgtttccgccactgaccgctctctctttcggcgggaatcaagctggcgcagtcgctctctctctcagcggtcacagccgagctccggtccgccgccgtcgtcgccccggaccttctcccgcttcggcgtcgccttcttcgggttcgccgcaacctcgccgacctcgtccacctctccgtttcggtcgccgactgccggaacgccgccgtgcccgtcgacccgagccgcgccgccgcctctctccgctccggtcgtcgtacccgtcgtcgccgtcgacccggggtgagccgtggaccgccgattcgtttcccccttccctcccctctctcgggcgccgctccgccgcgccggtggtcgccggcggcgaccatcggggcacgagtgcgccacctcccgtcggctgtgccggcgtggccgccttcgggcgcgtcccgcggctgccatgtggggcccggccgttagccgcccgcgccctcggatgcggctgacgcatgggacccacggcgccggccggtgtgagccgggtgcacccggtccaccgtggacccacctcggccatataaggaccggtcttcgggcctctgttgcaaagcactaccgtacttccacatgtctagtgggacaaatgaaggctacacgagctgcggcccggtagtcgagatgtcatggcacagggccggtgtcctgctgctaggggctcagtcctgcctgcctgtcccgagggttccagccgtaggtgggattgggtcgatgtacacctctgatcagagtataatctattcgaatagccgcgccctcggttatgggcaagccgagcaatgtacccaagtcagtgttttaattcttaaaatttgcttaacaactaaaatgtggaatggttggcctcggttggcttgggacgagctgtgacccagggtcgggttgccagttcggtctgaatcatcgtaggccttgggttaaggcagtactagatggccagctttgcgaagaagaagatgtcgccaattgtttgccgaagctccggaagactggaggatccgcttcagaagtgcaggaagcagtgaagccagctgtgaaggaaacaaaaagagttagttcctttaaggtcttatccctagttctggtctattctttccttgtatgcttcccctctcaatctctaccttgtgacagatggataacactggtaacaaaggctatgggaatgatggatccgatgactcaagaacccaagccaatgggaatgagaaaagcatcaacgaaacctcaccagagctaatccaaattgtggttaaccaaaccaacatgttggcaacagcctttcaactattacagaatcggaacaacccagcaggggcaaccaacgttcaagtacctacagtccagcaacagtgcaagttatcagaatttctcaaaacggggcctccaacctttgccattgccgtcgatcctatggaagccagtgattggttgcgcacagtcgagaagaagctagggttgattcagtgcaccgaccaggagcgggttggcttcgcaactcatcagttggttggaccggcttcagagtggtggtatagctacgaagcatcacggccagaaggacataccatcacctggaacgagttttcatctgtattcaagagatcacatgttcccgcaggaatggtcacactaagaaaacaagagtttcgctacctgaagcaaggagatttgaccgtcacagagtacctgcatgaattctatcgtttggctcactatgcaccagaagatgtggaaacggatgaagacaaacaagagaagtttctccaggggttaaaagatgagcttgcagtgcaactacttctagaggattatgaagattttgagaaacttgtggacaaaaccatgaaactcgaaagtgagcataatcggatgacgaactgcaagagaaggattgtcaacatcccagtatttccaggtggtaaccaaagacagcgcactgagccacttcagatcaccggatcttctgttgcgcatcaagagtttccgccccaagaagatggacgcaatgcagacaacaacactagcaatactaatgatgatgataccaccaacaaccatggttcttgccccattagtgaccactcgaataaagcgtgcaatgtcagtagcattcaccaagatgtcaacgatagtatcaatgttggaaaccagaatgacaaccttagcaattttgactctgagaaagactccaatggtgatagcaactatggtaccactgatgccaatgttagcaaggatttccaaccaccaattccaactccaagtcacaatgatcgtccccagatggacagctcagtaaagaagacgttgatttgttacaactgcaaagaaccaggtcatttctctagagattgtccacagccgaagcgtaacctgcgccatcactccggccattatgcaagaagaagacgagtcactcgccttgtggtcactggagcaaacgccgtacctgtttcactgaaaggcagcaagccaaaggacctcatcgtcaccagaagcatccacaactctcggagtgaagagtacttgtatgaggttgacgccaaagatatgaattatgagaagttctggaactgaagtcccatcttcaagtgccacaatccagtcgaagtcagcaagaggtgcaaccagggaaaagtcaggtgaagagaagattccatctgcaacaggagattgagccaagcagtccagagtggagaagttttgcgtctcctcgccggaaactcgccggaacggtgcccccgccggcaaccagtggcattggtgccactgtactccctccagccggctgctgttcatcgccggtgcgccgatcgacgccgccgtctcctccttcgacaccgcggcatcgccttcttccccggcatcacctcctcctcgcccgaatttcgccggaacgccgtcgcccgcgccggcctcaccttcctcctcgtcgacatctcctccggctgccccggtcgccgcgccagagcgtcggccgacgtcgccgtctcctccctcggcgacgccgcatcgccctccaccccggcctgccctcggtttcgccggaacgtcgccgcgaacctctccgtccgcctcgccggagttgttcggccgcccgtccctcctcgccgtgtaccggtcggccacctccaccaccatcttcggcat

SEQ ID NO: 53929 - DNA, 1584 bp, Oryza sativa
  Clone ID: PAT_MRT4530_56082C.1
atggatgaagtcgggcgtcgatggacattctccagggcaaatgaaggctacacgagctgcggcccggtagtcgagatgtcatacggcagagggttggtgccctgctgctaggggctcagttctgcctgcctgtcccgggtatcccggccgtaggtgggattgggtcggtactcttgtctaaggctaggatgggttggaaactatgtcacatctttacgacgggttccaaggccatggaatgcggagtaaagatgtgtcttgtgggttggcctgggttggcttgggacgagctgggacccaggtcgggttgccagttcggtccaaatcatcaataagcaaaacaaacaacacatcaacaagaagagttagttcctttaaggtcctgtccctagttctggtctattctttcctggcttgtttcctctctcacctcaatccctgtaacagatgtttaacagagaaaaaggaaagaatgtcagcgggtatgcctcaagtaactcaagttttcaactcaatccaccactggcctcaagagagttaacaagggcacacccttggtccattccaagcatgctgcttagttcacagctaccattggttggaagtcaagaccaaaatcagtatgtgtttgatcgagcatttgccacccaggtcaatgagcttccaatgccagaagaggatgtccccttttgtcacgattgtagagaacaaggacactatgccctgaattgtccatgggtatatgccaaagaagccccttcctttggtttagcagggcagacatcgctaaaccagccaccttgcaccaagtcaagtttgcagcctagtgtgcaaagtggagagcccaatggagacaatccattgaatcctagaaaatgctttcctcctagcctttcgtaccacgtggggtcacgtactaagcaagccaaaggcaagaagagtaagactcagaagagaaaagcaccgatgcgaactgaagaagaagtacgtaagatgactattaccagcaccgaatggcctccagcagggataactattcctagacgtcaaagaggaaataccttccgaggtgcacgacagttgacccagcacctcctaagccatggtggcagagtatctgatagtgaagggtcagatcaagtctcctcggatgatgaagatgagcctccccgacatctcggcgaggaagagatggaatcaaaagcatgcacccgttgtggagaaattggacacgttgctagcatgtgtctcacactctgccctcattgtgaagaagaccatccaccaggggaatgtcccacctcaccaaccattctctgcaccgacagcctcagcaaagaattgtcgtcgatggaagaagttgtgtctctccccgacctactccaggccgagcaaagggcaatcaacctcaggagggcgataccaagcagaagaccgttatccgcttcaaccagcaatcagaaggaagcttctcctgtgaatgatagcaatatgcagtcctatcacatcatcacggaaccaatcaaggatgatgcagtcactagaacaatgccagctatatctctccaaaatcagaatgagtag

SEQ ID NO: 53930 - DNA, 252 bp, Oryza sativa
  Clone ID: PAT_MRT4530_56083C.1
atggccatgacgatgacaacaataaagcaaaggggcgtttgtgtcgtcgaggagaagtacgacgacgtcaaggagtgctggaacgcgtgcgccccatgcatggatcccacgagtcacccccttccttctccttcttctccccggccggtgaaggagcctgactgcctgagccatcattcgtcctccgatcccgcaccgccatctacgatcaatctgtccatcgacgatgcagacaaggtgtgccatcagtag

SEQ ID NO: 53931 - DNA, 5257 bp, Oryza sativa
  Clone ID: PAT_MRT4530_56084C.1
ttaaacagaatctcgtcctcgagattcggaagaactggcgaacaaatgcggatgagctgacttcaattcatcttctcgttcccaagttgattcttcttccgagtgattactccattggactttgcaaaagcagataactcgatttctggttcttctctcatctatttccaaaatacggattggtttctcaacataggtcagatcctcttgaacttctatctgttcatgattagcttcttcggtaggtacccttaaacactttttcagttgcgacacatggaacacattatggactcctgccaaagattgaggtaactccaactgataagcaacctctcctcttcgactgacaatcttataaggtcctacaaaacgcggtgccaattttccgttggtgtgaaaatgatgaactcctcgaagaggcgtgacacgaagatacacataatctccttcttcaaaactcaaatctctgcggcgattatcggcataactcttatgacgagactgggccactcgcaatctttcttgaatgattttcaccttttcttctgcttcccttaggatatccgtcccgaaaacctgacgttctcccgcttgatcccacaaaagcggagtgcggcacttccgaccatacagtgcttcgtacggagccatctgaagactagcttgataactgttgttgtatgaaaattctgcataaggtagattcttatcccaacttccaccgaaatctaaagcacaagctctcaacatgtcttccaaaatctgattcaccctttcagtttgtccgtctgtctgcggatgataagcagtactaaagttcagcttagaacccatctcttcctgaagtttcttccaaaaatttgaagtaaactgactgcctcgatcagacactatcttcttagggacgccatgcaaacacacaatccttgccatatacaattctgctaagcgacttccggaataggttgtttttaccggaatgaaatgtgccactttggtaagtctgtcgactatcacccaaatagagtcatggcctaatgacgttttgggcaaaccagtgataaaatccataccgatttcttcccatttccattcaggaatcttcaaaggctgcaacaaaccggcgggtttctgatgttctgccttgactcgctgacaaacatcacatactgctacgtattctgcaatttcacgcttcatacttgcccaccaaaacctttccttgagatcctggtacatcttagtactaccagggtgaatggagtataaagtatcatgagcttctttcagaattgcatcctttaaatctttgttgtcggggacacagattctctcacccaaccatacagttccgtgctcatcctccaagaaaccaatagcttttcctcttctcatattcttcttgatctcttgaatatcaggatcattaatttgggcttctctaacttgatcaattagagtgggcttcgcttctaaggcagcaacgaaacctctaccgacaattcccaaatttaatctttcaaattccttgcataattccaatggcaactgtcgtccttctgtagcattgcaatagccttttctgctaagagcgtctgctacaacattagccttccccggatgataatgaattcccatgtcataatccttaattaattccaaccatctccgttgtctcatgttcagatccggctgagtaaagatatactttaaactcttgtgatcggtgtacacttctgtacgagtaccgaaaagataatgacgccaaatcttcaatgcatgaacgactgcagctaactcaatatcatgagtagggtagttcttctcatgcggacgtaactgtcgagaggcataggcaaccaccttcccatcttgcatcagaacacaacctaacccaagtttggatgcatcacaatacacttggaaacccttctttggatcaggcaaaatcaaaataggagctgatattaagcgacttttcaattcttgaaaactctgttcacattcttccgaccacttgtacttcacatctttctgaagcagtcgtgtcatgggcttagcaatcttggaaaaattctatataaacctccgataatatcctgcaaggcctaggaaactgcgaatctctgaaactgtctttggttgcttccaattggttacggattccacgttactaggatcgacggcaactcctccggctgagatgacgtgaccaagaaatttcacttcggacaaccaaaattcacacttgctaaacttagcatacagttgatgttctcgtagcttctccaatgcaaggcgaagatgttcctcatgctcttctttggttcgagagtagataagaatatcatcaataaagaccaccacgaacttgtctaagtattccataaacaccttattcatcaagttcatgaagaaagcaggggcattggtaagtccaaaagacataacagtacattcgaacaacccatacctagtggtaaaagctgtcttaggtatatcttcctctttgattctcaactgatgataccctgatcgaagatctatcttggagaaaacagtggcacctttaagctgatcaaacaaatcatcaatcctgggtagtggatacttattcttgatagtcacatcgtttagtgcacgatagtccacacacattctctgagtatgatctttcttttccacaaaaataaccggagctccccatggtgatgaactcggtctgatgtatcctttctgtagcaaatcatctacttgcctcttaacttctgccaactcattggctgccattcgataaggtctcttatggatcggagttgttccaggtaccaaatctattctgaactctatatcccttttaggcggcataccaggtaaatcatctgggaacacatcaggatactcccggactataggaatctcttccaaagttatctggttcagtcttgaccttaaagactcagatgacaatgcatgaacagttacaactcgaccatcatagctgttgagagttacttttctgttggcacagtctatcacacctttatgtctggctaaccagtccatccctaggatgacatcaaggtctttggattttaacaagataagattggccagaaatggtactccttgaatttctattctgacagaggggctacgttgcaaagagagtgcttgattatttccttggttttgctgattctgaaattgctgcatcatcatgttcataagctgtgtctgttgagcaagaacttgggccagagtgggattctctccattgttgttgttattggggttgttgggaccattcccattgctacgagtgttcaccatctggcatggacagggcacaagaagagaaaccggggaaactacttaggacagagaattactttaacttttattgatcttaactgagtttcattattacaaactaaagactctcacaccactaaactcaccaacttcctaacactcaaaagcaaacaaacacatgcaattacatcccaccactgatgtaaatcacatgcgagccacacacaagcaaacttaaagcaaaccaactaacacaacgatctaagacaacgacttaacaagtcactctagttcttccaagcatcggaggtcgattgaaggctcgtttttatcatcttgagttgctacccactcaatcttggaattgttgtgcttagattcttcttcttcatcactacttatgatgatgaccgaaggatccgcttgagctggggcaacttccttctccaccacacgaacctttggcgccaattgatagcgagggacaaatagagctctcttccttgcggtaagacgaatcctggccttctgcggcggtgcttctcccttcaatgcggctaattccttctccaaacgatccaccttgtcttctaacttgcaaatcttaccacgattccggtcttcacgatcttgagctgctaatacagtctccgcacgactttcatccatagcccacaacatctcaaccaaatgtttcgtggtaacatcattctcaattccttcagtctcaaggtaactgccacggtcacttccctggggttggcgaggatggtagcgatactcaatgtcggccaactgatcactgtagcgatcacggagctctcctatggcgatccttgccacctcctgacatgcatggatgtagtttcttcctccagcttcaaacatcactgaggggacctcttcactattactgttcaaagtgactttgactcggcacttctcttcatgacgatcatgaggaatctgggcataaaaaggggcagtcccaaatccaatgacaaaggacatcgtgcgcaactcctggacaaaaccctcaacaccaaacaggtactcaggcttgtaacgcggcatcctgttgtataggcccaaccattctgaacaaccaccccggctgcacagttctatctccaaaccaggaatgtaccattccaaaccaggagttgccttgctggccttggaactcttcaaactcttcttccgcgaaaacggactctccagaaacgacggaatcggtgaccaaaacggcggcggaagaacaacggacgacgacggcggcgaggaggaaacggcggaaaccttcgggttgtcgacggcgacgaagctccgacgatctccggtgacggcgaaggggcggacgaggacggcgacgtgacggcgaccacgatgacgtccttcccgagcgacggcgcgtctggaacggcggcggagcacggctggagcggcggcggcgacggcgaagctagggcacacggcgctagagcgaaaccggcgacgagaggcgaaggcgagggtggcggcgggtagaggagacaccggggtccttttaaaggggctcggaggcggcggcgaaggcccacggcgacggcaacggcgaaggaaagctcggtaagaacaaatccgagacgaactcgaatccaactctttccaaaacgatttagccaaagattccaaaggagaaaaggtagaggagatcccgaggatcatttcccctctttcaattcggccggagatttggaaaggaaacggcggcggcgcgaaactagggtttcggcggcggcggccgaaggtagacgacgatcccgataggtgggacccacctgtcagcgacagcgcactcgcgcgcgggcggctgcggctgcggactgggccggctgggccgaggagagagagaagggattttgggccgactttcggcccaaagccaaaagaagacttt

SEQ ID NO: 53932 - DNA, 178 bp, Oryza sativa
  Clone ID: PAT_MRT4530_56085C.1
cggcgatgaagccccggtgttgctgagacttcgcgaagtggggcaatcacgacgagcacacgaggcacgcgagaacagcgctgcatgcggcgcttgcaacgagtggtgccagtcagcgtgccgcggcggcgagtgcaagttccgcaggaaccaccagtgctgccactgctactgctag

SEQ ID NO: 53933 - DNA, 2425 bp, Oryza sativa
  Clone ID: PAT_MRT4530_56086C.1
atgtcgcaggagtctccaggatcggggcatcagtctccgggatccgtttcacatgcgtcgttgcatcacgcgtccggctctctgcctgccacgccgacccctgcgccctcggctccctccctggcacaatcaccgaaccagcctggtgctgccacgacgccaaccatcagcgcttcctccacctcagctgctgcgcttgacacaggggctcatgatgctcctgacacaaccactgtactctatcaaatagacccagtgcatcaagattcaatggttcctccacgacctcacacaagacttcaaagcggcatctgcaaggaaaaggtatatacagatggtacagttaaatggtcttgtttttcctcctctggtgaacctcaatctctagatgaagcttttgctactaaccactggagggaggctatggatgcagagtatcaggccctcatgaaaaatcaaacatggcacttggtaccactgcagcaggggagaaatattattgactgcaagtgggtatacaaagtcaagagaaaagcttatggtagcctagacagatacaaggccaggttagttgcaaaaggcttcaagcaaaggtatggaatagactatgaggacacgtttagtcatgtagttaaggctactacaattagaactatcctttccattgcggtgtctagaggttggagctttcgtcaactagatgtgcaaaatgctttccttcatgggattttagaagaagaggtacatatgaaacaaccatcaggttatgagaatagtaaatttcctaatcatatatgcaagttggataaagctctatatggtctcaaacaggctccacgagcttggtattctaagctaagcacaaagctacaagcacttggttttaaaccatcaatggcagacacgtcactattcttctatagtaagggtgatgtcaatgtctttgttcttatttatgttgatgatataatagttgctagctccactccaagtgccacctcagcattattgcaggatttaactaaggagtttgctttaaaggacttgggagagctgcattactttttgggcatagaggtgaccagaacagaagatggaattctgttgacccaagctaaatatgcatctgatgtcctcaggcgtgtggggatgcaagactgtaaaccggcctacgatgattcagaccgaactggcaacccgaccctgggtcccagctcgtcccaagccaacccaggccaaccattccacattttagttgttaagcagactgagccacaaactaagccttacccactagacatgtggaagtacggtagtgctttgcaacagaggcccgaagaccggtccttatatggccgaggtgctactatcaaaaccatgcaccccgagcccagcctaaaaccattttggggattttgaatagagggggagatgatgtgacttgccttgctcgctttcccaaacgtcggcttcaacttccacgaagagcggatcttccgaagctgcagcgtcgggagcacgcggctggcggcggtcggcgccgtgggtcccacgcgtcagccgcacccgcgggcgcgggcggctgacggccgggcccacttggcagccgcgagggcgcgcccgagggcggcctcgccggcgcggccgacgggagcggcgcgcccgcgccccgatggtcaccgccggcgaccaccggcgcggcagagcggcgcccgagagagcggagagaagggggaaagcgaacggcggtcttcggctcaccccgggacaacgacgacgacgagaacggcggccggagtggaggaaagcggcggcgcggttcgggatgacgatgacgacggtgctccggcggtcggcgggcgaagcggagcggcggacggggtcggcaaccactcggcgaagccgatggaggtggcgccgattcgggaggaggaccggagcgacgacggcggcgaaacggagctcggcggcgacggcggagagagaggagcacggcgcgggcacgaaaccgacggcgagagcgagcggcgagcggcggaaacggaagagcgaagcacgagggacgattttaaagcatcgggagggggagagcgcggcccggggagagaggaaaccgcgcgcggagatctcgggcgccattgaagacgccggcgaacttcgcgggatgaatccggacgaatccgagggagagagagagggaaaagagggggaatcgggagagggaaacgcggggagtagcggcggcggcgggcgcggcgcgaggagggagatgacaggtgggccccacccgtcggcgagagtggcgggcgggcccgcctgtcagcggcgcgcgcgcgcgggggagaccgatgggccgcgggggaagagagagagagagggactgggccgagccggcccaagaaggaagggggggaaaaaggacttc

SEQ ID NO: 53934 - DNA, 6413 bp, Oryza sativa
  Clone ID: PAT_MRT4530_56087C.1
taaaaagaaaaaccctaaaatccctccttctctctaatgggccgaattcggcccatctccctccccctctctatctcctctcccccgcggcccattcggcctccctccccgcgcgcgcgccgatgatgggcgggcccgcccgccaccctcgctgacgggtggggcccacccgtcatcctcttcctcccgccgctcccgccaccgccgccgcgaatcctaccgcctcccgccgtccccgcgtgcaataaagtggggggaatcactccccgtgatcccctctccctttccccccatttttccctatatcttgcgttcaaacgggcggatttgcccccgcaaatctcgccggcgccattgatggcggccggacctcccgcgccggtttccttcccctccggccgctctctcccccttccaaccctatttaaaccctccccgcacctcctccgtccgtttccgcctctcgccgcccttcctcctcgccggattcgagctcgcgacgtcgctctctctctctctccaccgtcgccgccaagctccggtccgccgccgtcgtcgccccggaccgcctcccacctcggcgccgcctccttcaggttcgccgcatcctcgccaacctcgtccacctctccgtttcggtcgccgaccgccggaacgccgttgaccccgtcgacccgagccgcgccggcacctccctctggtccggccgcctcctccgtcggcaccgtcgccccggggtgagccggggaccatccgctcctttcccccttccctcccctttatcggctgccgctccgccgcgccggtggtcgccggcggcgaccatcggggcgtgggcgcgccgcctcccgccgaccgcgccggcgtggccgccctcgggcgcgccgagtggctgccgcgtggggcccggccgtcagccgcccgcgccctcgggtgcggctgacgtgtggggcctacggcgccggccggtgcgagcccgggtgcatccggtccaccgtggacccacctcggccatataaggaccggtcttcgggcctctgttgcaaagcactaccgtacttccacatgtctagtgggacaaatgaaggctacacgagctgcggcccggtagtcgagatgtcatggcacagggccggtgtcctgctactaggggctcagtcctgcctacctgtcccgggggttccggccgtaggtggggttgggtcgatgtacacctctgatcagagtataatctattcgaatagccgcgccctcggttatgggcaagccaagcaatgtacccaaatggccggcagcatcaaccgtcgtggtctggacctgactggcttcgttttggagctgcggggcatgtgcgttgtcctggggtatccgcatggagtagactaccagggcaagcagctcccggagcaggagggtgacgatgcagagccccacgctgcttgggaggttactgcagtgatcctcactggctcacccgagaggacttcgttggcagtcaccgcgggtggagattccttctccgccgcttgccagaacgccgcactcctcgccatcggcactcttcaccagcgctacccggacgagttgcagcactcgccctaccgctaccaccctcgccgcggaggagcccgcgactacgccaccttccgggatgctagctcggaggatgacgctaccatcatgcacctggcgcgcatggtggaggcgtacgacgcggcccgtatcgacttccatcagatggtgcgtcgcgggttggtcgagaacaacatgaagatcctggagctgcgtcaggagaatctgcagctggagaaggacctatacgcagtggaggcgcagctgcgtcagctcaagatcgcccagggagaggtctgtcgcctcaagcgccttcgggtctaccgcagcttgaagctccccgcccagcaagagtacctccaggcccgagcttgttcgtcagtccctggcgtggacctgcttcgtcgagacccctcgtgccgagctcgcgcccgtggttcctcaggaggatggagcctccggcgttggcagcacggaggatgcgctgttgctcaccttccatggtgacgaccaggagacgtgctaataccggtgatggcaatcaacccgaaggtagcaaccacaacaaccatggcagcccacctccacctcctcctccgcctccaccaccaccaccagacaccaacgccatcctcacccaaatcctcgcccagcaggccaacatgatgcctgctttcctccaccacatccaaaatccgccacaacataatgctccaccaccgcccccacaacactctaaactcgtcgagttcctccgcatccgtccgcctaccttctctagctccaataaccccgtggatgcattggattggttgcatgccgtggggaaaaagttagacaccgtgcagtgcagcgatgaggagaaagtcatcttcgccgcccaccaattgcaggggcccgcatctctatggtgggaccatttccaggctacgcagccagaagggcagccttttacttgggcccgcttcaccgccgctttccggagaacccatgtgcccgctgaagtcatggcccttaagaaaagggaattccgagagttgaaacaaggcaaccgctctgtgatggagtatttgcatgagtttaacaacctggcccgatacgccccggaggatgttcgtgaagataaggagaagcaagagaagttcttggcaggaatggaccctgagctgtccatgcgtctggtctccggggactatccggatttccagcgtttggttgacaagagcatccgcttggaagccaagcacaagaaactggagtcgcacaagcgttgcttggcgaatttccgcaatcaacagggggctaaccaaagggtccgctacaccaatccctatctagggggatcgtcctcgcagcagcaacagcagcagcaacctcgctccgcgccccgacctcatttcgtggtgcgcgtcccacagccgcagcaacagcagagtcagcaagggactcgtgcgccccgtcctcctacgccagccgtgcagcctggtcaaggccgcagggacgttcaaggtcagcagcgtctgtgcttcaactgcttcgagcctgggcactttgcggataaatgcccaaagccgaggcgccagcaaggccaaccgcctccccgccccaacaacgatggtaaggatgtcatttggggtcgggtgaaccacgtgacggccgaggatgtgctgacaactccaaacgtcatcgttggtacgttcctcattcattccatccctactaccattttgttcgactctggagcttcccactcgtttatatctgtgccattcgtggggagaaatcagttgggggtagaaaggcttaggaactctctgctcatcaccacccctagaggggttatgacagcaaagtattatagccctgccgttcctatagaaattcagggaattccttttccctcggatctgattcttctagacaccaagaacttggatgtgatccttgggatgaattggttggctcaattccaaggagtagtggattgtgcaagacgcactgtcactctgtaccgagggccggaacaaccggttgttttctttgctcccccaacctctgtcggtagttccgaacttcatcagataggactgtcagaaatccccatcgtcagagagttcggagacgtgtttccggaagaactacccggtatgccgccgaagcgagagattgagttccggatagatcttgctccaggaaccactcccctgtacaagcgaccctaccgtatggcatcaaatgaactggccgaagtcaagaaacagttggaagagttgaaagaaaaggggtatatacggccgagtacttccccctagggtgctcctgtgatttttgtttagaaggaagacaagacaaagaggatgtgcattgactacagagctctcaatgaagttaccatcaaaaacaagtaccctcttccccggatcgatgatctgttcgattagcttaaaggtgccactgtattctccaagattgatcttcgttccggatatcaccaattgcgtattcgtgaagaagatatccctaagaccgcattcaccacgcgatacggactgtatgaattcacggtgatgtcgttcggtttaaccaatgctcctaccttcttcatgaacttaatgaacaaagtgttcatggaatatttggataagtttgttgtggttttcattgacgacattctggtgtactcacaatcagaggaagaccatcagcaccatctccgtctggtgttgggaaagttgcgggaacatcaattgtatgccaagcttagcaagtgtgagttctggttgtccgaagtcaaattcttagggcacgtgatatctgctaaaggagttgctgtggaccccgaaacagtgaccgccgtcactggttggaagcaatccaagacagtcactcaaattcgcagcttcttgggtttggcaggatactatcggaggttcatcgagaacttctccaaaatcgctcgacccatgacacagttgttgaagaaagaagagaaatttgtgtggagcccgcaatgcgagaaggcgttccaaactctcaaggaaaagctggtttcctcgccagttttaatcttaccggatactcgcaaggacttcatggtgtattgtgacgctttgcgccaaggattggggtgcgtgctcatgcaggaaggtcatgtggtagcctatgcctcacgccagctacggccccatgaaggcaactaccctacccatgatttggagttagccgctgtggttcatgctctaaagatctggcggcactatctcattgggaatcgctgtgaaatatatactgatcataagagtttgaaatacatcttcactcagtcggatctgaatcttcggcagaggagatggttagaactcatcaaggattatgatgtgggaattcactatcatcctggtaaggccaacgtggtcgctaacgctctaagtcgaaaaagccattgcaacactcttgacgtccgtggcattccacccgaacttaatcaacagatggaagccctgaacctaagcatagttggtcgtggattcttggctacgctggaagccaagcctaccttgctcgatcaaatccgcgaggctcagaagaatgatccggatatgcgtggactcctcaagaatatgaaacagggtaaagccgctggtttcacagaggatgaacacggaaccctatggaacggaaatcggcgtgtcaaggcagagcaccaacgaccggccggacttctccaacctctccaagtaccagaatggaaatgggatgaaattgggatggatttcatcaccggacttccaaaaacccaaggcggatataattctatatgggtagttgtggaccgactaaccaaggtagctcggtttattcctgtgaagaccacctatggagggaacaaactagccgagctctacttcgctaggatcgtgagtctccatggcgttcctaagaaaattgtatctgataggggaagccaattcacctctcacttttggaagaagctccaagaagagctgcgtacccgattaaatttcagcaccgcgtatcacccgcagacagatggacagaccgagcgtctaaatcagatcctagaagatatgcttcgcgcatgtgtcctagattttgggaagacctgggataagagtctcccctatgccgagttctcctacaataacagctaccaagccagcatacaaatggcaccctatgaagcattgtatggacgcaaatgccggacatcgctattatgggaccaagttggggaaagccaagtgttcgggactgatatcctgagggaagctgaagctaaagtcagaaccattcgggataatttaaaggtggcacagtcccggcagaagagttatgcagataaccgacgccgtaatctggaattcgtagtggacgattttgtgtaccttcgggtcacgccattgcggggtgtacacaggtttcagacgaaagggaagctcgcacctcggtttgtgggtcctttccgtatcattgctcgacgcggggaagtcgcttaccagttggagctgcccgcctccttgggcaacgtgcatgatgtgttccatgtgtcgcaactcaagaaatgtcttcgagtgccatccgagcaggccgattcagagcaaattgaagttcgcgaagacttgacctacgtggagaggccagtgaaaatcctggacaccatggagcgcaggaccaggaaccgggtaatccgtttttgcaaggtccaatggagtaaccacgctgaggaagaagctacttgggagcatgaagacgagctgaaggcagcccatcccgatctcttcgccagttcttccgaatctcggggtcgagattccgtttaa

SEQ ID NO: 53935 - DNA, 568 bp, Oryza sativa
  Clone ID: PAT_MRT4530_56088C.1
acgacaaaccaccagcttggatatgaaagatgccacaatgaaagttcacataagctagacaggttagagccctgaaagctaccagctaaccctgcgtaatcgagacgcaaaggtttatcaaaaccaggctcacaaactgttagatagacgccctcacggacagatcattggatagctgtagaaatcaagcattgcctaggcgccaacctttgaaccctgaacctctctagtactaatcaccctcattacccttgtgaccatatttaaactcggagccgaccttttcgtggtgcttatacagcgcggtgaggtcctcatgggcctatgagaactccgcctactcacatgccctatgagacgtaccagaggacaaaggcgcgctgggagtacatgaagtccaacttgatgtagatgcaggagaacacctatacaacgctgggggagttggagatcatgcgcacggtcctctgtagcttggccaggtctcccccctggacaactctagtctgattgtagttgatgcctcacttgaaccccgtggggcaccactccaagaactggatgggcg

SEQ ID NO: 53936 - DNA, 102 bp, Oryza sativa
  Clone ID: PAT_MRT4530_56089C.1
atgaggctggaaccgccgctcgaccgcttcatggatcttgtcaacgagtcctccaacagaactcgtaggacgtcggacaatggcaacgaagctggaggaaat

SEQ ID NO: 53937 - DNA, 609 bp, Oryza sativa
  Clone ID: PAT_MRT4530_5608C.1
cccccgtggatcatcatgatgtgaccatggctactacggatacaaacgttgctcacatcatggatgaacaagaagatatcaagatcaagtcctccatgagctagaatctaattcggccaccttctacactgctgacttcaaacggccgccaaatctgcatgcgacctccgatttcagcccgtcagtacttcatggaaagctcttggagtcctctttccaatagacctagcctcatcgccaaattccatccaagtcatccgcagatgaagaaacaaggtgctgcgtcacctgtagttggcctttgggttgtgacttcgtttgggaccctagcccaagtggggcccatgtggggtgcgccccaactaggtggaggacgacctgggatcctcccatctccataaatagcttaaaataaggttgatctgcaccggcaagatcaacaactcacggggaggtgtatcgatctcttaggcgcaacacaacaacgtctctcatcaactcaccgaaagatcgggctaacaacagccttgagtgtcacgagtagagctcagggttcatcacttttgagccttgctttcttgtttccgctctcacccgtgttcgattcgg

SEQ ID NO: 53938 - DNA, 1158 bp, Oryza sativa
  Clone ID: PAT_MRT4530_56090C.1
ctatgaatcaccagccttttattgcatcttccccttcgtacaacatgtgacaaccgaatggctgcaacaatgaaattatagaaccctctctgtaacgaccaaataatcggagagaaaaaaaaaaggctcctcatttctactacctacttgactgatgtacatgtacagagcgcaacgcatgcccacgtcgccaccacaagttttaggacaacagcaagaagcctagcttccatttacaacctacaaacaatgcccacatcatgccggctgttccaagcactcttagtctgggaaccgggcatgcaaggaaatcggcgctcatcgcgtcggggaatccgcgatgccatccgcaccatcatccacggaccacgcatcggcgacaccaacgagccttcttgatttcagcatgtagcaatccatccgcgagctgaggcccgtgcccgcaaggacggcatgaaagggtggctcccaacaaacccaattaacgccgccacccaacaaccgcccccccgctcggccgctcccctccccagcccacaacagctcgagccgcacggaaggtgctcgacgaaatgctcccctcccccaacaagaagtcaagaacacgaaatggggacgcagtcacacaatccggccaaagaacaactagaaacctcagcaagcgcagcagctaaccaacccaaccagcagaaacccaaaaaaatctctcacgcagcagacgcgcccaccaagaacggggagaaaaacacaccacagcggaaaagaaaaaacgaaaccgatttctccgacgcgggatgagcaggcgacgcgaggaggagagtagccgcgcttgtagcttgcttgaggatggagatcgggaggggaatggagtggatcaatcggtcgcccgccccagctgcggatggagacgggagcgatcgatttctttttcagctcaaacaatcggacaggtcacaggcgtcgtctggtgttttgctcttgtcggctgctgtgcagtgcggtgcaatgcagtgcagtgcagtgctattcttgttgtgccttgtcaagatcagatttggttagaggtgaggtggactgctctttgtctttggcttttgcatttgccggccggttactctggttgacaaggtggtgaagccagacaaccaggtccagaat

SEQ ID NO: 53939 - DNA, 533 bp, Oryza sativa
  Clone ID: PAT_MRT4530_56091C.1
agaaactcgtcaagaccttctgctcgacgtcggatcactacactgggtacccaaaagtactggaggactatagtgattcaaactggatatctgatactaataagataaaggccacaagtggatatgtattcacacttggatatggcgctgttttctggaagtcttgaaagcagacgatcttaacgaggtcaacaatgaaagtagaactcacagctttagatactgcaacagttgaggccgagtggcttcgttagatcctgatggacttgtcggtggttgaaaaactagtaccagcaatcctgatgaactgtgataatcaaacagtaattattaaagtaaacaattcgaaggacaacatgaagtcatccaggcatgtacaaagaaaactgaagtttgtcagaaagcagaaaaactccagagtgatagcattggactatgtcaagacagctaaaaatctagcagatcagttcactaagggactatcacgtaatgcgatagacagtgcatcgagggagatgggtttgagacccact

SEQ ID NO: 53940 - DNA, 3357 bp, Oryza sativa
  Clone ID: PAT_MRT4530_56092C.1
atgggcagcgtggggctgaacgacacggtgtcaggggtggtgtcgaggaaggtgctcccggcgtgcggtggcctctgctacttctgcccgggcctgcgcgcccgatccaggcagcccgtcaagcgctacaagaagatcatcgccgacatcttccccgccactcaggacgaggaaccgaatgagaggaggatcgggaagctgtgtgagtatgttgctagaaaccatcatcgcgtgccaaagattacagcttacttagagcaaaggtgctacaaggagttgagaaatgagcagtatggctttgtgaaagtagttgtgctaatataccgcaaactacttgtctcctgtaaaaagcagatgccattactggcaagtagcgcattgagcatcatatgcactcttttggatcaaacaagacgggatgacatgcggattataggttgtgaaaccttgtttgattttaccgtctctcaggtggacggcacatatcaattcaatttggaagaacttgttccaaaactctgtgaattagctcagatagtaaaggcagaggagaaggataacatgctccgtgcatcaaccttgcaagccctttcagctatgatttggtttatgggcgagttttctcacatatcctccgcgtttgataatgttattcaagtagtgctggaaagctataaccttcaaaagatgcaaaatgacaatatagacagtgaagctccaggcaatcgggaagatgccaaggatcctaacttttggtcacgagtctgtgtgcacaacatggccaagctgtccagggaggcaacaacattccgtcgtgttttggagtccctatttcgtcactttgataataataattcatggtcttcccagaacacacttgccttttgtgttcttttggacatgcaaatattaatggaaaaccaagggcaaaacattgacttgatgatatcaatactggttaagcaccttgaacacaagtctgtactgaagcagccagagatgcaactcagtgtcgtggaggttatagcttcccttgcagaacaatcaagagctgaagcatcagccgcaaccataggtgctataagtgatcttattagacatatgaagaagacattgcatgtcgctcttggcagcagagatttggaggtcataaagtggaacgacaaactccggaatgctgttgatgaatgcatactccaactgtcaaagaagaattccaatcagatgcttcctagtgtggaacatacgccttactatgttggtattattacacaggttggtgatgctggacctgttcttgacatgatgtctgtgatgctagagaacatctcccgcactccccttgttgctatagcaaccacatctgccgtttatcgtacagcccagataattacttctatcccgaatttgtcatataggaataaggtatttccagaagcactctttcatcagttactcttagcaatggttcaccctgatcatgaaactcgtgtttctgcacaccgcatattttctgttgtccttgtcccgtcttctgtttctcccttctctaaatcaacatctccaaatcagcttgtgaagcatgatattaagaggactctctcaagagctgtctccgtcttctcgtcttcagctgctttgtttgataaattaaaaagggacaaagagtccttcagagaaaaaccacaggatggaagcatgaacagactttcgcatgctgctgacaatgatacttctacagtcaaggacatgccaagctcgcgaagtcgaaggcacagcttcaaagttcctaatttttctatgaaaagggttgcttcattgtctctgaaatctcccatgtccccaaaggaatgccaaaatacctcggccgaatcatgtagtgaaacggaatcaactttgttgagactaagcagtcgtcaggccacacttttgctgtcatctatttgggctcaagcaatttctcctaaaaatactcctcaaaattatgaagctattgctcatacttacagtttgcttctgttgttctcgggatcaaaggcatcaatctttgaggctcttgctccaagttttcaggtggcgttttccttaatgagttattcactagaaggaacagattcattgctgccatctcgccgtcgatccttgtttactctggctacatctatgattatgttcttttcaagggctttcaatgtggcacctcttatcccgatctgtaaatcaatgctcaatgaaagaacaatggatccattccttcatttagtacaagacaccaaacttcaggctgtgaaggactgctcagaagaaacctatggatcaccagaggatgataataatgcactgaagtctctttcagcagtagaactaactcagagtcaatccagagaatccatggcctctacaatcatgaacaacataagagatttaccagattcagaattacaaactataagaagtcaactgctaagtgacttctcccctgatgacatgtgtccaacaagtgctctcttttttgaattaactgtcagaaatccaggttgtgatgaggattctagcaatcaagaggatgtgctgatcaatatggcaaatgacaatgacacctttggggaagtctacgaaaatacagaagctactacagcatctgtgcccacagcaaatcttctgggtatcgatgagcttctagaatcagttgtcactgatgcaccatctcagactgcaagatgctcggtgtcaacggcccccaacatcccattcaaggagatgactaaccaatgcgaggttctttcgatggagaaacagcaaaagatgtccgtgctcctgagcttcaaacacaaaaaccaatcaaatgtcctgccgatcaatcaagctgacaacacgggagcagtccatatttcctctgacgaccagaatacgaacccttttctccagcaaagccttgatggctaccccaaatatgttgctgatggtgaggcactacaggtagcagctgatgatgtgttccagcagcaattcttgaagctgccagcatcaagcccttacgacaccttcctcaaggccgctggctgttgacactccaggggccatgctgctaagacaagacatgtactgattaattgtggacactaaaaagtctgcaattgtattgtaaccagtgtatgagtgcagcctcttcttaattgcaagatgtaaatctcctcctattgtcaatttgtcatgttccgatccaacggctgggaaggaacatcgcattctccctgcttttgtttgtgcaacggtagaggaatagtttgagaagttcaaactatggtacgaaacacataatttaatccatacaaatcgataaccttattttcttct

SEQ ID NO: 53941 - DNA, 294 bp, Oryza sativa
  Clone ID: PAT_MRT4530_56093C.1
atcgcgctcccgcacgtagcgaacaagcaggtggaggcgctgatgtacaaaccagggatgtattatctgtacgggaaggctaagcctttgttcaaggtcttcctctcttgatactaaataaccttttgtgggagcaggccatcgatctataccaatcaagctgactctgctgtgtacgtcgcagatggagaaacttgagtctgagccccatgcgtggcatctgcactagacctggtgtcccaacagctgctgacatcacatgtcaactacatctgcttgatgggctgtctgacc

SEQ ID NO: 53942 - DNA, 936 bp, Oryza sativa
  Clone ID: PAT_MRT4530_56094C.1
attatttccagcctccgccgacacaacgctaccgcagacccatccccaattccccatttcccatccaggagagaaaaccgagcgatctcgctctgacctccgagaggcaccattgaggagatggcggaagtgagcgcggcaatggggtcaaatcgttccgtccgcaagaagcttgcggcgttgctgtccgacgagcgcaaggatttcatacgggtgcgtagcaaggtaaagcctctgattgatgctcttgaatctgtccatgcctgctttgagaaattgtcgctcgaagatgagaagaatcttgatgcgttacaagaagcctggatgatggatttacgggagctgtcctatgacatggaggatagtcttgacaggtttcttgtcaaatctgctgctgaaccgggtagctgtaagaagctcttcaagatcttgttaacgaagatcaagggtagcaccaatgggattgttaaggtgatccaagatatcaagatgccagtcgaggagctcaacgaaaggatgaacagattcaagctcagtgatgaccgtcatgtaacatacgacccgatcaagatcgactcaagggtaacagctttatatgtggacgcttcacatcttgtaggtctggatgggccaaaactagaactaattaagatgttgcgcattgaagatgaacctgaaccatcaaagaagctggtggtggtctctattgttggtcttggaggattgggcaagacaactctagcaaaccaagtctatcatcatctcaagccggagttcgactgctctgctttcgtatcagtgggacaaaatcctgatgttctaaagatcttggataatatccttagtggactcacccatcaaccttatgccaccaccgggtcaacagtgcaagtactcgttgagaaaaccagaagattcatcgcggacaaaagatag

SEQ ID NO: 53943 - DNA, 339 bp, Oryza sativa
  Clone ID: PAT_MRT4530_56095C.1
atgccattctcctacgttgctatggcctctagctctgcgtcctcttctcgcaagccggttcccatcgccacagccagcgcccatcgattagttccattgccggcagcggcggcggtcgtggcggcacctacgccctcgccgtcaaacctagcacggtctccgagaccccttctcgtacttctccggggaagatacctatctcaccgcctccgatctggtggccgcttccgtcatctcctcccacctctccgttgtgggggatggcgccgacctctccaaggtcgggatcttcctcaactccacggcgcggcaccgctctgtaaatggcatatgggctct

SEQ ID NO: 53944 - DNA, 453 bp, Oryza sativa
  Clone ID: PAT_MRT4530_56096C.1
ggggggtaggcgcctttacacacactagaggacagaaccaagagatctccgcactaacgctcgctcaacgctgcgtagaaaacaactcatccttgccaaccaaacagcaggaccactgaggtaccgtacatacactcccaacatgctgttggtacacagcagtagacacagacaaggtctgaagaccttcctgcactacatgctcagcacacgaacacaaagcagcagcccagaccagaactgcaacacacggcaacatgctgggctgatcgcagaacagcagcaccaggcaacaactcatgatgcaggacaactgccaaccatttcttccgagagcgggaaagccctgaaccctctcaggtggaaaaacgtgagacccaggccagcactgactggcgtagggcgtagatcacaggtgaaaggacggaagaaccaacacaaccgaccccttgg

SEQ ID NO: 53945 - DNA, 486 bp, Oryza sativa
  Clone ID: PAT_MRT4530_56097C.1
gaagtaggagaacttggagttgagctggctgtcgagctcgatgatgccggaggcgccgttgagcgctcccggcgcgagatcctcgtctggctaactcatccgaaggcgagggtcaccgtcgtccccgacgacgggaacgtgaacgcgtcagtgcccagaacgctgagctctacgccggcgccgggaggtacgagggaaacagccaccggtggcgggaaggcggcaggcggagcactgcgtctagatgaggtcgctgccggtgtcgacgatggcctccgccggctgcggcgggtcgccgatgctgtagttggcgatgacgcaaggctaggcggaggcaaggcggaggcggtcgcgcgcgaggcggcggcggcgcttcgtgacaacggcggtagcggcaagctggcgctgtgggagcaggaggcgcccgcggtcgagaggcagcggcggcgctccgtgacaggcgagcgagctggagaggagaggtga

SEQ ID NO: 53946 - DNA, 486 bp, Oryza sativa
  Clone ID: PAT_MRT4530_56098C.1
atggtcgccgcgcgcgccgtcgtcgccggcgcggcgggggcggcagcgccatcagccgccggcaccgtctggttcggagccaacgacgccttccttcccgggcgcgccagggcgctccatgacgtgccgctcccggagtacatggacaacactcgcgccatgtaccagtacgtcggcgattgcgccggcttgccggagaggacgaacaagtcggccggcgcgtacgcgcgcgcctgcgtcgaggtgacggcggagtgcggactgagggtcatcgacatctggtccaagatgcagcgattccccggctgggagagctcattcttgagggacgggctgcacctgacgccgcgcgggaacagggtggtgttcgaggaggtggtgttcgcgctcaaggacgccagccttggcctcgaagcgctccctgccgacctgccgctcttctgcgacatggatccaaacaaccccgtcaagtccttcgacgaatga

SEQ ID NO: 53947 - DNA, 2286 bp, Oryza sativa
  Clone ID: PAT_MRT4530_56099C.1
cacacgacagtcgacagtagtacaactgaagatggataatgtccacataatcacaatcagctttatcaagcaacttttttttttttttttttttacccagaatcattattcatttattcccttttcatgcataaaaaacctattcccaacaaggttcgtactagcccacacaatcaggctcgtcccgttattatcaaccgatcaaattcaccacagattttattctaattaaaagtgcagctcatcgatcatcatctgtcgccctcagctcagacgtcgcaagtgagccagagcggctcatcaaactcgcccagcgactcgtccccggcgcccgggcccagcgacagcgactccagccccgccgccggcgagctcgccgggccccacgccggcgtgccgttctcgtaggcgttgcaggtgagcctgaccaaccccgagccgtcgagccggcacacgtacaggtcgccgtacggctggaactggttcggcgccgagatgggctccgccatcacgccgccgaagttggccgtgaacagcagccaccgcgagtccgggctgaagcacacgtggttgatccgctccctgtccgccgccgcgctccccgccggcccggcgacgtggacgcggcggagcccggagccgtctggccggaccaggtagatgctgaacacggcggcgttcgtcgggtcgtggcggttggaggagaacgcgatcaggctcccgtccggcgaccagctcggcatcgtgtcgatccactcgccgtcggtcagccgccggatcgtcccctcgccggcgccgacgtcctcgccgtgcgccgcgtcgacgatgtagaggttcttgtggccggagcggcctgaccggaacaccacccacttcccgcacggcgacaccgccgggaacgcgtcgttgccggcctccggccgggtgagcaccttgagcgtggccgcgacctcgtcgcggccggtggtgagctcgccggcgtcgaactccagccgcgcgatcctcaccgtcgctttggtggtctcgaagatggggcccatggaggtgaagatgaccccgctctcggcggggctccacgacgtgtagaacaggttgggctcccgcgtgagcacccaccgcttggcgccgtcggatcggaggatggtgacgcccggcgtcttgaagaagtcgccgttcatggcgaggtgcgccgcgtccggcgagaacgacgggaacgtgccgtacacgcgcagcatccggagcgagctcaccgggctctgcaccggctgcaggtagggcaccaccgagtccccccgcgcgccggcgccgcggaagcggtggtacccgacgcggtcgccggacggggagaagaaggggttgtagtggtggagctccgggttgaggcgctcggtgagcggggagaagctctccgtctcgaggtcgaacagctcgacgtgccgctgcgcgcgccccttccgccgcgtcgccacggcgatccaccgcccgccgccgccgcggccgaccgcggcgggagtgaagcagtgcagcccgggaggcgtcactcgcctctcgccgccggtgggctcgagggtctcaggcgagacgtccacccggaacacgctccaccacccgtcgtcggcgacgcggtggaagaagaccgtgccctcgccgtgccacgtcggccacccaccgcgccccaccacgacgacgcgcctggctggatcggcggcgcggaagacggcgacctccgtttccagcacgcggaagtcgaacgcccacggccgatccccgtacgacgcgacggcaacgagctccccggagtccgacacggcggggctcatgtccacgacgcccggaggactcacccgcaccgtctccttgctcccaatctccgtcgcgtacaccgccgcccagctcctgaacggcgccggcggctgctcgtgggcggagacgaagtacaacctcccgcccctcaccgtcgggcggtcatggaacaggctcccctccaccgtcggcagcggctcggcccgctgctcgggccccggccggcaccggaacagccccgccgcgccgcctcgctccgacacgaacgccacctcctccccgccatcgtcgacgaactgcgcgttgaagttcacggatacgccgtccgtgtggcggcgctcggcgtcctcctccatcggcggcagtggcacggcggcggagaagacgtcgaagccgaagttggtgacgccgacggtggcgaagacgatcgtgccggtgggctccatcgggaagtgtgtgtgcctgtgtgtgagccgtgcacga

SEQ ID NO: 53948 - DNA, 456 bp, Oryza sativa
  Clone ID: PAT_MRT4530_5609C.1
atgagccagatgttgaggctcgccgagttattcgagctcgtgttgacgagccgagctcgaatcgagctcataacaaatcaagctcgagtagctcacgagcctcgagcatttttgacagctctagcagcggttgcttggcggcgacggcaagatggtgatagcagtgcgtgtgccacaggcacccacagggagtttggcagcggcatccatggaaaaatacttgttggagctgctatggttgtaagtgatgcaaaacatgtgaaatcacgactacggaatttgcatggtatggagattgttggtaccagagtatatggagggggtcgcagtcgccggtggcttgggaaggtagaggaggaagcggaggaagagggatttgttaagaggagagaagactcggaggagggagagatggacaggggctatgcgctggaagagaggatttccggtgtggga

SEQ ID NO: 53949 - DNA, 597 bp, Oryza sativa
  Clone ID: PAT_MRT4530_560C.1
atggaagtgactcggcgtagacgcgacgacgcgagcctcaccgtcgacccatccagaagcatcctgccgccaatctactacaggccggacgccccggcgagagggggacgtgcaccggccaggtgcctgtacgcgcccgcgcgggcgccgcagccaggaggaccgcatcctcctccctccgccaacgagactcatagcggcggggggcgtcggcataaccgcgtcgcgcgggaggcggcgcctcggagcccatcgccgtcgacgccgtggcctgcgcaaagttcgctctctgcttcacgattgtggcggcgggggagcaactgcacgggtgatgacgtcgactgcaaaggcagcggcggcgacggcggctgcctcgcgtttgtaatcctcatggcggcagccatgtctccgatgaggccgcgctcctccaacgcgagttcgacgccggtggcggggaagaaggagaaggcgatgacgagaggtggtgctcacaatctgctgcaccccgatgcgaaaacactgcggcgggtcacggaacaccgccaccaccaacgctcaactccatctaggccatcgctggcgacgaaacccccctag

SEQ ID NO: 53950 - DNA, 745 bp, Oryza sativa
  Clone ID: PAT_MRT4530_56100C.1
atctggtcgaccgcccataaccgcgggcacggctattcgaatagctttactctgatcagaggtgtacaactgtacccacaagacacagccccacgacacgttaccgtgcgccgacatgccaccacgacataccggaaagaggccgtgacaggacccttcgcataaccccctctagccaagcacaccacacctcaggtttcacccccgtccccagcgggcaacgggcagtcccctctcgtgcctaggtgaatccggaagcgacagaggccgtcgcagggcccgccccgctccatcacgcccacccttgcctggatgcgtcagctagaggaaagctacactacaagcccagccgttgcccacgctggcttgtggtaagtacgataagttcttccagggcatcccgcgaaccggtccttaattgccatgggtgcgactagcaaaaccatgcacccacagcccaccattcagtcgcattttagttggataattacgaccatgaagcatggccagatgtctcgagcacgcagctcactctgatactaaaaaggtctaatactgtaattatcccatcaactgagctagtggtgattaagcatggctaagcatacagttctagctaggggaggtcgccggcggcgggaagaggcggcggcgctcctcggggaggcaacggcgacggcggttcggcggcgttccacggtggctctggttgtagtggggagggcggctcggtggtggattagag

SEQ ID NO: 53951 - DNA, 6154 bp, Oryza sativa
  Clone ID: PAT_MRT4530_56101C.1
atggatgatagagaatgtggggcccacctgtcgggcccgtctcctacctccagccggcgccaacgcatcccgcaaccgccgcaccgctcgctcccgcacctcctgggccacgtcgcccacccgaaggtttccttcgccgttgccgtcgccgtgggcctccgccgtcgcctccgagcccctttaaaaggatccccgccgtgctccgccgtcgctccagctgtcgccgccgctcgggaagaccgccgtcgtcatcgccaagtcgccgccgtcctcgtccgccccttcgcagccgtcggaacccgccggagcttcgtcgccgtcgacaacccgaagcgccgccgttcgccggtgagcgtgcgccgcccgagccgtccgctccgccgagccgccgccgccgtcggtgacgtcattgctggcgtcatcaaggccgtccgccgtggttccggagaccgtccaccgttcgtcgtcgcctcccactcattcctcgccgccgttcgccgtcgcccctccgtgccggccgaatcctcgggaagtgaccgtggcagttatcttgagactgaaggaattgagaatgatgctaccacgaaacatttggttgagatgttgtgggctatggatgaaagtcgtgcggagactgtgttagcagctcaagatcgtgaagatcggaatcgtggtaagatttgcaagttagaagacaaggtggatcgtttggagaaggaattagccgcattgaagggagaagcaccgccgcagaaggccaggattcgtcttaccgcaaggaagagagctctatttgtccctcgctatcaactggcgccaaaggttcgtgtggtggagaaagaagttgctccagctcaagcggatcctccggtcatcatcataagtagtgatgaagaagaagaatctaagcgcaacaattccaagattgagtgggagaaggtctcatttgcatcacatcagttgcatggccctgcctctgaatggtgggatcacttccgccttaacaggactactgctgaacctatcacttggcttgaattcaccgctgctttccggaagacgcatataccatcgggagtagtgtctctcaagaagaaggagttcaggtcgctttcccagggatctcgctctgttacggagtatctgcacgagttcaatcgtcttgctcgttatgctccggaagatgtgcgcaatgatgaagagcgccaggagaagtttttgggaggacttaatgatgagctttcttacccactcatggttggagattatcctgatttccagaaattagtggataaggctattcgtcaggaggacaagtacaatcgcatggagcagaagaaacgtcggattgctcaattcaagacacaacagggaaataatcagaagccgcgtcttactttaggaccccagcccatgccacagggaggttcttcgtctgttgttcgtccgcaacgtcagttcttcaacaacaatgctggcaacaacatccgtaatcaagctccacgtcctgttgcagctccagcacagcaacaacctgccaagagggagcaaggcaacaagcccgtggtgtgtttcaactgtggagatccaggacattatgctgacaagtgtccgaagccccgacgcgtgaaggttgtccctgcccagaataactctgctgtaccagcatccaaggctcgtgtaaatcatgtcgctgctgcagaagctcaagatgctccagatgtgattttggtccgggagtatcctgatgtgttcccagatgatttacctgccaatgagttggcagaagttaagaggcaagtagatgatttgctacagaaaggatacatcagaccgagttcatcaccatggggagctccggttatttttgtggaaaagaaagaccatactcagagaatgtgtgtggactatcgtgcactaaacgatgtgactattaagaataagtatccactacccaggattgatgatttgtttgatcaacttaaaggtgccactgttttctccaagatagatcttcgatcagggtatcatcagttgagaatcaaagaggaagatatacctaagacagcttttaccactaggtatgggttgttcgaatgtactgttatgtcttttggacttaccaatgcccctactttcttcatgaacttgatgaataaggtgtttatggaatacttagacaagttcgtggtggtctttattgatgatattcttatctactctcgaaccaaagaagagcatgaagaacatcttcgccttgcattggagaagctacgagaacatcaactgtatgctaagtttagcaagtgtgaattttggttgtccgaagtgaaattccttggtcacgtcatctcagccggaggagttgccgtcgatcctagtaacgtggaatccgtaaccaattggaagcaaccaaagacagtttcagagattcgcagtttcctaggccttgcaggatattatcggaggtttatagagaatttttccaagattgctaagcccatgacacgactgcttcagaaagatgtgaagtacaagtggtcggaagaatccttagaagcgaagcccactctaattgatcaagttagagaagcccaaattaatgatcctgatattcaagagatcaagaagaatatgagaagaggaaaagctattggtttcttggaggatgagcacggaactccgaaggtttccttcgccgttgccgtcgccgtgggcctccgccgtcgcctccgagcccctttaaaaggatccccgccgtgctccgccgtcgctccagctgtcgccgccgctcgggaagaccgccgtcgtcatcgccaagtcgccgccgtcctcgtccgccccttcgcagccgtcggaacccgccggagcttcgtcgccgtcgacaacccgaagcgccgccgttcgccggtgagcgtgcgccgcccgagccgtccgctccgccgagccgccgccgccgtcggtgacgtcattgctggcgtcatcaaggccgtccgccaggaagagttctacaatgaggctgatggtgtggaggattaggtgtagccttggtcaagctgcctgtggagtggagccgtctgcgccgtttatttattttccgctgcttagaatacgctcgggctaatggataagccgagtcgagtaataaaacattgttgaaattggcgttttgccagttgaggtaaatcttggctttcttcggtatttcaagcaagatgacttgtcggttgaagattacaagaccttgatgggaagcaattttgaagatgtcatcgacaagcgtttgaagactttgaaggagatgaagacacgcaggtatatgggcggtcagaccagcagggtccaagtccgagtatgttttcgtcgggtctcgggtttccttgctcgggaaggcatgtttcgtgtttcctttggtttcacattgatcaataaagcggccgatatgctccattgtagtcatagcattctcacctgtgaatttcgtgaagttgggcacctcaaatccttgcgggtataggaccgaatctacatattcaggatacggcctttgatatgtatgcataactactttggattctattgcaccactatcccgcaagacattgtcatcatcttttccaacatccacatgaccgatttgtgattcggtcttaggtgacaatgctatttcactttcgcttgtgatacaatccgaaccgtcacttagttcggctatattttcaatgatgttattctctaagctagctacacaatctaaaccatttcttggttcggctattccatcgttgtctaaactagtaacacaatccgaatcatcgcttgattcggctataatggttattgcattattatccacgctagcatttaagctattgttatccactcggctttcctgagccagagcttcatgcaacacatgatcagtatcaagaaatatctggccattcaatttctctttaatagaatcaagcaatccatcatatgcaatgttggcccgtgtagtcttcatttgcctagacatctcgattaccgagccgcagctcgcgtagccttcatttgcctcagagatatccatcgtcgcaacgacttcatccatctctatccgtgtccttttgttcaggacttcggcgatgaccgcgaaccacgcttcgggaacctccggaacgacagaagctacgcgaaacacacaagcaaagctacaagcgtgaacgactaccgacacaggtacacgggtaccggggtcgacagccgcacaacgggtacggggtgacaccaaaaggacgaggacaagggcgacgagggagagatccttaccaccacgcgacgaggcgtgggaacgacaacgacgaaggagcgcggcggagacggctcggggacgacggaggcgaacggcgagggaacgacttcggcggcgatccttggacgaaggtgagacgcggccggcgcagggcttgacgacacggagacgaggacgaagatgacgacggggctgcagcggctcgcttgatgaaccacggatggcgaaacacgatcgggaggacgacgaccggaacgggcgaggaggcgacgagggcagccggcagcagctgcacggaggtgaggacgacgtggaacacgccgctgcgatgcccacgacggtggcggcgcagcgagacgacgagccggcgaggaggaacgactgactggaggagtcgtcgacgaggacgaacggagacgacgataacgaacaccggcggggttcgggtggaggggaggcgaggccgaggacgacctttccgctgcgatgccggaggtggtggtggcgcggccgacggcgcacgggtggaggaagggccgaccggggaaattccggcgaggcggatggagaggccggcgcggcacggcggtgttccggcgaaacagaggagcagccggaggagaggacgacgctgtgacatcgatggaagagacggcgatgtcggtcggcgtaccggcgatgaacagcagccggccggagatggtgtagtggcggcgacgccactggacgccggcgggaagacgcctccggtgctttccgcgctaaacggaggacggcccgggggagaggaggcggctgcgagtccgagggtggcgacggcgcagccagacggcgcacgggcgaggtgggaggtgcggcgagggggttccattttataggggaggatagggtgctggccacgggaaaggcggagaacggcggcggaattcgtggccggcagtcaggcgcgcggtcagcgcgcttgcggcgcgcgtgagggggggtggcggctcgggaggctggggcggctgggtggggcggcttgggccgggaggcggcccaggcgggaggggaggaaaagggagcactaaacttggcaaattcgggaactctataatttcgaggaaacgacacattgtcataataattaggatatggctttttgtatgctctaacacgattcctaggttcaatcccgaatctattcctcataatatcactaatcatatcctccatgttattaggtccttgtggatttggtggtgggtttggtggcctaataggttgggtttgtggcgcaatatgattatattggccttgcctagtatcgggaggatatcccctagaaacatcattataagcattagaaatatgtgggggaacttgggaactagtaggttacatagtgtcaagggggcttatgggcccttgatgggccgttgggcgatcgccggccctatagcccctaagcttgatgggccggaaaggcttcttcggcccttgcgggggcgaactggacatggcgaagccgtccttcttcgagctggatgccaggggcgaactggtcatggcgaagtcgtccttattcggcagatttggtcgaagggcctcatgacatccgccaacaagcccctcacgggcaagggtgagagtggagcttcggccgagaccgtgcaaaccatgtggcggaagggaacagtattgggctttcctttgatgggccttttactgtgctgctcggatgatgtgaatttaccgtttcgcctatccctgcgccacgtggcgcttttatgggttttttactgtgctgctcggataatgggattttaccgttacgcctacccttgcgtcacgtggcgccttatgagtggtgggtag

SEQ ID NO: 53952 - DNA, 3611 bp, Oryza sativa
  Clone ID: PAT_MRT4530_56102C.1
ctacatatactttcccctcagcacctgaaggcataaactctgatcattggattccaacttaataatccacttggccagcagagctgcattcatcctccttgtttcagtaaaaccaagccccccaaagtccttaggaaaagccatgtcttcccatttgaccatgtgatatttacctttcaatttgttaccagcccagtaatacctccctcttatcttgtcaaacctctgatgcaccccttcaggaagaagatagaaccccatagcataagaaggaatagaggacatacaagcattaatctgcacagctctcccagcatgagaaagactaccaggtccccaatttcccaatctcttctctagtttctgacctaagaaatcaaaatcaggatttaaaaccttctcagggctaattggcaagcccaagtatttcataggaaagtgacctataggacaattaagcatttgagaagctccaatagtatcagattcctctaaccctatagtgaaaacctcactcttgtggtaattaatttttagaccagccatctcttcaaagcaataaaggataaactttgtggcagtaatctctatcaagaactcccatttgaccctatcatatgctttttcaaaatcaatttttaaaataatcccttctctatttttagtcctcatttcatgtaacacctcatggattgtcacacagccctcaagaatgaatctcttgaggccaaaagctctgcaaaaaaggatgctaaaaccatctggactaggagcagtgttcaattttgcctcctgaagcgccttatctaactcctcaatcttgaagggtctaatcaaactctctttgttgtcagcagaaaggttcagaccgccactccagatatctctccccgcagtcctcctctctctcccgtgcctccggccgcctccagccgcctctccctcctcgccggagcgccgtccggtcgcgccgtcgcctcctccagcatcgcagccgcctcctcttcgccggcctaccctctgttttccgcggagacctccggaagtgcctccccgccggcaaccgtggtgttgccgccacgattccgcctccgcccgcctctgccgcgtcccctgtgcgccggccgacgtcgccaccacctctcccggcaccggagtgccgtcctctttcccggccaggccacggcgtcgcccgaatttcgccggaacgccgtcgcccgcgccggcctctccttcctcctcgtcgacgtctcctccggcagcccccttccgccgcgcccgtgcatcagccggcgctgccgtccctccctcggcacggtgacgtagccctccacctcgtccacccctcggtttcgcccggaagccgccgcacatcgccgcgaacctctccatccgcctcgccggagttgttcggccgcccgtccctcctcgcccgtgcaccggtcggccacacctccaccatcttcggcatcgcagccgcgacgtcgtcctcggcatcgcttccccttcggccgaacaccgccggtatccgtcgtcgtcttcaccgttcatcctcgcccggttcgtcgtctcgcggcgccgcctccgtcgtgggcatcgctgcggcgtgttccacgccgtcctcgcctccgtgcagccgctgccggctgccctcgtcgtctcctcgccggtcccggtcgtcgtcgtcgtcgtcctcccgtcgttcccggtcgtcgtggcgttcgtccctctgtcaagccgttctcgtccgtcctcggtgtttcgtcaaggtcgctgtagccgtcgtcgtcttcgtcctcgcctccgcgtcgtcaagcctcgtgccggccgtgtctcgccttcgttcaaggatcgccgccgaagtcgttccctcgccgtccgtctccgccgcgcccgttcgtcgttgtcgttctcacgcctcgtcgcgtggtggtaaggtctctcctcttgctgccccgccctcgtcctttcggtgtcgccccgtacccgttgtgcggttgtcgaccccggtacccgtgtaccggtgtcggtagtcgttcacgtgtgctggagtccgtttgttggccactcgcctcggttgacacatggggtccgcttccgtcgacccgtggaccgtctctgtgtactcggtctaccgtggtcctttaggttgacatgtggggcttgtagctttgcttgtgtgcttcgcgtagctttcgtcgttccggaggttcccgaagcgtggttcgtggtcgtcgccgaaggttcggaaggccgttctctctgagcaaggcaatctggttataaacaaaagtacacggatggagatggacgaagtcgggggtcgatggacatctctaggacaaatgaaggctacacgagctgcggcccgaataagtgaaacaaacaacacatcagcaagaagagttagttcctttaaggtcctgtccctagttctgatgtttaacagagaaaaaggaaagaatgtcagcgggtatgcctctagtaacttaagtttccaactcaatccaccactggcctcaagagagttaacaagggcacacccttggtccattccaagcatgctgcttagttcacagctaccattggttggaagtcaagaccaaaatcggtatgtgtttgatcgagcatttgccacccaggtcaatgagcttccaatgccagaagagcatgtccccttttgtcatgattgtagagaacaaggacactatgccctgaattgtccatgggtatatgccaaagaagccccttcctttggtttagcagggcagacatcgctaaaccagcctcctcacaccaagtcaagcttgcagcctagtgtgcaaagtagagagcccaatggagagaatccattgaataccgggaaatgctttcctcctagcctttcgcaccacgtggggtcacgtactaagcaagccaaaggcaagaagagtaagaatcagaagagaaaagcaccgatgcgaactgaagaagaagtacgtaagatgactattaccaacaccgaatggcctccagcagggataactattcctagacgtcaaagaggaaataccttccgaggtgcacgacagttgacccagcacctcttaagccatggcggcagagtatctgatagtgaagggtcagatcaagtctccttggattatgaagatgagtctccccgacatgtcggcagggatgagatggaatcaaaagcatgcccccattgtggagaaattggacatgttgctagcatgtgtctcacactctgccctcattgtgaggaagaccatccaccaggtgaatgtcccacccgcaaggtgacatgttttctgtgcgaagcaccaaccattctctgcaccgacggcctcagcaaagaattgtcgtcgatggaagaagttgtgtctctccccgacctactccaggccgagcaaagggcaatcaacctcaggagggcgataccaagcagaagaccgttatctgcttcgaatagcaatcagaaggaagcttctcctgtgaatgatagcaatatacagtcctatcacatcatcacagaaccaatcaaggatgcagtcactagaacaatgccagctatatctctccagaatcagaatgagtatccatgtttgtga

SEQ ID NO: 53953 - DNA, 354 bp, Oryza sativa
  Clone ID: PAT_MRT4530_56103C.1
atgcagatatacggagccaaggtagaagtagcctgtgaaaccgaaggccccaacacacaggcgaactctgtatttacagcaaccgatgagttcggcaacttcaccttccacctcccttctcggctccacgccacaccaagcctcgagaacgcctgcgtcgtcaaggtgctccagctccctccagactctgcatgtggccttcgtcaccgtcccgccgcctcctaccgcatccggccatcgtcctcgttgtcgtcgtcggctgatggcttccgcgcctacacggccggggtgatacggctgcagcacggcggcacgccgtccggggagtgcgtgcaggaacattttggaaaatag

SEQ ID NO: 53954 - DNA, 6499 bp, Oryza sativa
  Clone ID: PAT_MRT4530_56104C.1
agatgattttataaaaagaaaaaccctaaaaagtcccccttccctcccttgggccgaattcggcccatctccctccccctctctctcctctctccccgcggcccactcggcctctccggggcgcgcgcgccggctgacgggcgggcccgcccgccaccctcgctgacgggtggggcccacccgtcatccccttcctcccgccgctcccgccgcctcccccgcgccctagcgccgccgccgccgcgaatcccgccgcctcccgccgtccccgcgtgcaataaagtggggggaatcactccccgtgatcccctctccctttccccccatttttccctctctctctcgcgttcaaacgggcggatttgcccccgcaaatctcgccggcgccattgatggcggccggacctcccgcgccggtttctttcccctccggccgctctctcccccttccaaccctatttaaaccctccccgcgcctccctcgcccatttccgcccctttgccgcaccgtctccccgccggaatcgagctcgcgccgtcgccctctctctcctccgtcgccgacgacctccggccggccttctccgctcgccgggaccgtctcccgccccggcgtcgcctcctccggcttcgtcgcaccgccgtcgaccccgtccaccccctcgccgagtccgccgaccgccggaacgcagtcgaccccgtcgacccgagccgcgcctccgccttcctccgctctggccgcctttttcgtcatcgccgtcgacctaaggtgagccgtggaccgccgcctcttttcccccttcccttcccctctctcggccgccgctccgccgtgcctatggccgccgccggcgaccataggggcgcgggcgccgcctcccgccggccgcgccgagtggccgccttcgggcgcgccgagtggccgccgcgtggggcccggacgtcaaccgtccgcgccctcgggtgcggctaacgcgtggggcccacggcgccggccggtgcgagcccgggtgcgcccggtcaaccgtggaccggtctaatatttgttttcaccggggtcatagctagtaaaataaagaggatatgagaggttaaaataaaatcatcggggtctactgaccccggtaattgactgtaccttcgcccctgcttcaaatggccataacttggccatttgaactcggaattggaccgttcaagtctcttttttttccttaagaagtcaagaacccatttttgtgctttgttcctgcttgttatatggagtttattagagtaaaagcccttttattttccgttggtcgtgtagacttttgtttgtagatggccggcagcatcaaccgtcgtggtctggacctgactggtttcgttttggagctgcggggcatgtgcgttgccttggggtatccgcatggagtggactaccagggcaagcaactcccggagcaagagggtgacgatgcagagccccacgctgcttgggaggtcactgcagtgatcctcactggctcacccgagaggacttcgttggcagtcaccgcgggtggagattccttctccgctgcatgccagaacgccgcactcctcgccatcggcactcttcaccagcgctacccggacgagttgcagcactcgccctaccgctaccaccctcgtcacggaggagcccgcgactacgccaccttccgggatgctagctcggaggatgacgctaccatcatgcacctggcacgcatggtggaggcgtacgacgcggcccgtatcgacttccaccagatggtgcgccgcgggttggtcgagaacaacatgaagatcctggagctgcgtcaggagaatctacagctgaagaaggacctagacgcagtggaggcgcagctgtgtcagctcaagatcacccagggagaggtctgtcgccccaagggccgccgcgtttgccgcagcttgaagatcaccgcccgcaagagtacctccaggcccgagcttgttcgtcagtccttggcatggacctgtttcgtcaagacccctcgtgccgagcccgcgcccgtggttccgcaggaggagggagcctctggcgttggcagcacggaggcttgcgcgtgtgttcttctcatggtgacaaccaggagaagtgctgctaccggtgatggcaaccaacccgaaggtagcaaccccaacatccaaggcggcccacctccacctcctcccccgcctctaccaccaccaccagacatcaactccatcctcacccaaatcctcgcccagcaggccaacatgatggctgctttcctccatcacatccaaaatccgccacagcataatgctccacctccaccaccacccccacaacactctaaactcgccaagttcctccgcatccgtccgcctaccttctctagctccaataaccccgtggatgctttggattggttgcatgccgtggggaaaaagttagacaccgcgcagtgcaacgatgaggagaaagtcatctttgccgctcaccaactgtaggggcccgcatctctatggtgggaccacttccaggctacgcagccagaggggcggcctattacttgggcccacttcaccgccgctttccagaggacccatgtgcccgccggagtcatggcccttaagaaaagggaattccgagagttgaagcaaaggcaaccgctctgtgatggagtatttgcacgagtttaacaacttggcccggtacgccccggaggatgttctgaagatgaggagaagcaagagaagttcttggcaggaatggaccctgagctgtccgtgcgtctggtctccggggactatccggatttccaacgtctggtggacaagagcatccgcttggaagccaagcacaaggaactggagtcgcacaagcgtcgcttggcgaatttccgcaatcaacagggggttaaccaaagggtccgctacaccaatccctatccagggggatcctcctcgcagcagcagcagcagcaacaccacgctccatgccccgacctcaattcgtggtgcgcgtcccacagccgcagcaacagcagagtcagcaagggacccgtgcgccccgtcctccctgcgcccgttgtgcagcctggtcaaggccgcagagacgttcaaggtcagcagcgtctgtgcttcaactgcttcgagcccgggcactttgcggataaatgcccaaagccgaggcgccagcaaggccaagcgcctccccgccccaataacggtggtaaggatgtcattcggggtcgtgtgaaccacgtgactgctgaggatgtgctgacaactccagacgtcatcgttggtacgttcttcattcattccatccctgctaccattttgttcgactctggagcttcccactcatttatatctgtgccattcgtggggagaaatcagttgggggtagaaaggcttaggaaccctctgctcatcaccacccctggaggggttatgacagcaaagtattatagccctgtcgttcctatagaaatccagggaattccttttccctcggatctgattcttctagacaccaagaacttggatgtgatccttgggatgaattggttggctcaattccgagtagtggattgcgcaagacgcactgtcactctgtaccgagggccagaacaaccggttgttttctttgcacccccaaccactgtcggcagttcagaacttcatcagataggactgtcagaaatccccatcgtcagtgagttcggagatgtgtttccggaagaactacccggtatgccgcccaagcgagagattgagttccggatagatcttgctctaggaaccactcctctgtacaagcgaccctaccgtatggcagcaaatgaactggccgaagtcaagaaacagttggaagagttaaaagaaaaggggtacatacggccgagcacttcccccgaggtgctcctgtgatttttgtggagaagaaagacaagataaagaggatgtgcgttgactacagagctctcaatgaagttactatcaaaaacaagtaccctcttccccggatcgatgatctgttcgatcagcttaaaggtgccacggtattctccaagattgatcttcgctccggatatcaccaattgcgtatccatgaagaagatatcccgaagaccgcattcaccacgcgttatggactgtatgaattcacggtgatgtcgttcgggctgaccaatgctcctaccttcttcatgaacttaatgaacaaagtgttcatggaatacttggataagtttgttgtggtcttcatcgacgacatcctggtatactcacaatcagaggaagaccatcaacagcatctccgtctggtgttgggaaagttgtgggaacatcaattgtatgccaagcttagcaagtgtgagttctggttgtccgaagtcaaattcttagggcatgtgatatctgctaaaggagttgctgtggaccccgaaacagtgatcgccgtcactgattggaagcaacccaagacagttactcaggttcgcagctttttgggtttggcaggatactaccggaggttcatcgagaacttctccaaaatcgctcgacccatgacacagttgttgaagaaagaagaaaagtttgtgtggagcccgcaatgcgagaaggcgttccaaactctcaaggaaaagctggtttcctcgccagttttaatcttaccggatactcgcaaggacttcatggtgtactgtgacgcttcgcgccaaggattggggtgcgtgctcatgcaggaaggtcatgtggtagcctatgcctcacgccagctactgcctcatgaaggcaactaccctacccatgatttggagttggccgctgtggttcatgctctaaaaatctggcagcattatctcattgggaatcgctgcgaaatatataccgatcataagagtttgaaatacatcttcacccagtcggatctgaatcttcggcagagaagatggttagagctcatcaaggattatgatgtgggaatccactatcacccaggtaaggccaacgtggtcgcagacgcgctgagtcgaaaaagtcgttgcaactctcttggcgtctgtggcattccaccggaacttcatcaacagatggaagccctgaacctaagcatagttggtcgtggattcttggctacgctggaagcaaagcctaccttgctcgatcaaatccgcgaggctcagaagaatgatccagatatgcatgggatcctcaagaatatgaaacaaggtaaagccgctggtttcacagaagatgaacatggaaccctatggaacggaaatcgtcgtgtcaaggcagagcatcaacggccggccggacttttccaacctctacaagtaccagaatggaaatgggatgaaattgggatggatttcatcaccggacttccaaaaacccaaggcggttatgactctatatgggtagttgtggacggactaaccaaggtagctcggttcattcccgtgaagaccacctatggagggaacaaactagctgaactctacttcgctaggattgtgagtctccatggcgttcctaagaaaattgtatctgatcggggaagccagttcacctctcatttctagaagaagctccaagaagagttgggtacccgcttaaatttcagcaccgcgtatcacccgcagacagatggacagaccgagcgtctaaatcagatcctagaagatatgcttcgcgcatgtgtcctagattttgggaagacaggggataagagtctcccctacgccgagttctcctacaataacagctaccaagccagcatacagatggcaccgtacgaagcgttgtatggccgcaaatgccggacaccgctattgtgggaccaagttggggaaagccaagtgttcgggaccgatatctttagagaagctgaagcgaaggtcaggaccattcgggagaatctaaaggtggcccagtctcggcagaagagttctgcagacaaccgacgccgtgacctggaattcgcagtggatgactttgtgtatctctgggtcacgccgttgcgaggtgtacaccggtttcagacgaaagggaagctcgcacctcggtttgtgggtcatttccgtatcattgctcgacgcggagaagtcgcctaccagttggagctgcccgcctccttgggcaacgtgcatgatgtgttccatgtgtcacaactcaagaaatgtctccgagtgccatccgagcaggccgactcagagcaaattgaagttcgcgaagacttgacctacgtggagaggccagtaaaaatcctggacaccatggagcgcaggaccaggaaccgggtaatccgtttttgcaaggtccagtggagcaaccacgccgaagaagaagctacctgggagcgcgaagacgagctgaagacagcccatcccgatctcttcgccagttcttccgaatctcggggtcgagattccgtttaaggggggtaggtttgtcgcgtcccaaatcgactctaaaatctatcctc

SEQ ID NO: 53955 - DNA, 4346 bp, Oryza sativa
  Clone ID: PAT_MRT4530_56105C.1
tttcctcctcttataaatttttttttcagatcaagatcctgctatggcagtgtcacgtcctgataaattcattccgaaataaaaatcattcctcacctctccctgccttctccttctctctctccggtgccggccggcctccagccgcctctccctcctcgcccgagcgccgtccggtcgcgccgtcgccgccctcggcctcacagcagcctcctctcccccggcctgccctccgtttcgcgcggagacccctggaggtgcgcccccgccggcaacagtggcgttgccgccactgttccgcctccggccgcctctgccgcatctcccgtgcgccggccgacgtcaccaccacctctcccggcacgggaacgccatcctcttccccggccaggccacggcgtcgcccgaatttcgccggaacgccgtcacccgcgccggcctctccttcctcctcatcgacgtcgccttcggcaggctcttccgctgtgcccgtgcgccggccgacgtcgccatctccacctccggccccgccggtgttcgtcatcgtcgtcatcgttcctcctcgccggctcgtcgtctcgcggcgccgcctccgtcgtcggattcgcagcggcgtgttccacgccgtcctcgtctccgtgcagctgctgctagctgtccctcgtcgcctcctcgccggccccggtcgtcgtcgtcgtcgtcctcccgtcgttcccggtcgtcgtggcgttcgtccctccgtcaagccattctcgtccgtcgtccgtgtccgtcaagtgtgccgctgcagccccgtcgtcgtcttcgtcctcggctccgcgtcgtcaagccttgtgctggccgcgtctcgcccgtgtaccggtgtcgatagtcgttcgcttgtgcgtgtggtgaccctgttagtgtgcccgctcggtagccgcgtggtttcacgtgtgcagcccgcgtggtgtctagtggagtccgtttgttggccactcgcctcggttgacacacggggtccgcttccgtcgacccgtggaccgtctctgtgtactcggttttctttttatgtattgttattgcttctttataggcttgtagctttgcttgtgtgcttcgcgtagtcttcgttgttccggaggttcccgaagcgtggtttgcggtcgccgccgaaggttcggaaggccgttatctctctccccctctattcaaaacccccaaaatggttttaggctgggctcgaggtgcgtggttgggttttgtttgtcgtacctcgggtactataaggattaagctcgggcctctgttgcaaagcactaccgtacttccacatgtctagtgggtaaggcttagtttgtggctcagtctggttataaacaaaagtacacggatggagatggacgaagtcgggggtcgatggaatatttgcgtgaccgattctgccttgccttcttcccagttactcgtatcattgcccttcgagtagagatcctcagtttccagcagatcaaaaacgaatcgatcggtgcagcctggtccatattcactgatttagtgcagtccggaccaaccttttcctttcctgagtatgtgcttttgcaacattttcatacgagtctggataaggaatcggcattctatctggacataaccgtcggaggatcattcatgcacaaaacaccgtcggaaggaaaagtaattctagatcgcattctagaaaatacttccttcatgacacaatctgattagccctatccagaggcatccgtgtccaagatagagaaaccttcaacaatcgagacacaacccgaaccttccatttccactaactttctataaaagccggcatgtcccaagaaactgcggatccccttgatattctgcagacaatgaccgaaggtctttccatagacagagaagtcatccatgaagacctccataatgtcctcgatcatgtccgagaaaatagacatcatacacctttgagtcctccggatggataggaatttgatgattcccggaatactgtaacatacctgaattctaggattaaggaatttccatcaaaactagttgaaagggaatctgatcaacacattaagtattgaagctacaaaattagaggagaaaataattccggaaattcgtccaaaaaccaagctcacccatgtttctgcctacacatctctcttccacctagtttacttcgacctgggccccccttgtcagtccctccggcttgcccttcctctgtgcaacttccctagccgaccgagaaacactgagagggagagatcgagcgccgaccggctctggacgccgcacgacgcgtggccacgaccgctgccatgcacaccggagctctggagcgcgctctgcgcaccgccgcagcaacatcgtcgccgttgccatcaatctagatcaagccggagcgagccaccacgccaccagcttcacctcaacctcctctccatttcccctcaagaatcttcaagaatggtgctacgagtgtggagatcgtccaccgtcttctccacctccggtcgccgtcgccattgtcgattccgcctcctccggtgagccattgtccgattcttcgcgtatacaccatccctgggacctcactaaccccatgaatgctccaatcattcaacctcctgattggactttgcccttcgagattatgtgtgatgcaagcaatttcgctgttggtgcggtcttgggccaaaccaaggataaaaggcatcatgcaatctgctatgcaagcaaaactctaaccggagctcagttgaattatgcaactactgaaaaaggagctgctcgcggttgtttttgctatcgataagtttagatcttacttggtgggagctaaggtgatagtttacactgatcatgctgctctaaaatacctgctcactaagaatgatgctaaacctcggatcttaagatggattttgctgctccaagaatttggcttagaaattaaggataaaaaggagtagaaaattccgtagcagatcatttgtttgggctgcaaatcactgacacgcaggaccaaccgataaatgatttcttgagagacgacatgctgatgacggttcgtgactccaacccgtggtataccaacatagtgaactacatggtgtcaaaatacataccaacggaggaaaatcaacggaagctgaaatacaagagccgctgtcatatatgggatgatccttaactgcacagggaagattcgaaagaatttgtcagaagatgcccaagctgccagaggctaggaggaatcactgctcgtgatgaaatgcccctcgcatacaacctgcaagtcgaaatatttgatgtttggggtattgactttatgagaccttttcctgagtcccgtaactgcgagtatattctggtggcagtcgactatgtctccaagtgggttgaggctatgccgtgcagcgccgcggatgtgaagcatgccaagaagttcataaagatcatcttcccaaggtttggtactcataggatggtcataagtgacggagagctcgagcacagagcatattggcccatcaggaactggaatatggactttgaaggagcaggggaatggatgaaaatacagatcgctgaacttgaagaatggagagagaaggcatatgacaatgctaagatatacaaagaaaggacgaagcgctggcatgataaaaggataaaaatcaggaaattaaaaccaggagacaaagtgctgatgttcaactccagggttaagcttttcggccatgggaaattacgcaataaatgggaaggaccgtttgacgtcatcgacacctcttcgcatggggtaatcacactccgtgacgattcagagaactttacgatggaaggggtgaacacactgtgggcgagctcatcggcgagctccctagttcggctgaatcaggcccctctcggccccccgttcagcagcacgatccctttcccctcgccatgtcaccaagactaaaatccggggtgattcgcctgtgcgacggcccacaacgggaaaactcggtcttttgaaggcgagacgtcttttccaatacgatgagaaggctgctccgcctcccgccgaacggtatgtgggcaccctatacaccaaggcagcggatgaggtgctccacaaatacatcacaccctccgccactccatctactcccaaggaggaccgattttgcattcggggagtgcaaactcccgacggtgggtatggtaaaggattgcaccggcctttgacgcaatcggacaaggaggaggcagcggagtcccgtagccctccacctatgaaggtgaagtgtcgtttgatgccccctccgaccaaatttggtaatcta

SEQ ID NO: 53956 - DNA, 383 bp, Oryza sativa
  Clone ID: PAT_MRT4530_56106C.1
agcctttggtccggcgggtggtgtggcggtggcgcgactagtggaggtagggcttcctgccttagaccagcctgttctccctctgggccttggcgcgggcacggtgacggcggaggatgccttcgtactgcttcgcgttgacatagattcggcgcatcggtatggcgcgtttagcggcatgtatgcattcgccctgccacctcatttgatttccatccgcgttaggtggtcaataagaaccatagcatttggctccataccaaggaataacttggtgagaggacctgaaaccacatggcctagtaatgttaacccaaattaggcaacgcataacacaccttgatggttactattcagaaaataaaatctttttagtaagtaca

SEQ ID NO: 53957 - DNA, 831 bp, Oryza sativa
  Clone ID: PAT_MRT4530_56107C.1
acgcaaaaccgagccgtcgccactctccggcgagctccggcctcctctagccgccgctctcgccatcgccgcatgcttaattaccactagctcagttgatgggataattacagtattagatctttttagtatcagaatgagctgcgtgctcaagacatctagccatacttcatggtcgtaattatccaactaaaatgcgactacatggtgggctgtgggtgcatggttttgctagtcgtgcccatggcgattaaggaccggttcgcgggaaaccctggaagaatttatcatgcttaccataagccagcgtgggcaacggctgggcttgtagtgtagctttcctctagctgacgcatccaggcaagggtgggcgtgatggagtttggatgggtcctgcgacggcctatgcggcttccggattcacctaggcacgagaggggactgcccgctatcttgcgaggagtgggggtgaaacctgaggtgtggtgtgcttggttagagggggttatgtgaagggtcctgtcacggcctctttccgacgtggatctgtatgtcaacattgtcgtttgtgtaccccggctggtcctggacggggattttaatgcacattctgcttggaattctattcgggaatttctgggcgtgacacgtgctgcacgcctgaccggcggagttgttccatccgctctggtcaaagtaaggctcccgtttcccggtggaacaggagcccagaggtcttcacccattaaatggcgagtggctcgatttgatgggacccatgctgtgacgcttgtgcatatggcttccgagtcaaagaacaagacatgcatt

SEQ ID NO: 53958 - DNA, 658 bp, Oryza sativa
  unsure (1)..(658): unsure at all n locations
  Clone ID: PAT_MRT4530_56108C.1
ccgggntcgacccatcgcgtccggaaaatagtaaatcaaatcttcttgatgcctatggtggcgcaattcaacggaaggatgagctcagctgcatcaaaactaatctggaagcaatgggcaccctccaaatgcaaacactgtgcctggctattgctacaaaatagaatttggacagcggattggctacagatcaggcaatggccaaacaactatttctgtcaactgtgctacaggaatctagaaacaactcaacatctcttcaaggattgcccttttatgcgatatatttgggagagggtcctaggtaggctgaactgcaataaaattgactagacacatgatgaaaatgtgccactgctggactggtggatcagaaggacatctcgaggtggaaaagacagagccaaagaaaaaacaatcagtcgacatactggtagcatggaaaatatggtgtgagcggaacagacgagtatttcaaaatcaggataaatccgcagctgctagacaagatacaggataaaatcaagctatgaaagatatgtggagcaacaaatatcgcgagattatccgcctaggatgttttcattgtttagtagcttctaaaaaaaaaaaaaacaaaaaaagaaaataaaaataattaaaaagaatctagataagt

SEQ ID NO: 53959 - DNA, 246 bp, Oryza sativa
  Clone ID: PAT_MRT4530_56109C.1
atgagacaagagcggtctatacaggttcggaccgctgagaagcgtaacactctactcccaggggcgaagccaggatttatagctagggggtgtgggcagggtgaacaagtcataagtcaagttagtacaataagcatggggtcggataggggggtgttggcccccttcggcaccccttgtagctgtgcccctgcctactcacgtgcttggttgatcgagtatggaatacaacccttgaatctctga

SEQ ID NO: 53960 - DNA, 1294 bp, Oryza sativa
  Clone ID: PAT_MRT4530_5610C.1
ttaggccagaattcgggctggacctcgcaagttgccagacacgcaagcatacgaagtggcccaataaagcaaccagactcgagtcagaggcatccgctccgctccccgcaacgaacacccccgctcctcctcctctccagctcggtcggttgcaggtgggaaaggggaagagagactcgccagctcgaagtccaaaccctcaacccccgcgccgcgccgccccgccccgcccatggccgcctcctcctcgcgctcccccgcctccacctcgcgccgcggaggcggcgcgcggcagtccccgttcttccgggacctcgcctccccgatcccgtcccaccgcgcggcctcccgcttcgcctcctcggcggcggggcccaccgccgccacgacgccgccgccgccgccgctcttcaccctcgacgaccgcgccgccgccgtggacttctcccccgacgccgcggcctccgaactcctcctccccgtcgcctcctccccctccccgcgctccgccgcggccgccgccagccgctccccgtcatgggaccgctcccgcggcagggcctccgcccccggatcccccatggatggggtcgtggagccgccccggaaggaggtgcttgctttgccgcctccaccgagccctggtaccccggcgcctccgcctccggccgccgaggcacagtcgcctgttactccggcacctgtgtcgactggtatggagcaggagatgaacggaggaggggaggtagatcgggaggagtggatcactgtattcgggttctcccttaaagataccaaccttgttatccgggaatttgagaaatgcggagtaattttgcggcatcactctggtccacgagatgaatttcacattgttgatatgacaaaactgacaattttcagtcctggtctgggtcttatactgacaataatgtttgtgtacttggctttgaagcactcttatgatgctcggaaagcccttcaaaagaatggtgtccagctaagcagtggcgtcattattggggtgaagcctattgatccaatgcataggcagcagctcgatgagaggttcgctggaaacaaacaaggaggcttcatggtttccttgcctccaaagtctcttgttctgaagggtaccggtgcgtcgaatcagttgggagccttgccacgcccctatgatcctaaagctaacacaaatgttatcagagacgctaaccgtcgtgcaacaggtagcgttgctgcaccagcaaaatctcttgtaacgaatgtgatggatttgatatttggcatttaa

SEQ ID NO: 53961 - DNA, 4071 bp, Oryza sativa
  Clone ID: PAT_MRT4530_56110C.1
atggccgccggtttcgccccacgacgccgcggctcccgcgctccaccccgccccacgagcgccgagctccggccacctctagccgccgccctagccactgccgcgccgcgccgtttgcactgccggcttctccgtgcctcgccgcaccccggcccccgctccgtttccccatttaatcgccgcaaccacccttccaccgtgcatcccaagccacctccaccctacgccaccgggccgccgttccgccttcgtcccgaggagcaccgacaccgagctccctcgcctttccccgcccctcgtcgccgcgtccttggtgagctcctcctctccctccttgcctccctcctctgtgtcccgtgcgcgctgccgcgccggtggccgccgccggcgaccacctggccgtgcaccgccgccccgctcgcctgggccgcccggacccccccttgtcgcgccgcgtcgatctcatgcgccgccgccgcccatgcgtgccgcctctcccgcgccgcccatcggtcgccgtcgccggagaccgcgctaccgccgcgccatggctcagctaggccggctttgtgccgtgctgtgccccagctgcgccgcccctggccgcccgatcggcttgggccgatccggaccgtcggttcccgtggaccggtggtggaccgcctcggtggtcccggtccacggtggaccggcgcccttgtgccgctgaccggtggggcccgcttgccggcgccgcccctcccctttgatgacgcaagggtgggcgtgatggagcggggcgggccctgcgacggcctctgtcgcttccggattcacctaggcacgagaggggactgcccgttgcccgctggggacggggaggaccagccgtcaacttcatgtctgttcggaagtcaagtcaagtcaagcctcacgctgcgtgcaaggagcgagaagatcagttcaaagtcgtcgttccgcgaagatcaagggtatggagttcccaatatcggcaccaaagacccctgtcaaaatgctctccagatccccgaagataacgacagccaagtcatcgtcagaccaaaggaaaaccggtcagatcgtgggttaggtggcgacaggtggtctgacgcacgcctcgccccatcccgtcaggacgagagcctccaagcactcgtccctagccggaaccggcgtgttagctcctggagatggcacgttggttccgacagccatgttcccacatcgcgcctgcttccggcggaagtggagaccaagagcttagaacctcacccagggcccccggccgaaccggcaaaggggggcctgcgcggtctcccggtgaggagccacgagctccgtcatctggcgcgccagtttcccttgttcagcctaatggccgagcaagcaaaggcgcacgacctttctccgagtgtgagcggcgacgacggggagccaaacccacgccgtcgagctcgtactcccccacctcctccacaccaaagtcctaagcatagggaggcgctcgagagggttgataaatccgcagcatcaccggtcgtgggtgatgcaggagaacggcgagatggggagcgtcgcctcctcgtctacggcgacggcagcacgcctcagggcgcgcttcaggctgctggcgcgctcctacgtcacccgcccgtcgtccatgacccggagtctccagcccagcgatggctggacgacgtggccaacttggtcatgacggcacagcagcgcctgggtgctggtggacggtccgccaccaccaagacctccggcgccgccactaccggctccgtgtcgtcaagatggagggtgcggcgagcggcggctgttgcacgccattcggctgccactccctcgtcggcacctccgactcgggagggtcagcatggagagccggatgcccgcctcgacattgagcgccggcgtaatagccggcgtactccccgcgcaacggagggcgcttcttcgtccagagtgtcacctcgacatggacgtgaggaccagccctccgtgcccccggctggtggtgtcggctgtagagcctttgtggcgagtcttcggaatgtccgttggcccccaaggttccggcccaccatcaccgagaagtatgatgggagtgtcaaccccaccgagtttctccaggtctatacgaccgggattgaggccgctgggggtgacgacagagtcatggcgaatttctttcccatggccctgaagggacaggcgcggggttggctaatgaacctgccacctgcgtcggtccactcttgggaggatttatgccaacagttcactatgaactttcaaggcacttatccgcgcccaggcgaagaagcggacttgcacgcggtacagcgaggggatgatgagtcacttcgctcgtacattcagcggttttgccaagtccgcaataccataccatgcatccctgcacacgcggtgatctacgcgttcagggggggtgtgcggcacaaccgcatgctcgaaaagatcgcctccaaagagccccagactaccgcggagctttttcagctcgcggaccgagtggctcgtaaggaggaagcgtggacctggaacccctccggttccggagtggcagcttcggccgcccccggatccgccgctcagacagggcggcgtgacaggaggaggaagaagaggtcggtccattccggcgacgagggtcatgtcctcgccgtcgagggcgctctgcgggccacccgaaaggggaggcccgcgagcgacaaaaggaaagaggctggtgctcccggacctcgatacttggaagagcgaaggggcgcgcggccctccgagccgcgcgctaccagcagagcctgcggcgctaccatcagcgccatatccgggcccgatcactctgcgtcgacgacctcgtcctacgccgcgtccaaacgcgtgctggattgagcaagctctcaccaatgtgggagggtccgtatcgagtgatcggcgtcccccggccgggctccatacggctggccacgggcgacggcgctgagttgcctaacccgtggaacatcgaacaccttcgtcgcttctacccctgcctcgtcgtcacggtcgtctgcaccgctggcatcgccctcctcgtcggagttgggggcgaacgcgagtcgaggggccgacccctcgaaactgtggacgatgtggtcggcggcatcccggacccgcgcgcgcgcgtcgtcctcggtcccgggagggaactcatccagcgctatccattattgacagtccagttaccattaccgatgtgcatggtttgagaccgttgggtttctgccctaccatggggaccggtcctacctgtcaccaggctttaggagtggcgtcacgcccgaccgcttcccttgagaagggcgatcgccctggcataacgccgggggctactgtcggtgatatgggaccgggagtatcgtgaccagaggcttgaggcagacacaatcgcccacgtggcctggcaccctcggggacgtcgggcccgagggtgaggtgtccgccctcctcctgatttccccgaggggagtcgggtgactcctgtcccggccccgagggccgaggcgccccgaccccttgggggttttttcgtcacatgtatgggttaggtgaacacggcagggctcacctaaccgcatttattgcgcaggcttcatcccaaccattacagggaagatgttacatgaagaagggcgaacatgcagattgctaaactgacgcgtggaggacaagaatgaccgatctgtgaccggtctgatactggtcgcgtcagcaacggacagcaaccataccaatctccgtccatttatgaagagaggaaaagtccacaaaaacacaggagtagggtattacgcttcccagcggcccgaacctgtatacatcgtccgtgtctcacgtttcttcctggtacgcgatctttccacacacagagagagcttgagatctcaccctaagcccccggccgaactggcaaaggggggcctgcgcggtctcccggtgaggagccacgagctccgtcaaacctaatcggaattgcctatccgagagctttatctccat

SEQ ID NO: 53962 - DNA, 2815 bp, Oryza sativa
  unsure (1)..(2815): unsure at all n locations
  Clone ID: PAT_MRT4530_56111C.1
atgttagatgaatacaagacatcggaccgcttttgggccgaagccgtcaacaccgcatgccacgccatcaaccgcctctatcttcaccgccttcttaagaagactccctatgagcttcttatcggtaacaaaccaaatgtctcttactttcgtgttttcggtagtaagtgctacattcttactaagaaggctagatcctcaaagtttgctcctaaagtggatgaggggttcttgcttgggtatgggtcaaatgaatgtgcataccgcgttttcaataaaacctctggtattgttgggatcgcgcgtgatgtgacatttgacgaaactaacggctctcaagtagagcaagttgactcacatgtgttaggtgaagaggaggacccgagcgtagcaatcaagagatgtgaaaaagcgccttcctcaacgggcctatcaacgagttggtatacgtggagcaaccactgggcttcgaggatccgaagtatcccaaccacgtgtacaagttccacaaggcgctctacgggctctagtaggatgatgaccaagcgttttgagatgtccatgatgggtgaattgaagttcttcctcggccttcaaatcaagcaactaaaggaaggaactttcatttgccaaacaaagtacttgaaggacatgctcaagaagtttggaatggagaacgccaagccaatccacactcccatgccatcaaattgtcacctcgacctcaatgagcaaggtaaagacgtcgaccaaaagatgtttaacagagaaaaaggaaagaatgtcagcgggtatgcctccagtaactcaagttttcaactcaatccaccactagcctcaagagagttaacaagggcacacccttggtccattccaagcatgctgcttagttcacagctaccattggttggaagtcaagaccaaaatcagtatgtgtttgatcgagcatttgccacccaggtcaatgagcttccaatgccagaagaggatgtccccttttgtcatgattgtagagaacaaggacactatgccctgaattgtccatgggtatatgccaaagaagccccttcctttggtttagcagggcagacatcgctaaaccagcctcctcgcaccaagtcaagcttgcagcctagtgtgcaaagtagagagcccaatggagagaatccattgaatcccgggaaatgctttcctcctagcctttcgtaccacgtggggtcacgtactaagcaagccaaaggcaagaagagtaagaatcagaagagaaaagcaccgatgcgaactgaagaagaagtacgtaagatgactattaccagcaccgaatggcctccagcagggataactattcctagacgtcaaagaggaaataccttccgaggtgcacgacagttgacccagcacctcctaagccatggcggcagagtatctgatagtgaagggtcagatcaagtctcctcggattatgaagatgagtctctccgacatctcggcgaggaagagatggaatcaaaagcatgcccccgttgtggagaaattggacacgttgctagcatgtgtctcacactttgccctcattgtgaggaagaccatccaccaggtggatgtcccacccgcaagctccaacagcaacatcgacgatatcatccacagcacccatgctcctcctgctgcacctgactctgcaataaatcatagcaataataccttcagctccaaccattctctgcaccgacggcctcagcaaagaattgtcgtcgatggaagaagttgtttctctccccgacctactccaggccaagcgaagggcaatcaacctcaggagggtgataccaagcagaagaccgttatccacttcaaccagctcaagtaccacatcgtcaccagaagcatccacaactctcggagtgaagagtacttagttgacaaaggaatagggttgatctgcaccggcaagatcagcaacccacggagaggaatagggttgatctgcaccggcaagatcagcaacccacggagagcccactccctcctctcctcctgctcctgggccgcccctccctcctctccttcccggcccaccttctcccgcctcctcccgcctgggccgccgcccggcccaagccgccccacccagcctcccgagccgctcccctcccgcgtgcgcacgcgcgttgacgccgcgcgcccgaccgccccttcccgagcttccccgtggccgcatcacctctccccgccgtcctcctctctctcccgtgccgccggccgcctccagccgcctctctctcctcgcccgagcgccgcccggccgtgccgtcgccttccccggcgtcgcagccgcctcctcttcgccggcgctgcctccaattcgtggggaaatcaccggagacgtgtcctcgccggcaaaacagtggcgttgccgccactgtactgcctccagccgcccctgccgcgccgctcaggtgcgggccggctgcgccgtctcctccctcggcgtcgccgcgtcgccctccaccccggcctgccctcggttttgccggaacgccgtcgcccgcgccgcctctccctcggtctcgtcggcacccactccggcagccccttccgccgtgccagtgcgccggccgacgtcgccgtctccacctctggcatcgcagcgggcaaggtcgtcctcggcatcgcttcccctccatccaaaccccttcggggtccatcgtcgtcgcctccgttcngtctcgtcgtcgacgtcccgtcggtcgcccggcccctggtgggttgtcccttcggcggcttctcgccgggcccgggtggggncgtcggg

SEQ ID NO: 53963 - DNA, 2269 bp, Oryza sativa
  Clone ID: PAT_MRT4530_56112C.1
atctggttgaccgcccacaaccgcgggcacggctattcgaatagttttactctgatcagaggtatacaactgtacccacaagacacagccccacgacacgtttccgtgcgccgacatgccaccacgacataccggatagaggccgtgataggacccttcgcataaccccctctaaccaagcacaccacacctcaggtttcacccccactcctcgcaaggcagcgggcagtcccctctcgtgcctaggtgaatccggaagccgcataggccgtcgcagggcccatccaaactccatcacgcccacccttgcctggatgcgtcagctagaggaaagctacactacaagcccagccgttgcccacgctggcttgtggtaagtacgaggaattcttccagggtttcccgcgaaccggtccttaactgccatgggtgcgactagcaaaaccatgcacccacagcccacaattcagtcgcattttagttggataattacgaccactgaaacatggccgggtgtctcgagcacgcagctcgttctgatgctaaaaaggtctaatactgcaattatcccatcaactgagctagtggtaattaagcatggctaagcatatagttctagctagaggagggcggaaacggcggcgtcgtggggaggctcgggtggccatggcggcggttggagccggaggaaggggatgacaggtggggccgccggtcccacctgtcggcgaagggagcatggactccccagcgacccccgtgggcttatctccgccacttctcagtctggtgctccgcaatgaaccatgctatacaaaagaaaaagaggatttattgcgtcaacggctagggtttcggtggaccgggcgcacgggcgacggctcacgggatcggacggccgagatcgatccattcaaaacgaacggccgagatcgaacggtccacgaccggctcacgggagagggcgacgatgacgtcggcgatgacgtcaccaccggcggcggcggctcgggcgcacatgctcgccggcgaacgacggcacggcggcgcgaacggaaggcaccaacgggtagcggacggcacggcgaactcaccggcgaccaaagcgacggcggaagaggaacggacggcgacggcgacgaggaagaagcggcggcgctcttcgggttgacggcggcgacggtgctccggcggtcttcggcggcgacgaagaggcggacgaggacgggcgacgacttggcgaccacgacgacggtcttcccgagcgacggcgacgtctggaacggcggcggcgcacggctggagcgacggcggcgacggcggcgctaggtctcacggcgctagagctctacagacgacgagaggcgaaggcgagggtggcggccgggggaagccaattcacctctcacttctggaagaagctccaagaagagttggtacccgattaaatttcagcaccgcgtatcacccgcagacagatggacagaccgagcgtctaaatcagatcctagaagatatgctccatgcctgtgttctagattttgggaagacctgggataagagtctcctctatgccgagttctcctacaataacagctaccaagccagcatacaaatggcaccctatgaagcgttgtatggacgcaaatgccggacaccgctattgtgggaccaagttggggaaagccaagtgttcgggaccgatatcctgagagaagctgaagctaaagtcagaaccattcggcataatctaaaggtggcacagtctcggtcgaaaagctatgcagataaccgacgccgtaacctggaatttgcagtggatgactttgtgtaccttagggtcacgccattgtggggtgtacacaggttccaaacgaaagggaagctagcacctcggttcgtgggtcctttccgtatcatcgctcgacgcggagaagtcgcttaccagttggagctgcccgcatccttgggtaacgtgcatgatgtgttccatgtgtcgcaactcaagaaatgtcttcgagtgccatccgagcaggccgattcagagcaaattgaagttcgcgaagacttgacctacgtggaaaggccagtgaaaatcctggacaccatggagcgcaggaccaggaaccgggtaatccgtttttgcaaggtcgaatggagcaaccacgctgaggaagaggctacttgggaacgtgaagacgagctgaaggcagcccatcccgatctcttcgccagttcttccgaatctcggggtcgagattccgtttaa

SEQ ID NO: 53964 - DNA, 2445 bp, Oryza sativa
  unsure (1)..(2445): unsure at all n locations
  Clone ID: PAT_MRT4530_56113C.1
tttgagatagagaggcttcatatgacggtntgattcatcgggcttctcaaaaactgcatctttaggacctagtgaaaagtgagcaccttcggataccatgttgatatccatgtcttctttaggagatgactcatctttagcaaccaattgttcttccttcttctctacaacaaccggtttttccttctctatggttttacgcctccataccggtggtggtcgcaactcattgaaccttttatccctttgctcttcagcctttttctctcttatttcttgggcccgaagacgttgcaaccttctcctttgagtagccgttaaatccttaggtatccacctaggtgtcacgtcccaaaacgaccctccttcgcccgtttccaccctttgccgcgccgtctccccgccggaaacgagctcgcgccgtcgccctctctctcctccgtcgccgacgacctccggccggccctctccgcttgccgggactgtctcccgcctcggcgtcgccttctccggcttcgccgcaccgccgtcgaccccgtccaccccctcaccgagctcgccgaccgctggaacgccgccgaccccatcgacccgagccacgccgccgccttcctccgctccggccgcctttttcgtcgtcgccgtcgacctagggtgagccgtggaccgccgcctcttttcccccttcccttcccctctctcggccgccgcttcgccgtgcctatggccgccgccggcgaccatagggtcgcgggcgccgcctcccgccggctgcaccatcgtggccacctacgggcgcgccgtgtggccgccgcatggggcccagccgtcagcggtcgcgtcctcgtgtgtggctgacgcgtggggcccacggcgccggccggtgcgagccgggtgcgcccggtccaccgtggactcacctcggccacataaggaccggtcttcgggcctctgttgcaaagcaataccgtacttccacatgtctagtgggtaaggcttagtttgtggctcagtctgatctctaggacaaatgaaggctacacgagctgcggctcggtagtcgagatgtcatggcacagggcgggtgtcctgctgctaggggctcaatcctgcctgcctgtcccggaggttccggccgtaggtggggttgggtcggtactcttgtctatggctaggatgggttggaaactatgtcatgtcttccgtccgtatgccgtggtgatgtttaacagagaaaaaggaaagaatgtcagcgggtatgcctcaagtaactcaagttttcaactcaatccaccactggcctcaagagagttaacaagggcacacccttggtccattccaagcatgctgcttagttcacagctaccattggttggaagtcaagaccaaaatcagtatgtgtttgatcgagcatttgccacccaggtcaatgagctttcaatgccagaagagcatgtccccttttgtcatgattgtagagagcaaggacactatgccctgaattgtccatgggtatatgccaaagaagccccttcctttggtttagccgggcagacatcgctaaaccagcctcctcgcaccaagtcaagcttgcaggctagtgtacaaagtagagaacccaatggagagaatccattgaatccaaggaaatgctttcctcctagcctttcgtaccacgtggggtcacgtactaagcaagccaaaggcaagaagagtaagaatcagaagagaaaagcgctgatgcgaactgaagaagaagtacgtaagatgactattaccagcaccgaatggcctccagcagggataactattcctagacgtcaaagaggaaataccttccgaggtgcacgacagttgacccagcacctcctaagccatggtggcagagtatctgatagtgaagggtcagatcaagtctcctcggatgatgaagatgagtctccccgacatcttggtgaggaagagatggaatcaaaggcatgcacccgttgtggagaaattggacacgttgctagcaggtgtctcacactctgccctcattgtgaagaagaccatccacccggggagtgtcccacccgcaaggtgacatgttttctgtgcgaagcaccaaccattctctgcatcgacagcctcagcaaagaattgtcgtagatggaagaagttgtgtctctccccgacctactccaggccgagccaagggcaatcaatatccggagggcgataccaagcagaagaccgtcatccgcttcaaccagcaatcagaaggaagcttctcctgtgaatgatagcattatgcagtcctatcacatcatcacagaaccaatcaaggatgcagtcactagaacaatgccagctatatctctccagaatcaaaatgagcagccatgtttgtggttttcagttcgctacttatcatggggtaatcgaaagtttgcagcaataatg

SEQ ID NO: 53965 - DNA, 184 bp, Oryza sativa
  Clone ID: PAT_MRT4530_56114C.1
gcaggccccggcccgaaattccgggtagccccacgcgccctttttctagatggcgctcttctccaccacaggggctctttaagggggggagatgacaatggccatacccaggagaggcccttagagctttccttccaagccctctaatcggcattagcagcttcagatcttgacccctaacttc

SEQ ID NO: 53966 - DNA, 501 bp, Oryza sativa
  Clone ID: PAT_MRT4530_56115C.1
cttctccacttccccttcgaatctagggttacgactccgaccaacctcgccgtcgccaagctcgccgactcaccggccttcctcgtcggccgcggcgcagagggagaaggtggggagcgaagatgccgcagcggcactcgaagaacaacaacgacctcgccttcttcacgtacgaggagaagcggaagctcgggtacggcacgcagcgggagcgcctcggcaaggactccatcaagcccttcgacgcctgctgcctctgcctcaagccgctcatccacccgctctgctgccccaagggccacaccttctgcaaggagtgcatcctcgagtgcctcctcgcccagaagaaggacatcaagcgcaaacttgctgctcatgaggcccagaaaaagctggagaaggaagaggaggatgagaagcgtatgctgcaaaagtccaaggagttggacgcttttgatcagcagaatcatggagccgtcccccaataccacgatcgcagcg

SEQ ID NO: 53967 - DNA, 721 bp, Oryza sativa
  Clone ID: PAT_MRT4530_56116C.1
gcacgaggcccaaccggaaaaacgagaaaacagagagagctcatttgccgaaggccgaagcaaaccaagccaagaaatggcgcgctaccaccccacctccatccacgacgacatcgaggccggcttctccggccactccgcctcccccgtgaagcccgcggcgtcgcctcggcggcccggcggccgcctcttctgcgacccgtgcgacgacgccgacgacctcctcggccaccaccactacctcgacatctgcttccgctgccggagacccctcggaggaaacagagacatcttcatgtacagaggtgacatgcccttctgcagcgaggagtgcaggcaggagcagatcgagatcgacgaggcgagagagcagagatcgaagcagacggggagggcagagcaggagaggcagaggcagcagaaggcgagccacccgaggatcccggtctgggcatggtaaacgggaacgaaagccaagcccggggaagcagaagcaaaccggctgcgtctttcttttcgcgatgaaattgttcggttccttcctcctgatctccgcaacaaggagatgaggagtcaatttgaaattgaatgtcgtcgccgcctgctataccgtgtacaaacagtagatcatagacatgttggtacctcctgcagcagctggtccgtcatcaatggcagagacacagcttctccgtatcgtttcctcaacaacactgcctga

SEQ ID NO: 53968 - DNA, 360 bp, Oryza sativa
  unsure (1)..(360): unsure at all n locations
  Clone ID: PAT_MRT4530_56117C.1
gggaaaaagaaaaggaggggngnaaaaaaaaaaaggaaggggtttaaaaaaaacacccgggggggacttaggggagcataaattgggcccgaaaaaactattttatggggagggggaaaaagggaaaaaaggggcccagggacccgggggatgggagggggcccaaaaatataggggaacccttaggggacccttatcctaaagggggaagaaacacctggacaggcattcggggcaacttccaagggatcccttaaggaaacccggaagaacaagaagaacgggctggggggcacaagaagagctacccccccaagggacttgacagccaagggacatgggtggggggcccccatggtt

SEQ ID NO: 53969 - DNA, 210 bp, Oryza sativa
  Clone ID: PAT_MRT4530_56118C.1
atggctggacgctcagataatggcgatggcgctctgaccaagtgcgtgaaccaagaactgcatcatgatgaacattttagttttatttacaagtggaaaaataaaatctccagtgctggcaacgcacgtttatattaccattatggatacaattttgagatgatatcatcaaagtcggagctaaggaaacaaattaaaagacaatactaa

SEQ ID NO: 53970 - DNA, 3675 bp, Oryza sativa
  Clone ID: PAT_MRT4530_56119C.1
atggcagcggcggcggcggcggcggaggcgaagcaccggaaggaggaggaggaggacgaggaggagatgacgctggaggacggcgacatcgaggagagcccgcgccgcagcttcgacgacgactacgaggacggcgggagcggcgacgacgaccgggatgacgacggcgaaggtttgggatcgcctcgctcgttccagtcccgccagtggccgcagagctaccgagaaacaactgacacctatacaattgctgcatctccgagctttggttacttgggtccctctacaagcaaatactcgatccttgatggtggtcgtagtagtctgggatccgacctgaagttgcccttgttgtctgataagctagatgggaagcaagactctgtcaagagcttgagaaagactcttggttcagcaatagataggaaaagctcgttacttacgcaacatactggagaagtctacatcgctcaaggatgcagtgtgacacagacggtgttcaatggggttaatgtacttgctggtgttggacttctttccactccatttacaattcatgaagctggatgggtaggccttgcggtcctagctatgtttgctattgtttgctgttatactggagttctgatgaaacactgttttgagagcaaagatggtatttctacatatccagacattggcgaggctgcttttggaaggattggtcgtctgctgatctctgtaagtcctggtctcgtgatggctcttattggatctctgttgagtatacttgtggccgtcataatgcctgcactgtgcttcttgaagattaggcaaaataaagcaacgactgcccaggtcgttgcaagtattggcgcagacgcggctttcagcctcgccgacggctcgattcaacgcagatcgcgtctcctcgcctggatatcggctgcatcgacgaccgtctttctgttcccgttccaggcggccgccgccggcgagccgcagcgccaggcaattgatcccgcggcgcgtttggatgctggctgcgactggacgtctgcggcgccggaggaggaaaaggacgacccctgcagtgccggaggaagacgcgggtcgctgctcaccaggcaaaaggagatgcgatatgatgttcgtcgaattgagccgacggagagcttgaaagacacggctgctcgtggagccaagccgcgacccctgccgcacctcgtgctcgccatcctcgacgacccctccgtcgcccgcgtcatgcgcgaggcatccttctccagcaccgccgtcaaggccgccatgctgcgctccctctccgaccccgccgcccccgactccggcgtctacgtcaacgccagagtgctgcaccggcaggtgtcccaccgggaggaggaggtgaacaaggtggtggaagttctcaagcggggcaagaagcgcaacccggtgctcgtcggcgacacggtggacgtggacgccgtggtacaagaggttgtcaccatgatacagaggcaacggctcggcaatgcgcgagtcatctccttccagagagaattcggcgacctggtcgatctcgacagggcggagctcgccgccaagatcaaggagctcggcgaggcgataagatcggagctactctcgccggcgtccaggagcgccggcgtcgtcgtcaacctcggcaacctgcagtggctcgtcgaggagagatgcgtggcccccggcgagcaagagaagcggagggacgtggtgctcgacacggcgcgcgccgccgtggccgagatggcgcgcatcctgaggcagtccggcgagcgcgagcaccgcgtctgggtgatcggcacggcgacgtgcgccacgtatctcaagtgccaggtgtaccacccgtcgctggagagcgagtgggacctccaggccgtgcccatcacgccgcgaccgccgccgccgccgccgtcatcgctcggcctctcgccgagtgttaatggagttaacagaggcatcctgagcagctcggtggaggtgttgtcatcggcgatgaccaccagtgcaatgcaaagcaggtcgccgagcctgtgcagcgcctgcctcgacggctacgagcgcgagcgcgccgacatggcgtcgtcgccgggctgcggcgcgctccatgccacggagcagcccatgtcgcagtggctgcagatcgggacgccgagcagcgcacggcccccgttcgaccgcgcgcaggacaaggcgcgggaggctgacgagctgcgacgtcggtggctcgaccggtgcgcgcagctgcactcccacggcggcggcggctgcggcggtggccggccgtcgtcgatggtcacttgctcggaatggaacggcgcaagcgtcctcgccaacatgcaggctataccagtaaggccgccgccaccggcggccgcggcggcgcctgccgccgcggtggacaccgacctcgcgcttgggccggcggcatcaacggcgtcgaggccaccggcgtactgtgacaccgacgagaagctgctcgtgaaacggctcacggaggcggtgcgatggcaacccgaggctgctgccgctgttgccgctgcgatcacgaaggccaggtccggcgagcggaagcggcgtggcatggggcccaccagggccgacacgtgggtcctcttctccggccatgacgtggccgggaagacgaagatggcggaggcgctgtccatgtcggtctttggcacgaacgccgtcgcgctgcgcctcgccggcaacggcggcgagcccatcgcgtcgtgccgcggccggacggcgctggactgtgtggccgacgccatacgtgccaacccgctgcgtgtcatcgtgctcgacggattcgaccaccacgacgacgacagagtcgtgcaggcgtccatactacgcgccgtcgagtccggccgcctcgtggactcgcgcggccgggacgtcgccctcggcgaagccatcttcgtcgtcatgtcgctggacgacacgaggcggtgccaagaggatcatcagttcaccgactcgccatggaaccttgagctccgagtccggaacaacgcacggaagcggaggccggagccgcagccgctcgacggcgccggcgaccggcggttgaaaccgcgcaaagactcgcctccgcttcaccttgacctgaacctgtccatgtgcgaggatcacaccgacgacgacgacagcggcggcgaggaatcccggaactcgtccagtgacctaacggtggagcacgagcaggagtacggccaacccgccgctgccgccgccaagttctcggctccgtcgagcttctccgagctcaccaaagccgtggatgcaacggtggtgttcaagcccgtcgacttcgggccgctcaaacggagcgtctccgacgtggtctcggcgaagctcggggacgccgccggcgccggcgccggtttgtccgtacacgtcgacgacggcgtgctggacaggctggccggcgcggcgtggacggcgggagagtcagccacgtcgttggaggcgtgggccgacgaggtgctgtgccctaccatacggcagctgaaacgtagcttgagcgccaacgatgtcgacggcgcgacgacggtgagcttgtcggcggtggaaggcagcggcggccgccggaggaaggacggcgaggtgttcccgacgtcggtgaccgtcgccgtcgacggaaactga

SEQ ID NO: 53971 - DNA, 1354 bp, Oryza sativa
  Clone ID: PAT_MRT4530_5611C.1
atgttccgccattcctcctctgcctcgtcggcggcctcctacggcagcgacgtcagcttcatgaaccactcgccggcggccgccttgcccgccgtcccgacgcagatccctcgcgtcgccggcggctacctcgacggcaatgttagcggcgggttacctcacttcggaggggcggtgtcgtcgtcgtcgtcgtcgccgccgtcctactcctcgtcgctcccttcgtcctactacaacaacatccagaggagcatcagctcgcactccctcccgcatcacctccagctcaccgaccacttcggcggcgcattcttctcgtcgtcgtcctcctcctcccaccagctgcctctgccgccgccgctctcctcctcgccgtcctcctcctctggcgacctcttcgagttcacctcgccatgccccgtccgccgcgtcttcagcaccggcgacctccaggggatgaacggatcgtcgccgccgcggccgctcccgtccggcgaaagctgcgggcaagacggcagcgggccattctcacagaaggtcgggcggtacagtgccgaggagaggaaggagaggatcgagaggtatcgcgtgaagcggcatcaacgcaacttcaacaagaagatcactgtaaccattcccctcctccacgctcaaaaattgcactctgatcgcccattattcgtgctgacgctttggttgtgtttgggggcagtacgcgtgcaggaagacgctggcggatagccggccgagggtgaaaggccggttcgcgaggaacggcgaggccgacgcggagggcgacgagcgggaggcgttcgacgcgagctacagctacgactactccgccgcgggctacagcgactaccgcagcggcagcaacagcagcagcgtcaacagctgctacaattacaaccgcaaggacggcgccgcgacggaagcgtctgtcgtcggcggcagcgacaatggcgagtggtggtggcgcgcgccgggcgccaccaccgccgaggcggagcggcagcggcaggccggcttcgacgtcgacgaggagatatgggccaccctcggcgacatgctgtccgtgaacctcgcctcatggcgagacggcgaggtcaaacgggtgcggatcgctgtcggcgaggtcgctgccacaggcgaggcgtccgtgacgcgcaaccatctgctggacagatcgatcgattttccctcgcccatggcgatgatgtctgatctcggctttgttttgcattggatgaacgatgttgtcttcccttgcctttcacacaattctgccgtcgtagccactaccgcttcgctgagccgcgaccttcgacttagatgcatccgtgaagatgcaaaa

SEQ ID NO: 53972 - DNA, 2029 bp, Oryza sativa
  Clone ID: PAT_MRT4530_56120C.1
atggcagcggcggcggcggcggcggaggcgaagcaccggaaggaggaggaggaggacgaggaggagatgacgctggaggacggcgacatcgaggagagcccgcgccgcagcttcgacgacgactacgaggacggcgggagcggcgacgacgaccgggatgacgacggcgaaggtttgggatcgcctcgctcgttccagtcccgccagtggccgcagagctaccgagaaacaactgacacctatacaattgctgcatctccgagctttggttacttgggtccctctacaagcaaatactcgatccttgatggtggtcgtagtagtctgggatccgacctgaagttgcccttgttgtctgataagctagatgggaagcaagactctgtcaagagcttgagaaagactcttggttcagcaatagataggaaaagctcgttacttacgcaacatactggagaagtctacatcgctcaaggatgcagtgtgacacagacggtgttcaatggggttaatgtacttgctggtgttggacttctttccactccatttacaattcatgaagctggatgggtaggccttgcggtcctagctatgtttgctattgtttgctgttatactggagttctgatgaaacactgttttgagagcaaagatggtatttctacatatccagacattggcgaggctgcttttggaaggattggtcgtctgctgatctctattatactctatactgagctatattcatattgtgtggaattcattattttggaaggagataatatgacatcaattttctctcatattggttttgattggcttggcgtccatattgatgggaaacatttctttggagtgttgactgctctaatagtcttgcctacagtatggttgagagatcttcgggttctctcctacctttctgcgggtggtgttattgcaactcttcttgttttcctctctgtcgttttagttggcgctactgatggcgtagggtttcatttgactgggaaagcagtaaacttaggtggtataccgtttgctattggcatttatggtttctgctactctgggcactcagtgtttccaaatatttaccaatcaatgtcagaccgcacgaaattcactaaggcactgtttatatgctttgcaatttgcacagcaatatatggctcgtttgctatcattggctatctcatgttcggagataaaactctctcgcaaataactctgaatcttcctaaacattcatttgcctccaaggtcgcactgtggaccacggttatcaaccctttcaccaaatatgccctgttgttaaacccattggctcggagtttagaggagttgcgccctgaaggatttttgaacgaaacaatctgctctattatactgaggactgcccttgttgcatcaaccgtgtgcattgcgtttcttatgccatttttcggtctcgtgatggctcttattggatctctgttgagtatacttgtggccgtcataatgcctgcactgtgcttcttgaagattaggcaaaataaagcaacgactgcccaggtcgttgcaagtattggtataataatattgggcaccataagcgctgctcttggaacatattcgtcggtactcagaattgtggagaactactaattacgaaacctagctcgcgtgcagtgcagttcccagcaggtgaggccacaggcatgtcatatctattactcaccccgcttacggttacggcgctcaaaaatggtcaaatatcgtgtgtttatcagaattttgctagaattaccgagttcactgtaattattcgacccaaccatgtaatgcatgtacctgcataggctgcttgcttctcagttccttgaagtggaatatcttcatcacttgcttataccgtgtttctgtcaatcactgttgttaggtctatccagcatgttacttaaaccgcctttagcaattatatgtactcaattaattatagatcgagattgctggatattgagtgttgcaacttgcaacccttgtttcc

SEQ ID NO: 53973 - DNA, 429 bp, Oryza sativa
  Clone ID: PAT_MRT4530_56121C.1
atggcagggttgaatcctgaggatctcacggcaaatgacctcaatgctgctgtctatcgctacctccttgagtcaggatttgtttatacagcattcaacttctaccatgagtcacaccttgatatacatgacatcgagataaagaagatcccgcagggtaccctaatcagagtagtgctcaaaggcctcgaacacatcgagtttcaagccaatgctgatgttgccgatgatgaaaacttccaccatttcattgctctagacctactcaccaaagatttaggtgagctgaaaatgcaaattactggccgtgcaaaccctgattttgttgagactgccaaagagaaaaagaatgacgctgtcaagactgtcgaaccgcatgggagcgattatgctgaggacgccataccgcgtcggatgcagccaaagtga

SEQ ID NO: 53974 - DNA, 297 bp, Oryza sativa
  Clone ID: PAT_MRT4530_56122C.1
caagctaaaatatagacgatgagatattcatttctacaataggaaatcatttaccttccgccgtggtccttactaatacaacttagttcttgtaaatactacctctgtcccgatggcaatctcactacactggccaaggtcacctgtgacgggcccaaaccctcatctttgacggcttcgcgcatggtcagtgatcagtggtcactggtgacacccacctctgacgggcaagttactagaaggccgtcagaggtgttggtctccgctagcctagagcgagttaggacccgtcacagg

SEQ ID NO: 53975 - DNA, 426 bp, Oryza sativa
  unsure (1)..(426): unsure at all n locations
  Clone ID: PAT_MRT4530_56123C.1
cntccgtgggcgtcaagtgccagctgccgcggttcagcgggatgatactgtacgacgagcgtggccgaccggtgtgcagcggcgtccgggacagggcgcgcgacaaggaaaagcacgcggcggcgatcatggtgctgagggacatgctctagcctcttggcccctagcttcgccggccggccggccggccactcgccgtccccggtggcgatagatcttcttcatccctctgctttcctgtttcagttaaccggtcgatatgtgtgttcatctttttgtttcatgggttgtccatttggccgactacgtcgtctgtctcagtagtgatcagtagctacttagccaggagcccaggagtttgtttcggggaggtagtgaggcaccgagaggcaataaaagggttgtctatgcaaaaaaaaaaaaaaa

SEQ ID NO: 53976 - DNA, 2373 bp, Oryza sativa
  Clone ID: PAT_MRT4530_56124C.1
atgacgacccaagctaaagaaaaatgcccactttgcacagaggagatggatttgacagataaacagctgaagccgtgtaaatgtggatatgaggacatcatcattaaagatctaacatcaatattaaaggaactttgtgctgacaaatcaaactttcaaaaagaacaagccaagtctcaaaagcagaaaccagtaaaagttcagtcaggagtgacagaagaatcaatagacccatatagtgttcgtgtgattcaacgcaggcttgtttatattgttgggatgccttctgaattcgcgagtgacaaggtgctgaggcagcataattttcttgggcaatatggaaaaatagaaagtattattatcgacaatattggagctaaccaacagattcctgactctggccgtgtatatgttaccttttcaagggaggaagaagcttttcggtgcattgaggcagttaatggtttcatcttggatggtagacctctaaagtttgccgaaagccaatctgttcgtacgtgcatcaaaaagccccaccagaagatatttataaggcttcagcatttgttgggaatggatacaaagggtctccgttcaggaaatactttgccccctcctggtgactgtgtatcaagaactaccgtttgtaatggaaactccaaagataagacctgcagcgatgattatggagtactacacaatcacggtaacaagaatcttggcacgctgccagctacaactcttcaagaagagaagaaacgtaatagcacacctaataatcagcaaggattgtctgcctccgtgtctcaggaattaccaccgcttggaccaaaggttcaccatctcaatgatcagttggcttcctgtggtgataagccccaagcatctgtgcagtcagcaaatggcaatttgaattctaagcaagtaactgcagcaggaaatggaacggtgggcaccttatcagcaaaacaatatgttaatgtagtttcacaaggatcaagtggttcaggtcgcagatttactgtacttactaggcagacggcttctagtgatactcggtctaaagcaacaggacaagtcggtaatgcctcttcagattcccagaagcttacttcggcaaacaatgagcacagtgacagaattaaaatttctaggagtgataatgtaaagttagtttcgcagagaccagaggaaccttcccaaatgctagctaatcatttgaccggagcaattgataagacccacgttgatacagatgaaaagaatgctcgctcagatataaatgaaaaaacagtttgtggtattcagatgcagcttaaagaaagcactgcagcacacagatcaactgtgctgcagagtttgagggacaatcctatgtccaataatcttccaacattggatgtcaaatctcagatatcagttgtgccagacaagccttcagattcacagtcagcatctaaaactcaattgcagccctcaaatcataaaaaaactgctgtttgtagttcagatacagccaatgcaagtgatgcatgtggcatcgctaataatcaggtgctgttccctggtggtaaacatcaaacttcatcacaaggggaggatcacagcttgtacaagagggataagagtcagtcaggagatcaactttcatctcagcatcctgggaatgttttctcaccaagactactcacttcactgtcatccattgatataactgccaaggaaaataaaggaattaaaaggcacgtttgtcctcctggatttgaggagcttcacaggccgtctgattctgacaagattacatcagtaagctccccaacttcttctattatgtgctctggacctgataccctggtacaagattcatgctctgctaaagatcagccagacttcattagctgggtttcagagtgcctagaagatggtggagaaactacacaaagtaataggagcataccttctactctcagttccacagatgccacttggagatacatgcagtatcctgcctcctgtttttctggtgcatcaaatcactttctagtatcaccgtaccctagaggattgtcacagcacacggtgggtcggattgaaaataccatgaattgctgctgttcccatccatctgtcagtggcatagcaaatcacaagcctgaatactggagtggaagtgaccatagctacatgtctactgggggatatgatgtattcagtcaaagtgcaacattaggcatgatagctggtatggtaggcacatcgccccaacaaccttcgccacctgttcattacaatgactggaccacgggaagtgctgattcagatttgaagagtccacaggttgatcatacataccccatgtactcgctgttctga

SEQ ID NO: 53977 - DNA, 157 bp, Oryza sativa
  Clone ID: PAT_MRT4530_56125C.1
cgacgcgtgcgatgacatgtgtcgcggacggcatcactgggtcgcatctctgatctgatattgtagatcggacaggggatcgtcgggggcgtgatcatgtccgcgatgatctacatcttcggccacatcttcagcgcccacatgaacctcgccgtga

SEQ ID NO: 53978 - DNA, 480 bp, Oryza sativa
  unsure (1)..(480): unsure at all n locations
  Clone ID: PAT_MRT4530_56126C.1
cgaggaaaaacgacacaggacagggcgcagggacacgancaggnacacacgaacagggcgcgcaggggcnnacgacgaaacagagaacaaaaaagaanngnacccaccacagcgacaggacacnggngncggaccacccccagggccaagcgncaagangggacagacgccagccaggcaccggccgcaacnccggccancnngcnccgccggcgancgacgacgacgacgacgacgacgacgggacanncgacnancacanggagcacgcggcggggacgcccngggggaagcgcncgggaacggngcagnagnngnagaacaggcacnngcgcggcacccaccgcanccgccgcngccgcgngagggccagcnccggggngcaccanccaccggcggcggcggcggcgccggngccgggngcggcggcggcgcccacgggggcgccgcaacgcgggcggccacccgggggggacgacg

SEQ ID NO: 53979 - DNA, 904 bp, Oryza sativa
  Clone ID: PAT_MRT4530_56127C.1
cgggctccccgcctcgctgcttcgcctctcgttccccaaggccccgaagccgccggcgccgccgccctcctccggttcgagctctccgccaccatgatcatctccaagaagaaccgccgcgagatctgcaagtacctcttccatgagggagtcttgtatgccaagaaggactacaacctggccaagcacccaaaggttgatgtgcccaacttggaggtgattaagctcatgcagagcttcaagtcaaaggagtatgtgagggagaccttctcgtggcagcactactactggtacctgaccaatgatggcattgagcacctccgcagctacctcaacctgccatctgaggttgtgcctaacaccctcaagaagtctgccaagcccccgtctcgcccattcggctctggccctcctggtgaccgccccagaggcccgcctcgctttgagggtgacaggcccaggtttggtgacagggatggttacaggggtggcccacgtggtgctccaggtgattttggtggcgagaagggtggtgctccagctgagttccagccatcttttaggggtagcagacctggctttggtcgtggcggtggtggcgcattcggtggtggcgcatcttccatggagtaaagcttgatcgggacggagcatattgttttgcccaatggcttatgagatgcaatgcgcgggggtcgtcttcactgttggtctttgaattgtgggaacaatgagaatttttgtttatgaaattgtagctgaggttgttctagacatggctgtgttatgccttttgttctgttagatatcactctcgaaatgaatctgttggtttgaccgagaatcttttagaatgttatgagcaagctgccatttaatcaaaaattcatctcattttcatgcc

SEQ ID NO: 53980 - DNA, 966 bp, Oryza sativa
  Clone ID: PAT_MRT4530_56128C.1
atgcctccaccactcctcctgcgcctccgctcacccgcgccacccgccgccgtcgccgccgggtccctctcccggcggcggcggcggcgcagggccggcctcgcgccggtgcgagcgtcgtggcaggagcttgcgggggtgctggtgttctccgccgtgcccttcacggccgtcaaggccctcgccaacagccccctcggcgcccgcctccgccgccgcctcgacgaccggaaggccgccgccgccgccgaggccgacgccctccgttccgccgcgcgccaagcccgcaccgccagctcgtggtatggggatgaacggccgcggtggctaggccccgtgccgtacgagtacccggcgcatctcaccggagagtaccctggcgattacgggttcgatattgcaggcctgggcagggatcccgttgctttcgcaaactacttcaactttgagatcttgcattgtcggtgggccatgcttgctgctcttggtgttgttgttcctgaactgttagatctttttggagtagtccattttgtcgagcctgtttggtggaaagttggttacgcaaaacttcagggtgacactcttgattaccttggaattcctggtttccgaatcgctggtggtcagggtgtcattgtcatcgctatctgtcaagcccttttgatggttggtccagaatatgcaaggtactgcgggattgaggctctagaacccttgggattatatcttccgggagacataaactacccgggaggagcactcttcgatcccttggggctctccaaagatccagtcgcgttcgaagatctaaaggtgaaggagatcaagaacggtcgcctggcaatggttgcatggctcggcttctacatccaggcagctgtaactggcaagggtcctattcagaaccttgttgaacacttgtcggacccgctgcataacaacattttgtcctcttttgtttga

SEQ ID NO: 53981 - DNA, 177 bp, Oryza sativa
  Clone ID: PAT_MRT4530_56129C.1
tgttgcgctactctactgtggtttcctcagagacggtcgcttgagcgccaaacctagctgcgatggatccattacggctgctagcgttcccctgggatggtgagcacgcgagcgctcgacctgctggggggttgtaggatcagggtggcggcggcgcaggtcgggccagaggagagg

SEQ ID NO: 53982 - DNA, 384 bp, Oryza sativa
  unsure (1)..(384): unsure at all n locations
  Clone ID: PAT_MRT4530_5612C.1
cngtccgctcacgcagtctcgacgtaggtctttgatggagggtacataagaatgcctacacgacgtaccaatgatgcagatctatagtgaagacattgcaccaggcagagatctactcacgcctgcgagagtggagatcttctgacaccatcttatctggaaagcccagaatcctacataagctggtcctctgcctgtacaagagactgatgatgttcagtaaccaccaagatcaaggatggccggacccttgatgtctacaccatccagaaaagatgcaaaacttgaccgtgtgcttcctctgcgatgtgacatgcatatctatgcgcagactctaaccacatgcactatcactctctgcgtggaatgatgtccctccatagg

SEQ ID NO: 53983 - DNA, 1678 bp, Oryza sativa
  Clone ID: PAT_MRT4530_56130C.1
cttcgcttaataatctcctcctccgtattaaactcggttttttttagatattcccaagaatctctcctctcctttccattgttgctccgctcggattccgctcttcttcttcttctccgtctccgattcggtctcctcctcctctgctccgaccaggattctgcagcggcagcggcagctgctgcggttggtttttcaggctcggtggcggcaggcagcggcatgtgcgtggaggaactcgaaggcgcagagaggctcgattttggtggggttgcggagctcgagacaacaccggcagacttcgagatggagaaagtttgtgagaacacagtatctcttgatttcaagcaggctaggtcgagcagttttgtcccagttatccgatcaggggactggtcggatattggaggtcgcgattacatggaagatgctcatgtctgcatctcagatctagctaataattttggtcataattcagtggatgatgagattatttccttttatggggtctttgatgggcatggtggaaaagatgcagctcattatgtgcgtgataacttgccacgggttatcgtggaagatgctgattttcctcttgagctagagaaagttgtcaggaggtcatttgtgcaaactgatagtcaatttgcagagaggtgctctcatcagaatgcactttcttctggaacgacagcgcttacagcaatgatttttggaaggtctcttctggttgctaatgctggtgattgccgagcagttctttcaaggcgtggtaccgcaattgaaatgtccaaggaccacaggacttgctgcctcaacgaaagaaagcgtatagaatcacttggcggctatgttgatgatggctatttgaatggtcaattagcagtcactagagcattgggtgactggcatctcgagggtctgaaagaagtgggtgagccaggtggccccttgagcgcggaaccagagctcaagatgatcacactgacgaaggaagacgagttcttgataataggaagcgacggcatctgggacttcttctcgaaccagaatgccgtggatttcaccaggaagaggctccaagagcacaatgacttgaggttgtgctgcaagcagatcgtcgaggaggcaataaggcgaggggcctcagacaacctaacggcggtgatggtctcattccaccaggaggcccctcctcagctcagagtgaacaggacggggagggtcgagcggagcatatcggctgaagggcttcacagcctcagggtgctcctggaaggccaatgatagctccactgctatcatcagccttgaagttgtgcagaattgaagagaaaccttatcttgatgttgtgcagaattgaagagcaactgtatttagtgattttcggcatcttgctgtttacccccaatccattgtcgacattccagtgtgtgttattgtgtgagaataaaaccaacgaacctgagatctcaccttgcattgtgaggcccaggcattgtaaataagttgggagatagtaggtaaggagtgtgagtagtgtgcatccagggggctttgaggctcattatgcgatgtattcccctgtcatctgtaaaaaaataaataccgggattgttagtgtgattaaaagttctatcgtgtgatgaataaaaaaaaaaaaaaaaaaagcggccc

SEQ ID NO: 53984 - DNA, 138 bp, Oryza sativa
  Clone ID: PAT_MRT4530_56131C.1
atggaggggctcaacggcggtttcaacatcgcctcgagcgatttgaggttgctgcggctccgcaacagtttcttggaggtcttcggcttggtgacgacgcatcgagttctacgggtcactggcgcagcctgcggctag

SEQ ID NO: 53985 - DNA, 5904 bp, Oryza sativa
  Clone ID: PAT_MRT4530_56132C.1
ggcatgctacttcacagctggctgtggagcacgcccaacttcccggcaagggtattggctatcgatgatgtcggcacatcagcgcgcaccaatgcagaagcggagaatcaattgaccactccagcccagcacatcagagccgtcaacgctatactgagggaaaccccctacgatcccgttctgaaggacgatcttgcgcattggacagaacaattacgggaatcagtgaccaacctcagcaacgcattcgaagaggccgctgccgcagcgcacccagagcagccaccaactggcgatgccaatggtgaaaaccctgaatggagggaatcgcctcagcgacctacccctccacctcgcggcactggcgatctctgagatcacatcaacggtcgccgagaggcacgacgcacatgagacaacgagaatcattcccgacgtcatgtctcttcacggcgccatgataacaaagatcgaggagaccgctcaaacgaggaccgagaccgtgataactgccacaaccaccacgatcacaacgatcgcgaacggcgggtgccagacgatactagtcgaggacgtcaccataacaatgacgatgatggagaccggcgccgagacaacagcgggagacgacgacaggattctcgagatccaggccgacatcctcgtaatcgtacgccggagccaagcgacccatcgtcatcgtcctcgtcttcctcatcatcagacagacatccacgaaggacacacgatcgccgacaaccaaccgcccccagcgctgggtgtagggctttcagtcgtttcctgcgtgatgtctaatggcttgagagattccgacctggagcaatagaaaaatacgatgggagcaccgacccagaggagttccttcaagtctactccacagtactctacgctgccagagtagatgacaacgcgttggcgaattatttgccaactgcgctaaaaagctctgcacgttcatggctgatgcatcttccaccctactcaatctcctcgtgggcagacctatggcaacagttcatcgccaacttccaaggaaccgacaagcgccacgcgatcgaggacaacctacatgcgttgacacagaactcgggtgaatccttgagggaatatgttcggcgcttcaacgagtgcagaaatacaatccccgaaatcaccgacgcttctgtaattcgcgccttcaagtccgtagcgccgccgccgccgcggattccgccgcatcccgtcgtctccgcgcgcattaaagagaggggaatcactccccgtgattccctctcccgtttcccccgattccccctctctctctccctcggattcgttcgaatcgtgcccgcattcgtcgccggcgcaatcaatggcggccgaaatccccgcggccggtttccttcctcctcggccgccttctctcccttccgacgctataaaatcgttgcccgagctccgctcttccgtttccgccgctcgccgctcgctctcgccgtcggatccgtgctcgcgccgtgctccgctctctccgccatcgccgccgagctccgttccgccgccgccgccgctccggacttcctccttactcggcgacccctccgtccgcttcgccgcgtcgccgtcgaccccgtccgccgctccgcttcgcccgtcgaccgtcggagcgccgccgtcatcgtcatcccgaaccgcgccgccgtcttcttccgctccggccgccgttctcgtcgtcgtcgttgtcccggggtgagccgaagaccgccgttcgctttcccccttccctcctctctctcgggcgccgctccgccgcgccggtggtcgccggcggtgaccatcggggcgcgggcgcgccgctcccgtcggccgtgccggcgaggccgcccttgggcgcgccctcgcggctgccaagtgggcccggccgtcagccgcccgcgcccgcgggtgcggctgacgcgcgggacccacggcgccgaccgccgccagccgcgtgcgcccggtccaccgtggaccgagcggctgacgcgtgggccccacccccgtggacccgggcaaatgaaggctacacgagctgcggcccgatggctgacaatgagaaaggcaataaggtcagaagtcaggacattggtacctcaagctcccgagtgaatgaagcaccagacaccagttgtgtgacactagtccaacacctgattaaccagaaccgattgcttatagagatactacagcaacaccagacgccaattctgaatttgagtcaaatacaacctcaagtgcagttggaggcagtccaagcactcacaccacaagtcagcgcaccgccaacatcccagaaggcccctcatgccatgccacatgttgacccaaaagaagcaagtatcatctgttttatgtgtgatgagcaagggcactatgcaaggaactgtcctcagcagaaaagaaaagcaccaatgcgaaccgaagatgaagtccgtaagatggtcattaccagcacagaatggcctccaccaggaatgacaaaacgtcagagaaggaattccttccgaggtgcacaacagttgacagagcatcttttagctaatggaggtagagtgtctggtagtgaagattcagatcaagtctcctcagatgaggaagatgagaaagaacttaaggcatgctctcgttgtggagaaatcggtcatgttgccagctcgtgtgcctctacatgcgttcattgtgaggaagaccatccacccaataggtgtccaacgagcaggatcacttgtttcttttgtgaaggaactgatcatgtaccaaaagattgtcgattcagttttctgctgacgaagaagatggccaaccaacacgcccgttccaacggagagaagcatcaaggaaacacaaatcctcgccaagattacagtttcagcctaactccagtgccaggacagaggaaacaaaatgagaaaagaaaatgccgagtccgggaagacatctgttgcttcaattgtcaaggaatgggtcatttcgccgacaagtgcccaaaaccgagaaacatagctgccggcacgtcagtccacgcgactccctgcaaccagaagcttgctcctcaacgaattgtcatccatacatcccgaagcagtcctatagcccgcgttgcaacagctccaactccaatgagtgcactaccacaaggtgtcaatgctcaatttcagccccagcaaagaattgtcgtagatggaagaagttgtgtctctccccgacctactccaggccgagccaagggcaatcaacatccggagggcgataccaagcagaagaccgtcatccgcttcaaccagcaatcagaaggaagcttctcctgcgggcccgcccgccgccctcgctgacgggtggggcccacctgtcatcgccttcctcccgccgctcccgccgctcgcccgtgccctagcgccgccgccgccgcggattccgccgcatcccgccgtccccgcgcgccataatgaggggggaatcattccccgcgattccctctctctttccccccgtttttccctctctctctccctcggattcgtccggaatcgctcccgcaaacctcgccggcgccatcaatggcggccgagatctccgcgcccgtttcctccctctccggccgcgctctccccctcccgacgctatataagcgttccccgtgctctccccctccgtttccgccactcgccgtctctcctccccgtcggaatcgagcccgcaccgtcgcaccttctctccgccgtcgccgccgagctccggttcgccgccgtcgtcgctccggacctcctccccactcggcgtcacctccatcggctttgccgcgtccccgtcgacctcggccacccctccgcttcgctcgccgaccgccagagcaccgtcgcccacgccgtcccgaaccgcgccgccgccttcctccgcttcggccgccgttcccgtcgtcgccgtcgacccggggtgagccgaagaccgccctttcgcttccctctcctctccgctctctcgggcgccgctccgccgcgccggtggtcgccggcggtgaccatcggggcgcggtcgtgccgcctcccgtcggccgtgccggcgaggccgccttcgggcgcgccctcgcggctgccaagtgggcccggccgtcagccgcccgcgcccgcgggtgcggctgacgcgtgggacccacggcgccgaccgccgccagccgcgtgctcccggtccaccgtggaccgagaggctgacgcgtgggccccactcccgtggacccggctagtcctgaacaaaaggacacggatagagatggatgaagtcgttgcgacgatggatatctctgaggcaaatgaaggctacgcgagctgcggctcggtaattgagatgtctaggcaaatgaagactacacggaggagatggttagaactcatcaaggattatgatgtgggaattcactatcatcctggtaaggccaacgtggtcgccgacgctctaagtcgaaagagccattgcaacactcttaacgtccgtggcattccacccgaacttaaccaacagatggaagccctgaatctaagcatagtgggtcgtggattcttggctgcgttggaagccaagcccaccttactcgatcaaatccgcgaggctcagaagaacgacccggacatgcatggactcctcaagaatatgaaacagggtaaagccgctagtttcacagaggatgaacacggaaccctatggaacggaaatcggcgtgtcaaggcagagcaccaacgaccggccggacttctccaacctctccaagtaccagaatggaaatgggatgaaattgggatggatttcatcaccggacttccaagaacccaaggtggatacgattctatatgggtagttgtggatcgattaaccaaggtagctcgatttattcctgtgaagaccacctatggagggaacaaactagccgagctctacttcgctaggatcgtgagtctccatggcgttcccaagaaaatcgtatctgataggggaagccaattcacctctcacttttggaagaagctccaagaagagctgggtacccgattaaatttcagcaccgcgtatcacccgcagacagatggacagaccgagcgtctaaatcagatcctagaagatatgcttcgcgcatgtgtcctagatttcgggaagacctgggataagagtctcccctatgccgagttctcctacaataacagctaccaagccagcatacaaatggcaccctatgaagcgttgtatggacgcaaatgccggacaccgctattgtgggaccaagttggggaaagccaagtgttcaggactgatatcctgagagaagctgaagctaaagtcagaaccattcgggataatctaaaggtggcccagtctcggcagaagagttatgcagacaaccgacgccgtgacctagaattcgcagtggatgactttgtgtatcttcgggtcacgcccttgcgaggtgtacacaggtttcagacaaaggggaagctcgcacctcggtatgtgggtcctttccgtatcatttctcggcgcggagaagtcgcttaccagttggagctgcccgcctccttgggcaacgtgcatgatgtgttccatgtgtcgcaactcaagaaatgtcttcgggtgccgtccgagcagactgacccagagcaaattgaagttcgcgaagacttgacctacgtggagaggccagtgaaaatcctggacaccatggagcgcaggaccaggaaccgggtaatccgtttttgcaaggtccaatggagcaaccacgccgaggaagaagctacctgggagcgtgaagacgagctgaaggcagcccatcccgatctcttcgccagttcttccgaatctcggggtcgagattccgtttaa

SEQ ID NO: 53986 - DNA, 894 bp, Oryza sativa
  Clone ID: PAT_MRT4530_56133C.1
atggcgagccgagctctcactcccatgcagctcattggcacggtcttcgtggcgctcctcgcgacgtgccacgccggcggcatcgccgtgtactggggccagaacgacggcgaggcatcgctggccgagacgtgcgcgtcgggcaactacgagttcgtcatcatcgccttcctccccaagttcggcaagggccagacgccgcgggtggacctcgccagccactgcgatcccgcgtcgggcggctgcaccggccagagcaaggacatccgcgcgtgccagcgccgcggggtgaaggtcctgctctccatcggcggcggcgacggcagctacggcctctcatcccccggtgacgcccggcaggtggccatgtacctctggaacaacttcctcggcggctcctcctcgtcccgtcccctcggcgacgccgtcctcgacggcatcgacttcgacatcgagctcggcggcgccaagttctgggacgacctcgccagggatctgaagagcctggggaggagcggcgggaggagggtggtgctgagcgcggcgccgcagtgcccgttcccggacgagtgggacggcggcgcgatcagcacggggctgttcgacgccgtgtgggtgcagttctacaacaacccggagtgccagttcagcgcggggcggggcgcgttcatggacgcgtggaggaagtgggagtcggtgccggcggggcgactcttcctgggcctcccggcgtccaaggacgccgccggcaccgggttcgtgcccgccggcgagctcaactcccgcgtgctgccgctcatcaggggctcccccaagtacggcggcgtcatgctgtggtccaagtactacgacgatcaaaccggctacagctccgccatcaagagccacgtgtga

SEQ ID NO: 53987 - DNA, 4780 bp, Oryza sativa
  Clone ID: PAT_MRT4530_56134C.1
ctagttttgaactcgtcggaggacgtagtcgccgatggagagtgtgcgagctctgatgcgcttctcatgatatcggcgaagagcctgttggaatgcggctgctcggacggcaactcgttcgcgatgttcctcgagaagattcacatcgtcgcttcgcctttcgtcctgttcctcatcggtatacttctgtacgcgtgtgctttgatgttgtaactccatagggagcatggcttcagatccgtatacgagaaagaagggtgtttccttgttggatgtagtcggcgtggttcgtacggcccatagtactaagggaagttcttcgacccactttttatcataggccatgagcctattgtggacgcgagttttaatcccttgtagtactattccgttggcccgctcgacttgtccattgctctgagaatgtgacactgaggcgaagcagattttgaccccgagttcaatgctgtaatcttggaaatcactgctggtgaactgggatccattgtttgtaaggatgtggtgaggcaacccatatctctgcagcccctgcgagttgctggtatcagccgtggtactatcgtcgtgcgtgtccttgacggatggcttcgtcaggacatccaagaacgttctgggctcgagaggttctcgtctggaagcacgtcgtgcaaggtcgtctggttcgacattgtcttttcgataaacgtgtcgaacttcgattccgtcgaacttgcgttccagttttctgacttcggtgagatatttggctaattcggggctagagcatttatagtctttgtgtaattggttcgcgaccaactcggagtctcccttcacgactagtcgcttgacaccaagtactactgctgctcttatctctacgagtagtccttcgtactcggccgtgttgtttgttgcctggaagtttagatggattgcatgcttgaactgatctcctgtgggcgatgtcaagatgaatccagcgcctgctccttggctgttcagtgctccgttgaatgccatggtccaggtctcgttgatcgtttgggcggctggtctgtcctctgggatagtccagacggctacgaagtcagcgaagacctgtgacttgatggctgttcttggcacaaagtggacgtcaaattggcttagctcgactacccatttagcgattcggccgaccacatctttattcctgacaacttcacccaaagggaaggaggagatgacggtgaccttatgagcctggaagtagtggcgtagctttctcgatgtcatgacaacggtgtagagcagtttttggatctgtgggtatctagtttttgcgtcgtggagggcctcgcttacgtagtacgcgggatgttgtactttttccctttctacgatgataactgtacccacagaataaggcgtggcagcaatatacaggaataattcttcattgatttgaggagcaacgagtacgggaggatttgacaagtagcgcttgagcgcgataaatgcgttcttggcttcttggttccactcgaacttgtcttgcttctccttaagccttgtagcgacttcatgttctcgattgccttgatcttctcggggtttgcctcgattcctcgaccctccccgtgcctccctccaccgtttccgccactcgccgccctcactccccgccggaatcgagctcgcgccgtcgctctctctctccgccgtcaccgccgagctccggtccgccgccgtcgtcgccccggaccacctcccgcttcggcgccgcctccttcggcttcgccgcatcctcgccgacctcgtccacccctctgtttcactcgccgaccaccggaacgccgccgtccccgtcgactcgagccgcgccgccgcctccctccgctccggtcgccgtttccgtcgaccccgtcgacccggggtgagccgtggaccgccgcttcgtttccccccttccctcccctctctcggccgccgctccgccgtgcctatggccgccgccggcgaccataggggcgcgggcgcgccgcctcccgccgcagcgccggcgtggtcgccttcgggcgcaccgagcggattggggcgcaaggagggggtacgacggggggccgggttgtcagcagcccgcggccttaggtgcggcttaaacgggggacccacggcgccggcccgatgtgagcccggggtgcgcccggtccaccgtggaccgtggggctgccgcgtgggccccacccccgtggacccggtccgcgcgcccctcccctcggggtggttgtactcagtcttgctcaatttttcccaaacccagaagaggagcccctggaagatgaaggctttggtgtctagctcgtgcctgccgtcaagcgccttcgtgacacgtgtatcggctagcaagcaaacacattgggatgagattggaattggctaggcacttgccctcaccatagcgaattcagccaaagatgaacccttaatggctgccgccacctacttctggtccaataccatcaatgcttttctgttcaaccaagggctgatgacaccaatcttgatagatattaccatgatcattagtctagatgtgtcctcgttggctaatcccatgaatctgaacaccaagaatcagtacgacttcagaaccaagagcataggtggttggtctggttatgtggcggcatacatgggtcaaggatctgttactcctcgagagcatgtggcctttttgctcatgtggctagaaaagttccttttctgtggatccagttgtggccttacaaccaactgacagtttgtagccgaggctctagtgtcaaaaagagaatttcctgtaggcaagatcctcctcggctacttataccaattgctaaacaatgcatcggccatgatagccatcgactcagtagttggagcaggtggaccatgcatgaaagtcgtcaatcggccatctgtgacagaagctgaattcccaaggctggagctgattatagaagatgatggagaagagcacactcatcgtagatgcatgtcatatgaagaatatgcatccacaccagccgatgctggagcaaaattatcggctgaattgctaaaagtttggttctgcagtttttatgagggctttcaaaaagatgctcgagtttggtttccttatgaagattcagtgcatcttgacctcccatcagacttcagattcgaagacatcaaccatgaaaaatttcaaaaatctagggaagtcttctcagctgcaattagcccatgcattcttcctgtcagcgtacatcaacggaggaatatccaggtttcttatgaattttatcacccaatgagctctgccagacaacttggaatgggtcaactaccaatcggcttgttctttgccaataaaatccaatgccgaggggaaatttcatcaaccttgatgatggatcggctgctcaatctccaaggacctcctttgggtaacattgaaaatgtagagctggcgaggttcaggagcaaaaactttgacatatggtggggtgaatggaagctgcatctattccaccaaccggcctcaatgtacatgacagatctctttcctgatattacacctcagagcaatagtggcagagatatcgaatatgccccatgtctaattcccaatggaggtgggccatctccccctatcatcggctatcatgcccccaagacttcaactcttctccaagggctcatcagagaaccggccgatgctggcaaaaagaggaaaaccagagcatcggctgtagatacatcggccccggctccaaagaagaaaaccaagtcaaagaagaccaagccagccgatgacttgcctgccctagatccatccattgaaaaagctctggatgaagtagagatcggagaagacgttgatcaagctgcagacgaagtgagtgatacagagcaaacaccatctgcttcgctcaagcagactcctccaattccttctgccacaactcatttcttgaggcagcctcctcctcctccttctcctgttcaacaaccatcaagcgatcaaactccatcggctgtagggagtcaccatgttgaagaagaagtacaaccagctgctcctgctatcccagtcttagccgatttgttctcttttgatatcaaagattattttgatgagacagaggaagaaaccacaagcaaggctctagcccccctggatgacactgtcaagaaaacacttgaagacatatcccttcggctagaatcttcattagacaatctggtagccgactgaggttcaattcgggcacgatttgcagaaatccaagccctggccctagacgattcggcaaacaccattactccagcagtattccttgagcaacaccaatttaagctgaagaaggctaagcaacgtatagccgatcggcgagagcggatgaatatcgaagccacgattcaatccaatcggcagctcgtgcatgaagagaaagccaagttagatcacatctctgttgggccgattcaatcgaatatagatcggcttgaagctcgcaaaattgatctaatagctcaatttgaggagtgcaatgccgaactagatcttgaaaaacaaaagctagccgatcttccaaatgccattgaagaacagaagtccagattgagatcggctatcaagaatgtggctgacatgactaaatctctcaagatcatccctggaaccgatgcccaagacatccaagccatcgaagaagtagatcaaatcaggcaacgagctttgtcggctatccagcgctatctttctcaa

SEQ ID NO: 53988 - DNA, 309 bp, Oryza sativa
  unsure (1)..(309): unsure at all n locations
  Clone ID: PAT_MRT4530_56135C.1
catcgtaggcggcctgcataggaggnggaggccnaggagcacagcaagcagntaacctgcctgtnccggaagnttgcnccgaccttgttncnnngnactncgncccancggcgnggngcgncgtacgncagctgccnntacnccttttaagcaggccgncttgacgcttgctattaattatccctcctttttatgttttntctttgttctgtgtatcagatcgcgcccatgccatagctnggcatgacaagtttttgntannaatantatanctntanngatntgggctatactaaaaaaaaaaaaaaa

SEQ ID NO: 53989 - DNA, 945 bp, Oryza sativa
  Clone ID: PAT_MRT4530_56136C.1
agaagtaaagaacccatttttgtgctttgttcctgcttgttatttggagtttattagagtaaaagcctttttcttttccgttggtcgtgtagacgctgcagtttcggaagatccgctcttcgtggaagtcgaagccgtcgtttgggaaagcgagcaaggcaagtcacatcatcacctctcttcctctttcaaaacccctaaaacctgttttcggtggggtttgggtgcatgccagttatgggaagtagcaccccggccactataaggattaagctcgggcctctgttgcaaagcactaccgtactaaccacatgtctaatgggtaaggcttaactcggtgctcagtctagtcctgaacaaaaggacacggattggagatggatgaagtcgggcgtcgatggacattctccagggcaaatgaaggctacacgagctgcggcccggtagtcgagatgtcatacggcagagggttggtgccctgctgctaggggctcagttctgcctgcctgtcccgggtatcccggccgtaggtgggattgggtcggtactcttgtctaaggctaggatgggttggaaactatgtcacgtcttccgtccgtataccgtggtggtatgtggcacgtggttacacgtgaggaagatgtgtcttgtggcatttgtgggtgtgtcttgttgagtacggtggttgtactcagtcttgctcaattttcccaagcccagatgaggagttccttgaagatgaaggctttggtgtctagctcgtgcctgccgtcaagcgcctgtggtcgtcgccctagtcttccgctgtttctcgtttgtctttgtgtgtgctgggccttgcctcctgggacaaggattaatgcacgcacgtcaggaacgcccgttgggttatttccggtcgtgacaagttggtatcagagccacccttgaccctaggacgagccg

SEQ ID NO: 53990 - DNA, 3592 bp, Oryza sativa
  Clone ID: PAT_MRT4530_56137C.1
tcattcacaggggaagcttccttctgattgctggttgaagcggataacggtcttctgcttggtatcgtcctcctgaggttgattgccctttgctcggcctggagtaggtcggggagagacacaacttcttctatcgatgacaaatctttgctgaggctgtcggtgcagagaatggttggtgctgaaggtattattactatgatttattgcagagtcaggtgcagcgggaggagcattggtgctgtggatgatatcgtcgatgttgctgttggagctgactagctgatgagacaatcgtagggttgttcgttggatttctgcggtcttggtcaacaacacactgagttggcaatccttgggcacatggtttgttccttcgcacagaaaacatgtcaccttgcgggtgggacactcccctggtggatggtcttcttcacaataagagcagagtgtgagacacatgctagcaatgtgtccaatttctccacaacgggtgcatgcctttgattccatctcttcctcgccgagatgtcggggagactcatcttcatcatccgaggagacttgatctgacccttcactatcagacactctgccaccatggcttaggaggtgctgggtcaactgtcgtgcacctcggaaggtatttcctctttgacgtctaggaatagttatccctgctggaggccattcggtgctggtaatagtcatcttacatacttcttcttcagttcgcatcggcgcttttctcttctgattcttactcttcttgcgtttggcttgcttagtacgtgaccccacgtggtacgaaaggctaggaggaaagcatttcccgggattccatggattctctccattgggctctctactttgcacactaggctgcaagcttgacttggtgtgaggaggctggtttagcgatgtctgccctgctaaaccaaaggaaggggcttctttggcatatacccatggacaattcagggcacagtgtcctcgttctctacaatcgtgacaaaaggggacatcctcttctggcattggaagcttatcgacctgggtggcaaatgctcgatcaaacacatactgattttggtcttgacttccaaccaatggtagctgtgaaccaagcagcatgcttggaatggaccaagggtgtacccttgttaactctcttgaggctagtggtggatggaaaaatatgtccttaggttttatccacttggcttatcctacagtcgagatggctctgataccagcttgtcgcgaccgggaaaattgccttttcccgaacgccagtgtattaatccccgtcccaggaaaagccggggaatgtccatcgacccccgacttcatccatctccaatccgtgtacttttgtttataactagactgagccacaaactaagccttacccactagacatgtggaagtacggtagtgctttgcaacagaggcccgagcttaatccttatagtggccggggtgctacttcccacaactggcatgcacccaaaccccaccgaaaacaggttttaggggttttgaaaggggaagagagagagaacggacttccgaaccttcggcgacgaccgcgaaccacgcttcgggaacctccggaacgacagaagctacgcgaagcacacaagcaaagctacaaacctataaagaagcaataacaatacataaaaagaaaaccgggtacacagagacggtccacgggtcgacggaagcggaccccgtgtgtcaaccgaggcgagtggccaacaaacggactccactagacaccacacgggatgcacacgtagaaaccacgcggctaccgagcgggcacactaacacggacaccacacgcacaagcgaacgactaccgacaccggcacacgggcgagacgcggccggcacgaggcttgacgacgcggagccgaggacggaggcgaggacggggctgcagcggctcgcttgacgaacgcggacgacggacgagaacggctcgacggagggacgaacgccacgacgaccgggaacgacgagaggacgacgacgacgacgaccgggaccggcgaggaggcgacgaggacagccggcagcggctgcacggggacgaggacgacgaggaccacgccgctgcgatgccgacgacggaggcggcgccgcgagacgacgagccgggcgaccgatgggacgtcgacgacgagaacgatcggagacgacgatgaaacgatgatggcaggcagcagcggctgagcggaggaggggacggcgtggaacacgccgctgcgatgttggtgaaggtggtggtgcagcggggcgacgagccgacgaggaggaaggagaggccggcgcggagacgacggcgttccggcgaaattcgggcgacgccgtggcctggccgggagagaggacggcactgcgacgtcaacggaggagacggcgacgtcggtcggcgcaccggcgacgaacagcagccggccggagacggagaagtggtggcgacgccactggacaccggcgaggacgcgtctccggtgctttccccgcgaaacggagggctgaccgagggagaggaggtggctgcgaggccgagggagaagacggcgcagccggagggtgcacgggtgaggcgggaggtgcggctggaggtggccggcgcggagaaaagaggagggcgacggcgggaaggcagctccgggggtcacctcgcgaaacggagggcaagccggggtggaggaggtggcggcgacgctggaggaggcgacggcgcggccggccggtgcgcgggtgaggcggcacaggtggcgaccggcttgccttcgccgccgccgactggtgtttccgcctgcacggctggcctttatgccgctgttgttgggcgtccacgtcttcaccgaccggcttgccttcgccgccgccgactggtgtttccgcttgcacggctggcctattatgccgtcgttgttgggcgtctacgtcttcaccgaccggcttgccttcgccgccgtcgactgaccctccccgcacctcctccgtccggttccgcctctcgccgcccttcctcctcgccggattcgagctcgcgacgtcgctctctctctccgtcgtcgctgccgagctccggtccgccgccgtcgtcgccccgaacagcctcccaccttggcgccgcctccttcggcttcgccgcatccttgccgacctcgtccacccctccgtttcggtcaccgaccgccggagcgccgccgtccccgttgacccgagccgcgccaccgcctccctccgctccggccgcctcctccgtcgtcgccgtcgccccggggtgagccgtggaccgttgcttcctttcccccttccctcccctctctcggccgccgctccgccgcgccggttgtcgccggcggcgaccatcggggcgtgggtgcgccgcctcccgccgaccgcgccggcgtggccgccctcgggcgcgccgagtggctgccgtgtgggggccggccgtcggtcgccctcgcctcgggtgcggctgacgcgtgggccccacggcgccggccggtgtgagcccggctgcacccggtccaccgtggaccgtgaggctgccccgtag

SEQ ID NO: 53991 - DNA, 6230 bp, Oryza sativa
  unsure (1)..(6230): unsure at all n locations
  Clone ID: PAT_MRT4530_56138C.1
atgtcatccagcttcgtcgacaacagcgtcaacaccaacctcaaccaagtattccctgcttcaacaatgctggtgtggactcaagtcggtgaaatcgtcttcccagtttacaccatgatgctaatctcagccggtccatcaatgaccggaaacgagaacgcagtggctacaaaccaagacgaccccatgtcgaaagatcctcccgccgaggcggagaacggaacatcgacgacatacaagctcgagaaggattctaatgcggctaaaccttgtcattccgacaagaaccacgagccgacaaggatgacttccgaagcgacaaggttctggtgtcctatccacaaaaccaggaaacacactttgcaagcctgctgggtttttctcaacgtccgcgctgaaattcacgcctgcaaagagcgtggaattcagctcttgcacctcctcgaagactatggatcatcgacaacgagcgcgccgcgggaggtattggctatcgatgatgtcggcacgtcagcgcgcaccaatgcagaagcggagaatcaagtggccactccggcccaacacatcagagccgtcaacactatactgagggaaaccccctacgatctcgttctgaatgacgatctcgcgcattggacagaacgactacgggaatcagtgaccaacctcagcaacgcgttcgaagaggccgctgccgcagcgcacccagagcagccaccaactggcgatgccaatggtgaaaaccctgaacggagggaatcacctcatcgagccacccctccacctcgcggcaccggcgatctccgcgatcacctcaacggccgccgagaggcacgacgcacacgggacaatgagaaacgttcccggcgtcatgataacgaagatcgaggagaccgttcaaacgaagaccgagaccgtgataaccgccacaaccgccacgatcacaacgatcgcgaacggcggatgccaggcgatactggtcaacgacgtcgccataatgacgacgatgatggagaccggcgccgagacaacagtgggagacgacgacaggattctcgagagccaggccgacatcctcgtaatcacctgtggcagcagttcgtcaccaacttccaaggaacctacaagcgccacgcgatcgaagacgacctacacgcgttgacacagaactcgggtgaatccttgagggaatatgttcggcacttcaacgagtgcagaaatacagtccccgaaatcaccgacgcttctgtaattcgcgccttcaagtccggtgtcagagatcgctatactacccaggagttggcaacaagacgcatcacagctactccgagattgttcgagattgttgagcgatgcgcccatgcagatgatgcgctaagacgcaaaaacgataagccaaagatcgggggagagaagaaaccagccacggatgcacctgagtcaagcaagaagaaaaatcgcaaaatgggaaaaggaaagctcaagcggaagtcctcgcagcagaatacgcgaaccctcccaagcgcccagacccacaagtcgctcgagaagcacattgcatttgaaaaaggcaagcgagtacgcgtggttgaaaaggatgcggaggcggctccccaggaatcagactcagcatatccagactctgacctccacgtttcacacatcttcggaggttccacaacatactcctcaaagcaagaatacaagaaagtggaacgcgaagtctgttcgacatggcagggggctgcacccaagatgaagtggtctgaacagaagatagaattttcggaagaagaccaccccaagactgccgtcatcccaggacgatatccgatcgtggtcgaacccactattcggaacatcaaggtcgcgcggttctcgtccagaccattgggcaagattacgttgcctgtgactttcggccaagctaacaacttccgaacggagcagatcacctttgatgtcgctgaattcaatacagcttacaacgccatcatcgggagaactgcacttgcgaagtttatggccgcatctcactacgcgtatcaagtgctcaagatgccgggaccgaatggaacaatcactattcaagggaacgcaaagctggcggtgcaatgcgacaaacggagccttgacatggtcgagcaaacgcccagcccacccgccacgagtgagccacccaagaaaccgtccgacatgccgggggtccccaaggaggtgattgagcacaaactcatggtgcgacccgatgccaagccagtaaagcaaagactgcggagatttgcaccagaccgaaaacaagccatacgagaagagctcgacaaacttctcaaagctggcttcatcagagaagtacttcatccagagtggctagccaatccagtcatggtgcggaaggccaacgggaaatggagaatgtgcgtcgacttcaccgacctcaacaaggcttgtcccaaggatcacttccctcttcctcgaatagatcaactggtggactcaacagccggctgtgagctgttaagctttctcgacgcttactctggctaccaccaaatcagcatggcaaaagaggacgaagagaagacaacattcatcacgccgttcggggtattttgcaatgttaagatgccgttcggactgataatcgcagggaatactttccagcgcatggtccagggcgcacttagcgaccagctcggcaacaatgtcgaggcatacgttgacaacatcgttgtcaagaccaagacaggcgactcattgattgacgatctgcgggaaacgttcgacaacctccgacgatatcgcctcatgctcaatccagagaagtgcacgttcggagtaccgtcgggcaagctgctcggattccttgtctctggcagaggaatagaagcaaatcttgagaagaccaaggcaatcgagaacatgaagtcggccacaagactcaaggaagtacaaaagctaaccagatgcatggcagcactgagcaggtttgttgctaggatgggagaacgagggcaacatttcttcgctctactgaagaaacaagacaaatttgtatggacacaggaagccgaagaggcattcgttgcactcaagcgctacctatcaaacccccctgtacttgttgctccccaacctaatgaagaattattcctctatattgccgccactccatattccgttaacaccgtcattgttgtcgagagagagaaagtacaacgacgagtctattacgtcagcgaagctctccacgacgcaaagacaagatatccacagatccaaaagctgctttacgcggtcatcatgacatcaaggaagctacgccactactttcaagcccacagagtcacagtagtctcctccttccctcttggtgaagttgtgaaaaacagagacattgtcggccgcatcgcgaaatgggtagtcgagctcagccagtttgatatccactttgtgccacgaacagccatcaagtcccaggtactcgccgacttcgtcgctgacggagcgtggggctcctcaccgggagaccgcgcgggcccccctttgcctgttcggccgggggccctgggccgaggcccagccaggacgccccgccgcctcctctctcggggtcgccgacaggtggggcccacctgtcgggtccttcccccacctcccaccgatctcgctcgcgccgtcgcgcccgcaaccgccgccgcgccctcgtctccgcctcctccgggccacgtcgaccacgcacgcgcgtgcgccgcgtctcccggccacggtcgccgccagaccgcgccgtcgccgccgttgggttcgcgtggccgagatccaccccgtccacccctcctccgtcgagggcaccccgaagctcgtccgcccaccgacgtcgtcctcccgtggcttgccgtcgccgttcgtcatcgtcttcctccgcgccggccaccctcgcgggcggccttgagccaagccgagccgggtgcccgcgcccctttcctctcgagccgctgaccggtgggcccgcgtgccggcgcctttccccccctctcccgagccgctgaccagtgggcccgcgtgccggcgcccttcctccctctcccgagccgttgaccggtgggccccgcatgtcggcgccgcttcccctgtgctgacgtcagccctggaatatattgcgcaataattgatttaagtagtcttatagcttgtttgcaatgtttactttgtatgtcgctagattccaattcctccgacgctccggtgtacttcgagatagtcgccgaggttcctccagcagcagagcaaggcaagtcatgcttgtcacttgaacatgttgatcctatattgcaaatgttctattgcaagggtgggcgtgatggagcggggcgggccctgcgacggcctctgtcgcttccggattcacctaggcacgagaggggactgcccgctgccttgcgaggagtggggagtacgagtatatgtcagatggaggtttctccgaggagtaggcttcgtccgtgccgtcgaggatgcctgcaagggcggcgacggcaagcgggagccggagtggcggcgacggcgatggctgacgcggcagcagcaggcgggcgccagattccccatcgacatcgacgttgacctcgagcgtatccgcatgcgtgatgtcggcggtctcatgtcacgcccacgggaacaccactccacaggcatcctcgacggcacggacaaagcctactcctcggagaaaccttcatctgacccgaactcgaactctgggaggtgtacaactgtacccacaagacacagccccacgacacgtttccatgcgccgacatgccaccacgacataccggaaagaggccgtgacaggacccttcgcataaccccctctagccaagcacaccacacctcaggtttcacccccgtccccagcgggcaacgggcagtcccctctcgtgcctaggtgaatccggaagcgacagaggtcgtcgcagggcccgccccgctccatcacgcccacccttgcaatagagcatttgcaatatangatcaanatgttcaagtgacaagcatgacttgccttgctctgctgctggaggaacctcggcgactatctcgaagtaccccggagcgtcggaggaatcggaatctagcgacatacaaagcaaacattgcaaacaggctataagactacttaaataatttattgcgcaatattttccagggctgacgtcagcacaggggaagcggcgccgacatgcggggcccaccggtcagcggctcggggggaaacggttcaccgtggaccgggaccacgcgggtggtccaccgccggtccacgggaccgacggcccagatcaccctcggggttgatcggatgggcggcggcgacccggctcggcttggctcaaggccggcccaccggccacggcgatggcgacggcgcgcgcgcgcgaacgcgttgccggcgacagcaaccggcggcggaggcgacggcgcaaaggcgacgcgaaggcggcggcgctaagcggcggctaggaaggagagggaggggaatagatgggagaggaagcctcaccgagggtggccggcgcggaggaagacgacggcgaacggcgacggcaagccacgggaggacgacggcaaccggcggacgggcttcggggtgccctaaggaaggaagagagagagagattagagagagggagatgaaccacggcgaccggcattcatggccgaaggcggcggtagaggttgaacttaccggagcgcgaggggatgcgaattccggcgacgaaactcaacgggaaaggggcggccggggccccggacgtggccggtaggggcgagatttcgccggccaacgtggggagtgggggaggagagagaggcgggattcgaaaatcgaatcccggccatcttgggcgcgggcgcgggcgcgagagagaggggagtgggcgcgggggacgcggcgcacgcgcgggcgtggctgacgtggcccggaggaggcggaggcgtgggcgcggcggcggtagcgggcgcggtggcgccggctggaggaaggagacgggcccgacaggtggggcccacctgtcggcgtcccggggagagagggaggggcggcttgggccggcccacaaggaggagggcgcgcgcggcggggtggactgggccgacggcccaagaagaggaaaagaagggaaaaggaaaaaaaaagaaaaggaggaaaagaatttccctgggat

SEQ ID NO: 53992 - DNA, 282 bp, Oryza sativa
  Clone ID: PAT_MRT4530_56139C.1
atgtggcaagcagcagatgcagctagcggcaagccggccggcgacctggcttttaatttccgggcactgttaacttttggccatgctaaagtctcgtggattccaagtgtcaatcatcgtctgcatggcagagggcaaaaaaagcaagatcttgtccaacaaagaaataatgtggtttttgataaatcaccatctattacatatatgcaggtaatttttagggcaacatactggctccggctctggactcaactacaaaggtctaatgaagatgctctttga

SEQ ID NO: 53993 - DNA, 231 bp, Oryza sativa
  Clone ID: PAT_MRT4530_5613C.1
atggcgattccctcgcaatgcacctggaatgatattctgataagatctgcaacacccatgtcaagcggccaaaaggtacaagaagcgagtatttcgccgggagtttgtgtcatcatggacggccgccgtagcggatgcggccatgctccatctggttttttttcgaggagcatagaagcacttctcgtaaccgtaatcatgttaatggtggcttcgcagcttgatacgtag

SEQ ID NO: 53994 - DNA, 701 bp, Oryza sativa
  Clone ID: PAT_MRT4530_56140C.1
ctagccgccgatctccgccgccggtcggtcgccgtcggccgccgtcttgcgccgctgccgcatgcgcgccgcgccgtcgcgcgccatggtcgccgggccggtttgcgccgtgcccgcgcgcaccggctgcgagctcccgccgccgtccgatctacccttgggtagatcggggccgtcggttcggctgtcgcgtggccgccgcgtggcgcaccgctcctccccggtccgtggacccgatccgccatggaccgccctccccgagccgctgaccggtggggcccgcttgccggcgccgcgccccgccttgatgacgtcagcacacaagccagcgtgggcaacggctgggcttgtagtgtagctttcctctagttgacgcatccaggcaagggtgggcgtgatggagcggggcaggccctgcgacggcctctgtcgcttccggattcacctaggcacgagaggggactgcccactgccttgcgcggagtgggggtgaaacctgaggtgtggtgtgcttggttagagggggttatgcgaagggtcctgtcacggcctctttccgacgtggatctgaatgtcaacattgtcgtttgtgtaccccggccggtcctggacggggattttaatgcacattctgcttggaattctattcgggaatttctgggcctgacaagttggtatcagagccgaccttgaccgtagga

SEQ ID NO: 53995 - DNA, 4282 bp, Oryza sativa
  Clone ID: PAT_MRT4530_56141C.1
ttatcctcttcgttccaagattttgtatggtcctacaaagcgtggtgccaacttgccttttatctggaagcggtgtactccgaggagcggagtgacacggaggtacacaaaatcccctgcttcaaaagtgagctcccttcggtggttgtctgcgtagcttttctgtcgagactgtgcaattctcagcctctctctgacggtcctgactttttcctctgcttctattagcacttctgttccgaacagctgacgttcgcctatttgatcccagaagagaggtgtccggcacttccgaccatacaatgcttcgaacggtgccatttgtaaactggcctgatagctgttgttgtaagagaattcagcataaggcagacttttatccaaagctccaccaaaatcgagcgcacaagctcgcagcatatcctccaagatctgattgaccctctcggtctggccatctgtatgcggatggtaggctgtgctgaaattcaaacgggtccccaattcttcctgcagcttcgtctccccgccggaatcgagctcgcgccgtcgccctctctctcctctgtcgctgacgacctccggccggtcttctctgctcgccgggaccgtctcccgccccggcgtcgcctcctccggcttcgccgcaccgccgtcgaccccgtccaccccctcgccgagcccgcggaccgccggaacgccgtcgaccccgtcgacccgagccgcgccgccgccttcctccgctccggccgcctttttcgtcgtcgccgtcgacctagggtgagccaaggatcgccgcctcttttcccccttcccttcccctctctcggccgccgctccgccgtgcctatggccgccgccggcgaccatagaggcgcgggcgccgcctcctgccggctgcgccggcttggccgccctcgggcgcgccgagtggctgccgcgtggggcccggccgtcagccgcccgcgccctcgggtgcggctgacgcgtgggacccacggcgccggccggtgtgagcccgggtgcacccggtccaccgtggacccacctcggccatataaggaccggtcttcgggcctctgttgcaaagcactaccgtacttccacatgtctagtgggacaaatgaaggctacacgagctgcggcccggtagtcgagatgtcatggcacagggctggtgtcctgctgctaggggctcaatcctgcctacctgtcccggaggttccggccgtaggtggggttgggtcggtactcttgtctatggctaggatgggttggaaactatgtcacgtcttccgtccgtataccgtggtggtattttgctcaataactaaaatgtcgaatggttagcctgggttggcttgggacgagctgggacccagggtcgggttgccagttcggtcttgatcatcgtaggccttgggttaaggcagtactagatggtcaggtcagtgaagaagaagacatcgtcagttgtttgccgaagctccggaagactgcaggatccgctagcgaagtggaggaagcagtgaagccagctgtgaagcaggacaaaagacttagatctgttaaggtcctatccttagtttctaatctgtctctcccctttgttttccctctcttcctctccaaacctttgcaacagatggctgacaatgagaaaggcaataaggtcagaagtcaggacattggtacctcgagctcccgagtgaatgaagcaccagacaccagttgtgtgacactggtccaacacctgattaaccagaaccgattgcttatagagatactacagcagcatcagacgccaattctgaacctgagtcagatacaacctcaagtgcagttggaggcagtccaagcactcacaccacaagtcagcatgccgccagcatcccgaaggacccatggtgacgtgccacatgttgactcaaaagaagcaagtatcatttgttttatgtgtgatgagcaagggcactatgcaagggagtgtcctcagcagaaaagaaaaacaccaatgcgaaccgaagatgaagtccgaatgacaaaacgtcagagaagaaataccttccgaggtgcaccacagttgacagagcatcttttagctaatggaggtagagtgtctgatagtgaagattcagatcaagtctcctcagatgatgaagatgagatggaacgtaaggcatgctctcgttgtggagaaatcggtcatgttgccagctcgtgtgccactacatgcgttcattgtgaggaagaccatccacccgacaggtgtccaacgagcaggatcacttgtttcttttgtgaaggaactgatcatgtaccaaaagattgtcaattcagtttgctgctgacgaagaagatggccaaccaacccgccagttccaacggagagaagcatcaaggcaacacaaatcctcgccaagattacagtttcagcctaactccagtgccaggacagaggaatcaaaatgagaaaagaaaatgccgagtccgggaagatatatgttgcttcaattgtcaaggaatgggtcatttcgccgacaagtacccaaaaccgagagacatagctgccagcacgtcagtccacgcaactccctgcaatcagaagcttgctcctcagcgaattgtcatccatgcatcccgaagcagtcctatagcccgcgttgcaacagctccaactccagcgagtgcattaccacaaggtgtcaatgctcaatttcagccccagccaccagttgacaagacagaggccagtatcggcattttacctttggatgttccagcacagcagccaagaaatcaagtacaagatgaagaacccaagccaatgggaatgatcacagtgcaactactcctagaggaatatgaagattttgagaaacttgtggacaaagccatacaactcgaaagtgagcataatcggatgaagaactgtaagagaaggattgtcagcatcccagtattcccatgtggtaaccaaagacagcgcacggagccacttcagatcaccggatcttctgttgcgcatcaagagtttccgccccaagaagatggacacaatgcagacaacaacattagcaatactaatgatgatgataccaccaacaaccatgcttcttgccccattagtgaccactcaaatcaagcgtgcaatgtcaacatcattcaccaaggtgtcgacgatagtatcaatgatggcacccaaaatgacaaccctagcaattgtgactctgagaaagactccaatggtgatagcaactatggtaccactgatgccaatgttagcaaggatttccaaccaccaattccaactccaagtcagaatgatcgtccccagacggatagctcagcaaagaagacgttgatttgctacaattgcaaaggaccagggcattactcgagggactgcctgcaaccaaggcaaagtcgatctccacattaccgccaatttacacgaagcagacatcccaatcgtattgtggtcactggagcaaacgccgtacccgtttcactgaaaggcagcaagccaaaggatctcatcgtccccagaagcgtccgcaatccacattaaagaataccacctgttagaggttgacgccaaagatatgaatgataagaagttctagaaccgaagccccatcctcaaccaccgcagcctagtctgggtcagttagaagttcaaccagggacaagtcgggtgaagagaagattccatcgccgtcgttgccccggaccatctcccgcttcggcaccgcctccttccgcttcgccgcatcctcgccgacctcgtccacctctccgtttcggtcgccgagccgccggaacgccgccgtccccgtcgacccgagccgcgccgccgcctctctccgctccggtcgccgttcccagtcgtcgccatcgatccggggtgagccatggaccgcccatttcgtttcccccttccctcccctctctcggccgccgctccgccgtgcctatggccgccgccggcgaccataggggcgcgggcgcgccgcctcccgtcggccgtgccggcgaggccgccttcgggcgcgccccgcggctgccaagtgggcccggccgtcagccgcccgcgcccgcgggtgcggctgacgcgtgggacccacggcgccgaccgccgccagccgcgtgctcccggtccaccgtggaccgagaggctgacgcgtgggccccactcccgtggacccggtccgcgcgccctctccctcggcttgttcaccctaggataaacaaaaccccaactagtgggtactctattcat

SEQ ID NO: 53996 - DNA, 441 bp, Oryza sativa
  Clone ID: PAT_MRT4530_56142C.1
cccacgcgtgctcgctgcttcgcttgagccgccacctgatcccgtacctgtccgcctgcgccgccgccgcaccgtcgtgcgcatcgtggtgcgctcctatgtctaggccgatgtcgctgctactgctgctgctgccagtggcgctcgcaatgacggggtacagcagcggatccaccacgcaggtgaggaggctgctgttcaagcaggtgatctagaaggagagctacatctacacctacctcctcgacgacgtgagagaccccgagaaaatcgacgtgttgaacgaaactgtggacagaacacgtgatagagatctcaatcttatcaaggagctgggctataagctagactatgctatgcatacccatgagcatgctgatcactggactggaacaggtataataaagactaagttacctggagttaaaaacgtgattgcaa

SEQ ID NO: 53997 - DNA, 7041 bp, Oryza sativa
  Clone ID: PAT_MRT4530_56143C.1
aacggaatctcgaccccgagattcggaggaactggcgaagagatcaggatgggctgccttcagctcgtcttcacgctcccaagtagcttcttcctcggcgtggttgctccattggaccttgcaaaaacggattacccggttcctgctcctcgctccatagtgtccaggattttcactggcctctccacgtaggtcaagtcttcgcgaacttcaatctgctctgagtcggcctgctcggacggcactcgaaggcatttcttgagttgcgacacatggaacacatcatgcacgttgcccaaggaggcgggcagctccaactggtaagcgacttctccgcgccgagcaatgatacggaaaggacccacgaaccgaggtgcgagcttccctttcgtctgaaacctgtgtacacctcgcaatggcttgacccgaaggtacacaaaatcgtccactgcgaattccaggttacggcgacggttatctgcataacttttctgccgggactgtgccacctttagattatcccgaatggttctgaccttcgcttcagcttctctcagtatatcagtcccgaacacttggctttccccaacttggtcccacaagagcggtgtccggcatttgcgcccatacaacgcttcataaggtgccatttgtatgctggcttggtagctgttattgtaggagaactcggcataggggagactcttatcccaggtcttcccgaaatctaggacacatgcacggagcatatcttctaggatctgatttagacgctcggtctgtccatctgtctgcgggtgatacgcggtgctgaaatttaatcgggtacctagctcttcttggagcttcttccaaaagtgagaggtgaattggcttcccctatcagatacaattttattaggaacgccatggagactcacgatcctagcgaagtagagctcggctagtttgttccctccataggtggtcttcacaggaataaaccgagctaccttggttaatcggtccacaactacccatatagaatcatatccaccttgggtttttggaagtccggtgatgaaatccatcccaatttcatcccatttccattctggtacttggagaggttggagaagtccggccggtcgttggtgctctgccttgacacgccgatttccgttccatagggttccgtgttcatcctctgtgaaaccagcggctttaccctgtttcatattcttgaggagtccacgcatgtccggatcgttcttctgagcctcgcggatttgatcgagcaaggtaggcttggcttccagcgtagccaagaatccacgactaactatgcttaggttcagggcttttatctgttgattaagtttgggtggaatgccacggacttcaagagtgttgcaatggctttttcgacttagagcatcggcgaccacgttggccttaccaggatgatagtgaattcccacatcataatccttgatgagttctaaccatcttctctgccgaagattcagatccgactgagtgaagatgtatttcaaactcttatgatcagtatatatttcacagcgattcccaatgagatagtgccgccagatttttagagcatgaaccatcgcggctaactccaaatcatgggtagggtagttgccttcatgaggccgtagctggcgtgaggcataggccaccacatgaccttcctgcatgagcacgcaccccaatccttggcgcgaagcgtcacaatacaccatgaagtccttgcgagtatccggtaagattaaaaccggcgaggaaaccagcttttccttgagagtttggaacgccttctcgcattgcgggctccacacaaatttctcttctttcttcaacaactgtgtcatgggtcgagcgattttggagaagttctcgatgaacctccagtagtatcctgccaaacctaagaaactgcgaatttgagtgactgtcttgggttgcttccaatcggtgacggcggtcactgtttcggggtccacagcaactcatttagcagatatcacgtgccctaagaatttgacttcggacaaccagaactcacacttgctaagtttggcatacaattgatgttcccgcaactttcccaacaccagacggagatggtgctgatggtcttcctctgattgtgagtataccaaaatgtcatcaatgaaaaccacaacaaacttatccaagtattccatgaacactttgttcattaagttcatgaagaaggcaggagcattggttaaaccgaatgagatcaccgtgaattcatacagtccgtatcgcgtggtgaatgcggtcttcaggatatttgcttcacggatgcgcaactggtgatatccggaacgaagatcaatcttggagaataccgtggcacctttaagctgatcgaacagatcatcgatccggggaagagggtacttgtttttgatggtgacttcattgaaagctctgtagtcaacgcacatcctcttcgtcttgtctttcttctccacaaaaatcacaggagcaccccagggagaagtactcggacgtatgtaccccttttctttcaactcttccaactatttcttaacttcggccagttcatttgctgccatacggtagggtcgcttgtacagaggagtggttcctggagcaagatctatccggaactcaatctctcgcttgggcggcataccgggtagttcttccggaaacacgtctccgaactctctgacgatggggatttttgactgtcctatctgatgaagttcagaactactgacagaggttgggggtgcaaagaaaacaaccggttgttccggccctcggtacagagtgacagtgcgtcttgcacaatccactactccttggaattgagccaaccaattcatcccaaggatcacatccaagttcttggtgtctagaagaatcagatccgaggaaaaggaatcccctgaatttctatagggacggcagggctataatactttgctgtcataacccctccaggggtggtgatgagcagagggttcctaagcctttctacccccaactgatttctccccacgaatggcacagatataaacgagttagaagctccagagtcgaacaaaatggtagcagggatggaatgaatgaggaacgtaccaacgatgacgtctggagttgtcagcacgtcctcggccgtcacgtggttcacacgaccccgaatgacatccttaccaccgttgttggagcggggaggcgcttggccttgctggcgcctcggctttgggtatttatccgcaaagtgcccaggctcgaagcagttgaagcacagacgctgcggaccttgaacgtccctgcggccttgaccaagctgcgcggctggcgttggaggacggggcgcacaagtcccttgctgactctgctgttgctgcggctgtgggacgcgcaccacgaattgaggtcggggcgcggagcgaggttgctgctgctgtgaagaggatccccctggatagggattggtgtagcggaccctttggttagccccctgttggttgcggaaactcgccaagcgacgcttgtgcgactccagttccttgtgcttggcttccaagcggatgctcttgtccaccagacgttggaaatccggatagtccccggagactagacggacggacagctcaggatccattcctgccaagaacttctcctgcttttcctcatcttcccgtacatcctccggggcgtaccgggccaggttgttaaactcatgcaaatactccatcacgaagcggttgccttgcttcaactctcggaattcccttttcttaagggccatgactccggcgggcacatgggtcctccggaaagcggcggtgaagcgggcccaagtaataggctgcccctctggcagcgtagcctggaaatggtcccaccatagagatgcgggcccctgcagttggtgggcggcgaagatgactttctcctcatcgctgcactgcacggtgtctaactttttccccacggcatgcaaccaatccaacgcatccacggggttattggagctagagaaggttggtggacggatgcggaggaactcggcgagtttggagtgttgtgggggtggtggtggagcattatgttgtggcggatgttggatgtggtggaggaaagcagccatcatgttggcctgctgggcgaggatttgggtgagaatggcgttggtgtctggtggtggtggtggaggcggaggaggaggtagaggtgggctgccatggttgttgtggttgctgccttcgggttggttgccatcacctgtattagcatttctcctggtcgtcaccatggaaggtgagcagcagcgcatcctccgtgctaccaacgccggaggcttccccctcctgaggaaccacgggcgcgggctcggcacgaggggtctccacgaagcaggtccatgccaaggactggcgaacaagctcgggcctggaggtgctcttgcgggtggtgatcttctggctgcggcagacgcggcgacgcttggggcgacagacctctccctgggcgatcttgagctgatgcagctgcgcctccactgcgtctagatccttcttcagctgcagattctcctgacgcagctccaggatcttcatgttgttctcgaccatcccacggcgcaccatctgatggaagtcgatacgagccgcgtcgtacgcctccaccatgcgcgccagatgcatgatggtagtgtcatcctccgagctagcatcccggaaggtggcgtagtcgcgggctcctccgcgacgagggtggtagcggtagggcgagtgctgcaactcgtccgggtagcgctggtgaagagtgccgatggcgaggagtgcggcgttctggcaagcagcgaagaaagaatctccacccgcggtgactgtcaacgaagtcctctcgggtgagccagtgaggatcactgcagtaacctcccaagcagcgtggagctctgcatcgtcaccctcctgctccgggagctgcctgccctggtagtccactccatgcggataccccaggacaacgcacatgccccgcagctccaaaacgaagccagtcaggtccagaccacgacggttgatgctaccggccatctacaaacactgccttaacccaaggcctacgatgattcagaccgaactggcaacccgaccctgggtcccagctcgtcccaagccaaccatggccaaccgttccacgttttagttgttaagcaggttttaagaatgaaaacactaacttgggtacattgctccgtgtacttttgtttataaccagactgagccacaaactaagccttacccactagacatgtggaagtacggtagtgctttgcaacagaggcccgaagaccggtccttatatggccgagccaaggggagggggcgcgcggaccgggtccacgggaagtggggcccacgcggcagccgctcggtccacggtggaccgggcgcacgcggctggcggcggtcggcgccgtgggtcccgcgcgtcagccgcacccgcgggccccacgcggcagccgctcgagggcgcgcccgaaggcggccacgccggcgcagccggcgggagcggcgcgcccgcgcccctatggtcgccggcggcggccataggcacggcggagcggcggccgagagaggggagggaagggggaaacgaaaagggcggtccacggcttaccccgggtcgacggcgacgacgggaacggcgaccggagcggaggaaggcggcggcgcggctcgggtcgacggggacggcggcgttccggcggtcggcgggcgaaacggaggggtggacgaggtcggcgaggacgtggcggggccgaaggagacggcgccgaggcgggagatggtccggggcaacgacggcggcagaccggagctcggcgacgacggcggagagagagagcgacggcgcgagctcgattccgacggggagagagagcggcgagtggcggaaacggcggagggaggcacggggagtgtttatattggcatcgcagtggcctcaccttccccggcttgccctccgtttcccgcggagacccccggagctacgttcccgccgtcgcccttctctttccttcgcgccggccgcctccagccgcctctccctcctcgccggagcgtcgtccggtcgcgccgtcgccgccagcggcgtcgcagctgcttcccctccaccggcgtcgcctccgtttcacgcggagaccaccggagacgcgtccccgccggcaaccagtggcattggtgccactgtactccctccagccggctgctgtccctcgtcggagcgtcggccgacgtcgccgtctccttcgtcgacgccgtggcatcgtctccttccccggccactcctctgtttcgccggaacgccgtcgcccgtgccggcctccatcctcgtcgtcgccgacgtcccttcggccgcccgttcctcctcgcttgtttaccggtcagccgcggcaccaccacctccggcatcgcagcggcaaggtcgccctcggcctcgcctccccttcgaccgaacccctccgcggtccatcgtcgttgtctccgttcgttctcgtcgtcgacgtcccgtcggtcgcccggctcgtcgtctcacggcgccgcctccgtcatcgtcatcgcagcggcgtgttccacgtcgtccccgtctccgtgcagccactgccggctgccctcgtcgcctcctcgccggccccggtcgtcgtcgtcgtcgtcctctcgtcgctcccggtcgtcgtggcgttcgtccctccgccgagccgttctcgtccatcctcggtgtttcgtcaaggtcgctatagccgtcaacgtcttcgtcctcggctccgcgtcgtcaagcctcgtgccggccgcgtctcgccttcgtccaaggatcgccgccgaagccgtcccctcgccgttcgtctccgttgtgccctcttcgtcgttccggaggttcccgaagcgtggttcgcggccgtcgccgaaggttcggaaggccgttctctctgagcaaggcaagtcacatcatccttga

SEQ ID NO: 53998 - DNA, 261 bp, Oryza sativa
  Clone ID: PAT_MRT4530_56144C.1
atggcctcctctggatgcatcaaatccagctccgggcaattgtcgatgaacagctctcgcagactggagagggatgttagtgaagcccagccacgaagtcctgcttctggcaactgcttttgcttcgatgtcaaactcagccctgaacccctcgcctgcttccgcagcctcgctgtcagcaatctccagagagaaacggaagaagattttcagggatcgagcgggcaggtgatgcagattggcctcgccgtggaagcctga

SEQ ID NO: 53999 - DNA, 9560 bp, Oryza sativa
  Clone ID: PAT_MRT4530_56145C.1
aacggaatctcgaccccgagattcggaagaactggcgaagagatcgggatgggctgccttcagctcgtcttcacgttcccaagtagcttcttcctcggcatggttgctccattggaccttgcaaaaacggattacccgattcctggtcctgcgctctatggtgtccagaatcttcactggcttctccacgtaggtcaagtcttcgcgaacttcaatttgctctgaatcagcctgctcggacggcactcgaaggcatttcttgagttgcgacacatggaacacatcgtgcacgttgcccaaggatgcgggcagctctaactggtaagcaacttctccgcgtcgagcaatgatgcggaaaggccccacaaacctaggtgggagcttcccttttgtctgaaacctatgtacgccccgcaatagcgtgacccgaagatacacaaaatcgtccactgcgaattccaggttacggcgtcggttgtctgcataactcttctgccgagactatgccacctttagattatctcaaatggttctgactttagcttcagcttctctcaggatatcagtcccgaacacttggctttccccaacttggtcccacaatagtggtgtccggcatttgcggccatacaacgcttcatagggtgccatttgtatgctggcttggtagctattattgtaggagaactcggcataggggagactcttatcccaggtcttctaggacctgattcggatgatcggtctgtccatctgtctgcgggtgataggtgaattggcttcccctatcagatacaattttcttaggaacgccatggagactcacgatcctagcgaagtagagttcagctaatttgttccctccataggtggtcttcacaggaatgaaccaagctaccttggttagtcgatccacgattacccatatagaatcatatccgccttgggtttttggaactccggtgatgaaatccatcccaatttcatcccatttccattctggtacttggagaggttggagaagtctggccggtcgttggtgctctgccttgacacgatgatttccgttccatagggttccgtgttcatcttctgtgaaaccagcggctttaccctgtttcatattcttgaggatcccatgaatatctggatcattcttctgagcctcgcggatttgatcgagcaaggtaggcttggcttccagcatagccaagaatccatagctaacgatgcttaggttcagggcttccaactgttgattaagttctggtggaatgccacggacgccaagagtgctgcaatggctttttcgacttagcgcgtcggcgaccacgttggccttactagggtgatagtggattcccacatcataatctttgatgagctctaaccatcttctctgctgaagattcagatctgactgagtgaagatgtatttcaaactcttatgatcggtatatatttcgcagcgatttccaatgagataatgccgccagattttcaaatcatgaaccacagcggccaactccaaatcatgagtaggatagttgccttcatggggccgtagctggcgtgaggcataggctaccacatgaccttcctgcattaatacacaccccaatccttggcgcgaagcgtcacagtacaccaagaagtccttgcgagtatccagtaagattaacacgggcgaggaaaccagcttttctttgagagtttggaatgctttctcacactgcggactccacacaaatttttcttccttcttcagcaactgcgtcatgggcctggcaattttggagaaattctcgatgaatcttcggtagtatcctgccaaacccaaaaagctgcggacctgagtgactgtcttgggttgcttccaatcagtgacggcggtcaccgttttgggatccacagcaactcctttagcagaaatcacatgccctaagaacttaacttcggacaacaaaaactcacacttgctgagcttggcatacagttagtgttcccgcagcttccccaacactaaacggagatgctgctgatggtcttcctctgactccgagtacaccagtatgtcgtcaataaagaccacaacgaacttatccaggtattccatgaacactttgttcattaaattcatgaagaaggcaggagaattggtcagaccgaacaacatcaccgtgaattcatacagtccgtaccgcgtggttaatgcggtcttcgggatatcttcttcacgaatacgcaactggtgatatccggaacgaagatcaatcttggaaaagacagtggcacctttaagctgatcgaacagatcatcgatctggggaagggggtacatgtttttgatagtgacctcgttgagagctctgtagtcaacgcacatcctctttgtcttgtctttcttctccacaaaaatcacgggagcactccagggggaagtgctcggccgtatatacccattttctttcaactcttccaactgtttcttgacttcggccaattcatttgctgccatacggtagggtcgcttgtataaaggagtggctcctggagcaagatctatccggaactcaatctcccgcttgggcggcataccgggtagctcttccggaaacacatcaccgaactcactgacgatggagattacggataatcctagttgatgaagtactgaagtgccggcgggagttggagtgcaaagaaaacaactggttgatcgggcccccggtacagagtgacagtgcgccttgcgcaatccactactccttggaattgagccaaccaattcatcccaaggatcacatccaagttcttggtgtccagaagaatcagatccgagggaaaggaattccctggatttctataggaacggccgggctataatacttcgttgtcataaccactccaggggtggtgatgagtagagggttcctaagcctttctacccccagctgatttctccccacgaatggcacagatataaacgagtgggaagctccagagtcgaacaaaatggtagcagggatggaatgaatgaggaacgtaccaacgatgacgtctggagttgtcagcacatcctcggcagtcacgtggttcacacaacccccagtgacatccttaccaccgttgttggggcggggaggcgcttggccttgctggcgccttggcttcgggcatttatccgcaaagtgtccgggctcgaagcagttgaagcacagacgttgttgaccttgagcgtccctgcggccttgaccaggctgcacggccggtgcaggagggcggggtgcacgggtcccttgctgattctgctgctgctgcggctgtgggacgcgcaccacgtatggaggtcggggcgcggggcgaggttgctgctgctgctgctgctgtgaggaggatcctccaggatagggatttgtgtagcggaccctttggttagctccctgttgattggaaaaattcgccaagcgacgcttgtgcgactccagttccttgtgcttggcttccaggtggatgctcttgtccaccaggcgctggaaatcaggatagtccctggagaccagatgcacagacagttcagggtccattcctgccaggaatttctgttgcttttcctcatcttcacgaacatcctctggagcgtaccgggccaagttattgaactcatgcaaatactccatcacagagcggttgccttgcttcaactcccgaaattccctcttcttaagggccatgactccggcgggcacatgggtcctccggaaagcggcggtgaagcgggcccaggtgataggctatccttccggctgcgtagcctggaagtggtcccaccatagagatgcgggcccctgcagttggtgggtggcgaagatgactttctcctcatcattgcactggacggtgtctaactttttcccaacggcatgcaaccaatccaaggcatcaacagggttgttgaagctagagaaggtaggcgggcggatgcggaggaactcggcaagcttagaatgctgcaggggtggtggtgggggcggagcattgtgttgcggcggattctggatgtggtggaggaaagcagccatcacgttggcctgctgggcgaggatttgggtgaggatggggttggtgtcaggtggcggtggtggtggtggggaggaggtggaggtgggctgtcatggttgttggggttgctgccttcgggatgactgccttcgccagtaacagcgcttctcctggttgtcaccatggaaggtgagcaacagcacatcctccgtgctaccaacgccagaggctccctcctcctgaggaaccaagggcgcggactcggcgcaagggatctccacaaagcaagtccacgctagggactgacgaacaagctcaggcctggaggtactcttgcgggcggtgatcttcaggttgcggcaaacgcggcggcgcttggggcggcagacctctcccttagcaatcttgagctgacacagctgcgcctccactgcgtccaagtccttcttcagctgcaaattctcctgacgcagctccaggatcttcatgttgttctcgaccaacccacggcgcactatatgatggaagtcgatacgggccgcatcgtacgcctccaccatgcgcgccaggtgcatgatggtagcgtcatcctccgagctagcatccctgaaggtggcgtagtcgcaggctcctcaacgagggtggtagctgtagggcgagtgccgcaactcgtccaaatagcgctggtgaagagtgccgatgacgaggagcgcggcgttctggcaagcggcggggaaagaatctccacccgcggtgactgccaacgaagtcctctcgggagagccggtgaggatcaccgcagtgacctcccaagcggcgcggggctctgcatcgtcaccatcctgctccggaagcttcttgccctggtagtccactccatgcggatatcccaggacaacaaacatgccccgcagctccaaaacaaagccagtcagatccaggccatgacggttgatgttgccggccatctacaaacattgtcacgaccggaaataacccaacgggcgttccttacgtgcgtgtattaatccccgtcccaggaggcaaggtacaccaaaagttgatacaatatagagtttaacaagcggaagcataaattcggcccaagccgccgccgcccctcctctcacgcgggtcaccgacatgtggggcccacatgtcgggcccttctcctacctcccactagacatgtggaagtacggtagtgctttgcaacagaggcccgagcttaatccttatagtggccggggtgctacttcccacaactggcatgcacccaaaccccaccgaaaacaggttttaggggttttgaaagaggaagagagagagaacggccttccgaaccttcggcaacgaccgcaaaccacgcttcgggaacctccggaacgacgaaagctacgcgaagcacacaagcaaagctacaagcctataaagaagcaataacaatacataaaaagagaaccgagtacacagagacggtccacgggtcgatggaagcggatcccgtgtgtcaaccgaggcgagtggccgacaaacggactccactaggcaccacacgggttgcacacgtggaaaccacgcggctaccgagcgggcacactaacacggacactacacggtcaccacccgcacacgtgaacgactaccgacaccggtacacgggtaccggggtcgacgaccgcacaacgggttcggggcgacaccgaaaggacgaggacggggcagcgagggagagggaaccttaccaccacgcgacgaggcgtgggaacgacaacgacgaacgggcgcggcggagacagacgggcacaacggagacgaacggcgaggggacggcttcggcggcgatccttggacgaaggcgagacgcggccggcacggggcttgacgacgcggagccgaggacgaagacgaggacggggctgcagcggcgcgcttgacgaacgcggacgacggacgagaacggctcgacggagggacgaacgccacgacgaccgggaacgacgagaggacgacgacgacgacgacgaccgggaccggcgaggaggcgacgaggacagccggcagtcagctgcacggagatggggacgacgtggaacacgccgctacgatgccgacgacggaggcggcgccgcgagacgacgagccgggcgaccgatgggacgtcgatcggcgaggacgaacggtgacaaggaaacgacgatggcagccagcagcggctgcgcggaggaggggacagcgtggaacacgccgctgcgatgttggtgaaggtggtggtgcagcggggtggcgagccgacgaggaggaaggagaggccggcgcggagacgacggcgttccggcgaaattcgggcgacgccgtggccggcgacgaacagcagccggccggagacggggaagtggtggcgacgccactggacgccggcgaggacgcgtctccggtgctttccccgcgaaacggagggctgaccgagggagagggggcagccgcgacgccgggagaggtggcggcgcagccggagggtgcacgggtgaggcgggaggtgcggctggaggtggccggctcggagaaaagaggagggcgacggcgggaaggcagctccgggggtcacctcgcgaaacggagggcaagccggggtggaggaggtggcggcgacgctggaggaggcgacggcgcggccggacgacgctccggcgaggcgggagaggcggctggaggcggccggcaacgtgggagagagagggcgacggtggggaggtggctagagaccacgggagagcttgggaggagaccaaaacggtagaacgcaaagagggggttctattttataggagaggagagggaaccggccacgggggaggtcggaacggcggcgagaaccacgaccggcggcaatggttggtggccggagaaaacgcgagccggcggcgtcacgcgcgcacgcgccatctgtgcgcggtcacgggcgggggcgcggctagggttgggccgggcgaccggcaagtgaggagaggaggggaagcggcttgggccgaggcaggccgggaggaaggaggggggggggaaaaaaacccgggagagagagggggggggggaatggagctgggccgagaggggaggaggcccaagaggagggagagaaggagagggagagaaagagagggaggaggctctgtcttctataacaaacttgcctaacaaaacttcttcactctggactgcttggctcgatctcctgttgcagatggaatcttctcttcacctgacttgtccctggttgaacctttagctgacttcgactgggttgcggcacttgaagatggggcttcagttccagaactttgcatagttcatatctttggagtcaaccttggtcactaagtactcttcactccgagagttgtggatgcttctggtggcgatgaggtcctttggtctgctacctttcagtgaaacaggtacggcgtttgctccagtgaccacaaggcgagtgacctgtcttcttcttgcataatggccggagtgatggcgcaggttacgcttcggctgtggacaatctctagagaaatgacctggttctttgcagttgtaacaaatcaacgtcttctttgctgagctgtccatctggggatgatcattgtgacgtggagttggaattggcggttggaaatccttgctaacattggcatcagtggtaccatagttgctatcaccattggagtctttctcagagtcaaaattgctaaggttgtcattctgggttccaacattgatactatcgttgacatcttggtgaatgctactgacattgcacgctttattcgagtggtcactaatggggccagaaccatggttgttggtggtatcatcagcattagtattgctattgtggttgtctgcgttgcgttcatctccttggggcaggaactcttgatacacaacagaagatccggtgatctgaagtggctcagtgcgctgtctttggttgccacctggaaatactgggttgttaaccatccttctcttgcagttcgtcatccgactatgctcactttcgagttgcatggctttgtccacaagtttctcaaaatcttcataatcctctaaaagtagttgcactgcgagctcatcttttaacccctggaggaacttctcttgtttgtcttcatccgtttccacatcttctggtgcatagtgagccgaacgatagaactcatgcaggtactctgtgacggtcaaatctccttgcttcaggtagcgaaactctcgttttcttagtgtgatcattccggcgggaacatgtgatctccggaatacagatgaaaactcgttccaggtgatggtatgtccttctggccgtgatgcttcgtagctatcccaccactctgaagccggtccaaccagctgatgagttgcgaagccaacccgctcctggtcggtgcactgaatcaaccctagcttcttctcgactgtgcgcaaccaatcactggcttccataggatcgacggccatggcaaaggttggaggccccgttttgagaaattctgataacttgcactgttgctggactgtaggtacttgaacgtcggttgcccctgctgggttgttccgattctgtaatagttgaaaggctgttgccaacatgttggtttggttaaccacaacttggattagctctggtgaggtttcgttgatgcttttctcattcccattggcttgggttcttgagtcatcggatccatcattcccatagcctttgttaccagtactatccatggccttggaacccgtcgtaaagatgtgacatagtttccaacccatcctagccttagacaagagtaccgacccaatcctacctacggccgggatacccgggacaggcaggcagaactgagcccctagcattgggcaccaaccctccgccgtatgacatctcgactaccgggccgcagctcgtgtagccttcatttgccccattagacatgtggaagtacggtagtgctttgcaacagaggcccgagcttaatccttatagtggccggggtgggtccacggtggaccgggcgcacgcggctggcggcggtcggccccgtgggtcccgcgcgtcagccgcacccacgggcgcgggcggctgacggccgggcccacttggcagccgcgagggcgcgcccgagggcggcctcgccggcgcggccgacgggagcggcgcgcacccgcgccccgatggtcgccgccggcgaccaacggcgcggcggagtggcacccgagagagaggagggaagggggaaacgaaggggacggtccacagctcaccccgggacaacgacgacgacgagaatggcggacggagcggaagaagacggcggcgcggctcgggatgacgatggcgacggcgctccgacggtctgcgggcgaagcggagcggcggacggggtcggcggcaacacggcgaagcggatggaggggtcgccgagtcgggaggaagtccggagcggcggcgg

SEQ ID NO: 54000 - DNA, 373 bp, Oryza sativa
  Clone ID: PAT_MRT4530_56146C.1
taaacgactatattttaaaaaagccgcttgctttgccgccatggctggcaagctgagcttagcatctaacacaaataacacgagatcactataaaccaaacggaaacaaacgaataaaacacagggtcttttttgtctgaaaatacacgaaacggttcgacttcttttatttttagactcctctcctcctcaatgatgggagtatggcaatggcaatggcaatgggatcttggcttaattgatgggaaggggctcgccccctccactccttgaggcatgcaagcatggggtcgacgaacttgccctggttgatgccgaggaacaccttgtcgaacttctcgacgggggacttgaacttttccacggtgaggaa

SEQ ID NO: 54001 - DNA, 2981 bp, Oryza sativa
  Clone ID: PAT_MRT4530_56147C.1
atgagtagagtgtccactagttggggttttgtttattctagggtgaacaaggccgaggggaggggcgcgcggaccgggtccacgggagtggggcccacgcggcagcctcacggtccacggtggaccgggtgcacgcggcgtacgccggccggcgccgtggttcccacgcgtcagccgcacccgagggcgcgggcggctgacggccgggccccacatggcagccgcgggacgcgcccgaaggcggccacgccggcacaaccgacaggaggcggcgcacccgcgccccgatggtcgccgccggcgaccaccggcgcggcggagcggcgcccgagagaggggagggaagggggaagcgaaacagcggtccacggctcaccccgggtcgacggcgacgacgggaacagcgatcggagcggaggaaggcggcggcgtggctcgggtcgacggggacggcggcgttccggcggtcggcgggcgaaacggaggggtggacggggtcggcgaggttgcggcgaacccgaagaaggcgacgccgaagcgggagaaggtccggggcgacgacggcggcggaccggaactcggcggtgacggcgaacagagagagcgacggcgcgagcttgtcaaatataatgaaatcggtagccgatggttcaatagctccctccctctctctcctctcccccgcggcccaatcggcctcctccccgcgcgcgtgccgctgacgggcaggcccgcccgccaccctcgctgacgggtggggcccacccgtcatccccgtcctcccgccgctcccgccgctccgcctgcgccaagcgccgccgccgccgccaaatccgccgcatcccgccgtccccgcgtgcaataaagtgggggaaatcactccccccgctctctcccccttccaaccctatttaaaccctccccgcacctcctccgtccatttccgcctctcgccgcccttcctcctcgccggattcgagctcgcgacgtcgctctctctctccgccgtcgccgccgagctccggtccgccgccgtcatcgccccggactgcctcccacctcggcgccgcctccttcgggttcgccgcatcctcgccgacctcgtccacctctccgtttcggtcgccgaccgccggaacgccgtcgaccccgtcgacccgagccgcgccgccgcctccctccgctccggccgcctcctccgtcgccgccgtcgccccggggtgagccgtggaccgtcgcctcctttcccccttccctcccctctctcggccgccgctccgccgcgccggtggtcgccggcggcaaccatcggggcgtggacgcgccgcctccctccgaccgcgccggcgtggccgccctcgggcgcgccgagcggctgccgcgtggaggctggccgtcagccgcccgcgccctcggacgctgcagcttcggaagatccgctcttcgtggaggttgaagccgacgtttgggaaagcgagcaaggaaagtcacatcatcttgatcatattgaatcccaggcaaatgaaggctacacgagctgcggcccggtagtcgagatgtcaaatggccagagggttggtgccctgctgctaggggctcagtctcgcctgcctgtcccgggggttccggccgtaggcgggattgggtcggtactcttgtctatggctaggatgggttggaaactatgtcacgtcttccgtctgtataccgtggtgatggataatcctggtaaccaaggctatgggaatgatggatccgatgactcaagaacccaagccaatgggaatgagagaagcatcaacgcaacctcaccagagctaatccaagttgtggttaaccaaaccaacatgttggcaacagcctttcaactattacagaattggaacaacccagcaggggcaaccaacgttcaagtgcctacagtccagcaacagtgcaagttatcagaatttctcaaaactgagcctccaacctttgccattgccgtcgatcctatggaagccagtgagtggttgcgcaccatcgagaagaagctagggttgattcagtgcaccgaccaggagcgggttggcttcgcaactcatcagctggttggaccggcttcagagtggtgggatagctacgaagcatcacggccagaaggacataccatcacctggaacgagttttcatctgtattcaggagatcacatgttcccgcaggaatgatcacactaagaaaacgagagtttcgctacctgaagcaaggggatttgaccgtcacagagtacctgcacgagttctatcgtttggctcgccatgcaccagaagatgtggaaacggatgaagaaaaacaagagaagtttctccaggggttaaaagatgagcttgcagtgcaactactcctagaggattatgaaaattttgagaaacttgtggacaaagccatgcaacttgaaagtgagcataatcggatgacgaactgcaagagaaggattgtcaacatcccagtatttccaggtggtaaccaaagacagcgcactgagccacttcagatcatcggatcttctgttgggtatcacgagttcctgccccaagaagatgaacgcaatgtagacaacaacaacatcattcaccaagatatcgacgatagtatcaatgaaggcacccagaatggcaaccctagcaattttgactctgagaaagactccaagggtgatagcaataatggtaccactgatgccaatgttagcaaggatttccaaccaccaattccaactcctagtcaggacgatcgttcccaggcggacaactcagcaaagaagacgttgatttgttacaactgcaaagaaccaggtcatttctcgagagattgtccacagccgaagcgtaacctgcgtcatcactccggccattatgcaagaagaagacaagtcactcgccttgtggtcactggagcaaacgtcatacctgtgaggcctcgtgttaatcataacccatag

SEQ ID NO: 54002 - DNA, 324 bp, Oryza sativa
  Clone ID: PAT_MRT4530_56148C.1
atgggcctaggcggaagagacaaggtcgacggccatgcggtggtgtgggccgcgaaggacagccaacgatggatggccaatgatataaaggacgacgaggaatatcgtggcaatgaccagaagctgatgcatagccaggacggtgcagtggcgatgaagatggtttggtggagatcggtcgatggcaatggagatgaggccttcctcccggagaagaccaatgctcgcaccattccgtgcgctctagcgctcgacgaggtgctcgatggctcatgttgccccctccatgccaactccaccaccaacctgccacctagcccctaa

SEQ ID NO: 54003 - DNA, 522 bp, Oryza sativa
  Clone ID: PAT_MRT4530_56149C.1
atggcggccgagtcagcggcaattggcgggcgcgaagaggacccccgccgcgacggcgaggtgggcggcggcgggggtggggatgagaatggcaggggaagggaggggagcgagtcgagggcggcgggggagaccgcgtcggcggcaaaggaggcgacgcgggaaacgaaagagggttatgatgaggaggcttacagttgtggaggcgggcggcggcggacaagctctcgcactaggaggggcaaggtgggagaggagggcggcggtggcccccacacccgcaaccacccagcacgcgcagccgatgcgaacgacgacgacgagctcttgcgcctcctctccctggccgagaccgacctcgacgccagccacctccgcgccgtgcacaagcacgcccaccgtgccgcccgcctcgacccggactccccgcgcggctcgctcctcctcaccgccgtctccgtcctcgtcgctgaccactcctcccaccgtgccaccctcctcctccccgactccgactcctag

SEQ ID NO: 54004 - DNA, 285 bp, Oryza sativa
  Clone ID: PAT_MRT4530_5614C.1
atggaggaaacgctcaccgggggctgccttgtcgagctcgagctctataacctccttgtgccggagcagcagcagcagcggattgtcgccaagattctcaaagaaaccaacccaccgtcatcgtcggtggcggtgacggtggacacagcagcggcagcgccgctcctggagcccaagcctgacaccggcaacctcagcgatctggattctgcggttggaacctgcgcatgcttcgccgtcatggtgatcatcatcctactggtcttttacgcgttattaaagtag

SEQ ID NO: 54005 - DNA, 550 bp, Oryza sativa
  Clone ID: PAT_MRT4530_56150C.1
gctggctcccccgccggcaccggcccggccggcccggccgggccgacccacgcgttttattttggctatttatcacgttggactatcttcgcttgctagtcaggacattatcatcgtcatcatcaattttccctttcaaatggtccaaaagaaatctcgtgtcaatggtcttcatacgcaaatgttgacagatgatcggcgaccactcgtgagaaacatagcacttggcagcaatttcatataagtatcgaacccacaagtgcaaagaaagacattgatccaaacaggtagctaagttctttggtggtcttggtcctggacttttgccttcagatcttaattcatcttttaattagagataaataagccaatactagcctataagaatggttagctgagaaatcattggtttattttagttgacggatcaagatacatagctttcccttcaacaataacatgggaccgaaaattgatcgaaaaaccatggtagatttggtttaaattgattcaccttttgctgctgtgcctggatattttgctctttttt

SEQ ID NO: 54006 - DNA, 338 bp, Oryza sativa
  unsure (1)..(338): unsure at all n locations
  Clone ID: PAT_MRT4530_56151C.1
nnnnnnnnnnttttnntntttttttttttttgggggnntgtttttttttttttttttcttttttttcttttttttttttttttttttttaaaaaaaaaaaacccgggtaatttaaccctcataaattattaaacaaatttttttaaaacatttgactagtcattgcccaaaaaaacatattgtaacttccaacaaaaggcctttgattcccccccatttatggatgaaacaacatatttaatccttgaaatgggtaaaatccattaaaacaatccccaatattaactaattgccgagccatcaacaaccaactaaattcctttatcatttttttgcct

SEQ ID NO: 54007 - DNA, 287 bp, Oryza sativa
  Clone ID: PAT_MRT4530_56152C.1
tgctgggggctggcttacaatcgaagtcgcgcctacgggaaaggagcgccgctgcactctaggatgaggggccggagacgtcgccggatgtgggttgtgcaggttatctatgctagcacacttgaggactgatgtactagaagataattcttcatggacagatctatgtattgatcacattaagatttgtgcatccaataacggacttgtctgctaggataacaacgaaggatgagaattatcgctttcattggacactcgtggtgctgatgatatcctggagagaa

SEQ ID NO: 54008 - DNA, 2389 bp, Oryza sativa
  Clone ID: PAT_MRT4530_56153C.1
ggtctggatgaagcaggtcagggagatcgcctacgacgccgaggactgcatcgacgtgttcgtccgcggccgcagccaccaaaggccacacatgaagaagcacatccaagactcaccaggcatgcctctctccatatcgatccacagttgcatgctctcttcgcggaggaggctcagctggttggcatcgatgagcctaggaatgagctcgtcagctggctgatggaagaggaccttcggcttcgtgtgcttgctattgtcgggtttggtggccttgggaagacgacgctggcaaggatggtgtgtggaagccctgtggtgaagagtgctgattttcagtgctgtccattgttcatcatttcacagacgttcaacatcagggcactttttcagcacatggtaagggagctaatccaggagccacacaaggcgatggcaatagcaggatgcaagcatggccttattacagatgattacctggagggaatggaaaggtgggaggttgcagcactgactaagaatctcaggaggtatttccaagacaaaagtatccagcgactatcagaaacgacatcacgagaactgttcttcaagaagatatttggttttgcagatgataaatcaccaactgatgagtttgaggaagtgtcaaattccgttttgaagaaatgtggaggcttgccattagcaatagtgaacatcggcagccttctcgcaagcaagacaaataggaccaaggaggagtggcagaaggtttgtaacaacttaggatctgaacttgaaaacaaccctaccctggaaggagtgaagcaagtcttaaccttgagctacaatgatctaccctatcatctgaaggcctgcttcttgtatctaagtattttccctgaaaattatgtgatcaagaggggacccttggtgagaaggtggatagctgaaggtttcgtcagccaaaggcatggacaaagcatggaacagcttgcagaaagttactttgatgagtttgtggctagaagcattgtgcagcctgtgaggactgattggactggcaaggtgaggagctgcagagttcatgatttgatgttagatgtcattgtctccaggtcaattgaggagaactttgcatcattcttatgtgacaatgggagtacattggcttcccatgacaaaatccgtcgcctctccatccacagcagttacaattcgtctcaaaaaacaagtgccaatgtatctcatgctcgctccttcacgatgtctgcttctgttgaggaagtcccattcttctttccgcagctacggttattaagagtacttgacttgcaaggctgcagctgcttgagtaacgaaactttgcattgtatgtgcaggtttttccagctgaagtacctaagcctcagaaataccaacgtgtccaaattacctcatcttctagggaatctgaaacacctagagacgctggacattagggcaactcttatcaagaagctaccagctagtgcaggcaacctgagttgtctcaagcatttgtttgcggggcacaaggtacagcttacaaggacagccagtgtgaagttcttgagacaatcttcaggtttggaggtggcgactggggtggtcaagaacatggtggctctgcaatcacttgtccatatagtagtcaaggataaatcgccagtactgcgggaaattggcctgctgcaaaatctgacaaagctcaatgttctcttgcgcggtgtggaagagaactggaacgcattccttgagtctctgagcaagttgcctggccctcttcgctctctctccatccacactctggatgagaaggagcacagcttatcactggataatctagcctttgttgagtcgcctcctctattcataaccaagtttagcctggccggtgagttggaaaggctacctccatggataccatcgcttcgaaacgtatccaggtttgctcttcgtcgcaccgaactccatgctgatgccataggagttcttggggacctgccaaatctgctctgcctcaagctctatcacaaatcatatgctgacaactgcatagttttttgtcacggtaaattcgtgaagctcaagctgttgatcattgataatctggagaggatagagaagatgcagttcgatgcgggttcagtgactaatctggagaggctgacattgtcattcctgcgagaacccaagtatgggatttcaggtctggagaatctaccaaagctgaaggagatcgagttctttggcgacatcatattatctgtggtgaccaaagtggcatcatgcgtgaaggcgcatcctaaccacccaagagtcataggtgacaaatggaatattgtaacggagtatgcgtaaggagcaatatctgaagtctgaaaaa

SEQ ID NO: 54009 - DNA, 246 bp, Oryza sativa
  Clone ID: PAT_MRT4530_56154C.1
atgccgtgcggtctcgcgtattggttgtgcgagaccgtacgctttcgtggaattcccttgcaaaaccttggcgcgtcgttactccacgtcattctcgtgcggtggttatgtgatagcgaggaaattaaggagtgcaaaactttccatgttaaaattagaagtttgaaaaaattgaaacgatatgacggaaatgttgaaaatttgtgtgtagaaaagtttgatgtgacggaaaagttggaagtttga

SEQ ID NO: 54010 - DNA, 251 bp, Oryza sativa
  unsure (1)..(251): unsure at all n locations
  Clone ID: PAT_MRT4530_56155C.1
taagagttatgacgatgcctgcacacgcacgcgtgctagaacccgtatacctttggattgcccgcccttttttttttttttttatactaacaaaaaaattattttccaaacaatctttttacatggctgattatcaactgaagataaaagtcctcgagggcaaaaagaaaataataacttatacagcaccttacagcgccttaccaagctgcaacagagcgatcttatttacctaancctggcaaatatta

SEQ ID NO: 54011 - DNA, 156 bp, Oryza sativa
  Clone ID: PAT_MRT4530_56156C.1
ttcatgctagctttgtccatgaagagcaggaaacatcgatctggtacccgagagcgtgagcaatcacacgttgtgcgccccgtgtcgtcactcgtcacgtcaaaaagctacctgccgctcgcattggccacgatcaccggcttaacgatccaagga

SEQ ID NO: 54012 - DNA, 2945 bp, Oryza sativa
  Clone ID: PAT_MRT4530_56157C.1
gctgcaggttttttttttttaagttttaacaaactgcatccaactgaaatttcgctattgccaatctcctgaaatgtacaatctggaaaacccgtaaaacctacattcttattgtctgctacaacaatggaactacaagctatatatggtacaatgtttcagtatggcgggaagcaccaccccttttgttggatgttttttccccaaaagaacagaatggatatagcaaaagtcagactaatctagcgacttaactactccaggagaatcccgaactatacaagggagcaggaataaacattagcatcacgaatgcctgacacctgcaattccatgtagccaaccaaattaggctactacattctgcttatatgtttggttgtacaagctagtacttgtcatatcttcaactcgcatggtcatctaaccatatgaccaagtaatgaccatcaaagtagcttgatctagatgcctgcgataccatcttgaaattaacaacctcatatgtagataggtttcacgtcattagccccaaaactcaagctacatgaaggacatctcctctgtcggttcccaagggacttctgtatgcactgattgcagaagagatggtagcacttggtaatcacaacctccttctgcctatcatggcagataccacacttcaatatccccctatactccttgacctcatgacgaagcttttccaggactgctgattcacgtgccttggctctaagagagctagctttccttgacataacctccaaatcatcctctattctcttcttactaaacctctctttctcaagttctataagcagatcagcgacttccaaacgactgcttccaacattcgcttgtattccatccaatgattgcataagcttttgagcatctctgtgcacatcaaccagctttctttggtaattactcaatgaaacagattgttgccatccatcctcttgaagtttcccaacccgatcagaccacattttaagctgatcttctaaggaaacaattttctggttgtacagatccatcaaagagctttcctgctgcaagtttctgcgcaaagaatatgtttccaaatgcaaagcatcttgtgtctgttttgctttaacaccctccataaaaatcaacttaacgcaagtaaacagcttttcaatgaagtactgagtctccggaacaatcaaattaacaatataaccaaatctaacatccttggtattatcatcatctctttcaataatctgctgtagcaattgttggttttgtgcctgtatgtcctcatatgcttgcccgatacactcgacctccactctgtaagcttcacattcttcctgtttagacttcagcatatgggataaactgatacactcgacctccactctgtaagcttcacattcttcctgtttagacttcagcatatgggataaactgactagatcctttctagaagtcccaagcttctgccctgattcagcaatctcagcttctgcagttgctagcctctgctgtgtgattgcttcagcttcattggcagccttaacacgctgctctagcttactttcatcaagagatgatttcagggcatgaacatgagcccattcaaggaattccctatctctggattccattatttccctggaatcagtggattcgcgcttatacatatccgcgaacaacttaagctccttattagtttgcttcagatcagaaatcactgattgaagttgtgttatatcagatcccgcacgggcagatctgcatgatgcttcttcattatcacgttcctttctggacagaatgcgagaaagtgaatggacttctgctcgcaaagaattcaactccaaggaagcctccttgtgtttggtcatttcactctgcatcgcgcccatttcccttggtatcgatgacactaaagctgctttagcaagacaagtttgaaagttactcttggtaaagtgaatagtaactaccgcaccaggttctcttgaagcctcttcaagtttgagaataagcatgtttttttcatcacatagtttctgaatatccttcttgagatcagcaatgctagactcacaatatgtagaaaccctctcaggaatctcagccagatcaactttcaaattaaattgcctttcttgccacacaaacttatccttatcaacctgtaatttctctaataatgtctggtagtgatccaattctgcttgtgacttctgaagtcgatcattaacaagctgaaaagcttttgaagaacgaatgctcttgaaatccatcaagatattctgaaaagttgctattttgttcaaaatttcaattctctcttcatgtaatctcttaatttccaccaaccgctttgaaatcaattccttatcttcaggcatatttgtgtttcctaatgtaggatatgggattcgagctccttgtgtattatctctttgagctttaagtgctgccagtttgtagttagtttcttccaactcagaagcagcactggccaactcctcttttagacgtctatgttcagctctttttcgggcactggaatctctttgattttgataatcctctgctaactgcttgtgcttcaactgaagattacttaatgcttgtacgacattattgaggctggacaacaggttgctactagtactctgtagttgcttactgcggtcattttctggtaatttagtgagagcagccaaagcacactcctcatttgcttgcaaaagatcacttgatggaaaaaagatatccccaagagcattagctgtggatagatgtaatggaggggcatcacttcccaagtggcaaccaggcaaacaacctgaactttcagttgcaccagattccacaagacttctaagagtgtccctctctatgggtgcacaagtaccatctgaaaagagaaggtttatagttaacctgataggcaa

SEQ ID NO: 54013 - DNA, 4480 bp, Oryza sativa
  Clone ID: PAT_MRT4530_56158C.1
ctagacctgggacaagggaggaggagcccggtggtggccgatccgtgcccccagtggcccggcggtgaagctgttctccttgtcgtcgccttcccgggtagttgccaccaccttcatgatccccctcctccgtcgctgagccatcacctgcgctagccgccaccggagctgcccccgcttgcacgagtgtagacccctattaagcgccgccatcttcttcaccctcctggtagtaagcatgtgggtcatccgagacttcatcaccggcttggcggacggccttgatgacgtcagcaatgatgtcaccgacggcggcggcggctcggcggagcggacggctcgggcggcgcacgctcgccggcgaacggcggcgcgaggacgaaaacggaaagcaccaggacgaagcgggcggcacggcgaactcaccggcgaccaaaacgacggcggaagatcaacggacggcgacggcgacgaggaagaagcggcgaagctcttcgggtcgacgacggcgatgacgctccggcggtcttcggcggcggcgaaggggcgaacgaggacggcgacgcgacggcgaacacgacggcggccttcccgagcgacggcgacggctggaacgacggcggcgcacggtctctccccgtcggaatcaagcccgtgccgtcttcctctctctccgccgtcgccgacgagctccggttcgccgccgccgtcgctccggacttcctcccctctcggcgtcgcctcctttggcttcgccgcgtcctcgtcgaccccgtccgcccctccgattcgcccgccgaccgccggaacatcgctgtcctcgtcgacccgagccgcgccgccgccttcctccgctccggtcatcgtttccgccgtcctcgtcgtcccggggtgagccgtggaccgcctctttcgcttccctcttccctcccctctctcggccgccgctccgccgcgccgttggtcgccggcggcgaccatcggggcgcgggtgcgccgcctcccgtcggccgtgccggcgaggccgccttcgggcgcgccccgcggctgccaggtggggcccggccgtcagccgcccgcgcccgcgggtgcggctgacgcgtgggacccacggcgccggccgccgccagccgcgtgcacccggtccaccgtggacccaccccggccactataaggattaagctcgggcctctgttgcaaagcactaccgtacttccacatgtctagtggggcaaatgaaggctacacgagctgcggcccggtagtcgagatgtcgtggcagagggttggtgccctgctgcttggggctcagtcctgcctgcctgtcccggaggttccggccgtaggcgggattgggtcggtactcttgtctatggctaggatgggttggaaactatgtcacgtcgtccgtctgtataccgtggtgaataagcctaacatacatcataacagcaaaagacttagatctgttaaggtcctatccttagttcctaatctgtctctcccctttgttttccctctctccctctccaaacctttgcaacagatggctgacaatgagaaaggcaataaggtcagaagtcaggacattggtacctcaagctcccgagtgaatgaagcaccagacaccagttgtgtgacactggtccaacacctgattaaccagaaccgattgcttatagagatactacagcagcatcagacgccaattctgaacctgagtcagatacaacctcaagtgcagttggaggcagtccaagcactcacaccacaagtcagcatgccgccagcatcccgaaggacccatggtgacgtgccacatgttgactcaaaagaagcaagtatcatttgttttatgtgtgatgagcaagggcactatgcaagggagtgtcctcagcagaaaagaaaaacaccaatgcgaaccgaagatgaagtccgtaagatgatcattaccagcacagaatggcctccaccaggaatgacaaaacgtcagagaagaaataccttccgaggtgcaccacagttgacagagcatcttttagctaatggaggtagagtgtctgatagtgaagattcagatcaagtctcctcggatgatgaagatgagaagtctccccaaggtttcaaccagaataaaatggaacgtaaggcatgctctcgttgtggagaaatcggaactgatcatgtaccaaaagattgtcaattcagttttctgctgacgaagaagatggccaaccaacccgccagttccaacggagagaagcatcaaggcaacacaaatcctcgccaagattacagtttcagcctaactccagtgccaggacagaggaatcaaaatgagaaaagaaaatgccgagtccgggaagatatctgttgcttcaattgtcaaggaatgggtcatttcgccgacaagtgcccaaaaccgagaaacatagctgccagcacgtcagtccacgcaactccctgcaatcagaagcttgctcctcagcgaattgtcatccatgcatcccgaagcagtcctatagcccgcgttgcaatagctcaaactccagcgagtgcattaccacaaggtgtcaatgctcaatttcagccccagccaccagttgacaagatagaggccaatatcggcattgtacctttggatgttccagcacagcagccaagaaatcaaaattggaaccacccagcaggggcaaccaacgttcaagtacctacagtccagcaacagtgcaagttatcagaatttctcaaaactgagcctccaacctttgccattgccgtcgatcctatggaagccagtgattggttgcgcatagtcgagaagaagctggggttgattcagtgcacagaccaggagcgggttgtcttcgcaactcatcagttggttgcactggcttcagaatggtgggatagctacgaagcatcacggccagaaggacataccatcacctgggacgagttttcatctgtattcaagagatcacatgttcccgcaggaatgatcacactgagaaaacgagagttccgctacctgaagcaagaagatttgaccgtcacagagtacctgcacgagttccatcgtttggctcactatgcaccagaagatgtggaaaatgatgaagaccaacaagagaagtttctccaggggttaaaagatgagatcgcagtgcaactactcctagaggaatatgaagattttgagaaacttgtggacaaagccatacaactcgaaagtgagcataatcggatgaagaactgtaagagaaggattgtcagcatcccagtatttccatgtggtaaccaaagacagcgcactgagccacttcagatcaccggatcttctattgcgcatcaagagtttccgccccaagaagatggacccaatgcagacaacaacattagcaatactaatgatgatgatgataccaccaacaaccatgcttcttgccccattagtgaccactcgaatcgagcgtgcaatgtcaacatcattcaccaagatgtcgacgatagtatcaatgatggcacccaaaatgacaaccctagcagttgtgactctgagaaagactccgatggtgatagcaactatggtaccactgatgccaatgttagcaaggatttccagccaccaattccaactccaagtcagaatgatcgtccccagacggatagctcagcaaagaagacgttgatttgctacaattgcaaagaactagggcattactcgagggactgcctgcaaccaaggcaaagtcgacctccacattaccgccaatttacacgaagcagacatcccaatcgtattgtggtcactggagcaaacgccgtacccgtgaggcctcgtgcaacaaccgtcagtctagcttttgatgaaccacttgaaggttctctgaaaggcagcaggctcaagtaccacattgtcaccagaagcatccacaactcttggagtgaagagtacttggttgacaaagttcaaaaggtgattgatagaagataccagcaaagcgaccatcggggcgcgggcgcgccgcctcccatcggctgtgccggcgtggccgccttcgggcgcgccctgcggctgccatgtggggcccggccgtcagccgcccgcgccctcggacgctgcagcttcggaagatccgctcttcgtggaagttgaagccgacgtttgggaaagcgagcaaggcaagtcacatcatctttgagcatattgaatcccagtgtcacgaccggaaataacccaacgggcgttccttacgtgcgtgcattaatccttgtcccaggaggcaaggcccagcacacgcaaagacaaacgagaaacagcggaagactagggcgacgaccacaggcacttgatggcatgcacgagctagacaccaaagccttcatcctccaggaactcctcttctaggtttgggaaaaattgagcaagactgagtaccaccaccgtactcaacaagacacacccacaagtgcagaa

SEQ ID NO: 54014 - DNA, 612 bp, Oryza sativa
  Clone ID: PAT_MRT4530_56159C.1
tcagcatcttctctcgctttcccctcctctccctttctcatctctctctctctcactttctcctcttagggagcacggccggccggcaggggaggagcgcgacgggcgcgcgacggccagcgagggaggagcgcggctgagaggagggttggcgcgatgggtggcggtcggcgacgcggagcacgacgacgacttggggccgccgctcgcttgctcctgggggctggaagagtagcacgcagccacgcactcagagtggaagcggtgggtgtccggcgacgtcccgaggcgggcgaggacggcggtggcttgcctcccgctcctctccccgccgatctccctcgccggcccgcgggtgcgcgcggagaggaagaagggcagcggccggccggcagaatagccggtgaacccatccttccctccatttggcgccacgccatgcggggcggcgtgggggcggtcaagcgggcatggcgcggtgctgcgagcacgccgcggacggcgaatgcggtgcagcgggctagcacggcgcggtgcggcgacgccggtggccgggtgggtgcgggatacggctgagcggcggctcggcgcgggatgcggccgagcggccat

SEQ ID NO: 54015 - DNA, 142 bp, Oryza sativa
  Clone ID: PAT_MRT4530_5615C.1
ggcgcacatagggatggcaacagggctgcacccgccgggtttcattaccccgtccccgcccccgagttgatggaaatcccccgttcccagtccccatcccgtgctcggggaaggtttcctcccgtccccgtctccgcatcgg

SEQ ID NO: 54016 - DNA, 157 bp, Oryza sativa
  Clone ID: PAT_MRT4530_56160C.1
cccacgcgtccgatcgtagcatccgactttttgtatatgaatattgtgtaatgcaccaccatatcgtgtacttctataacgttagctagacgaggattcatgtgcctgctgttgtggagaatccttgaatacgctcggattcttgcgacgtttcagc

SEQ ID NO: 54017 - DNA, 2813 bp, Oryza sativa
  Clone ID: PAT_MRT4530_56161C.1
ttagccccctcccgcggtctcccgtggtctctagccacctccccaccgtcgccctctctctcccacgttgccggccgcctccagccgcctgtgccgcctcgaccgtgcgccggccggccgcgccgtcgcctcctccagcgtcgccgccacctcctccacgccggcctgccctccgtttcgcgaggtgacccccggagctgcgtttccgccgtcgcccatccatttcctccgcgccggccgcctccagtcgcctccatctccctgcctgcacgccggtcgacgtcgccaccacctccctcggctccacgacgccgctctcatccccggcatcacctcctcctcgcccgaacatcgccggaacaccgtcgcccgcgccggcctcacctttctcctcgtcgacatctcctccggctgcccctttcgccatgcccgtgcatcagccgacgctgccgtcccctccctcggcatggtgacgtagccctccacctcgtccactcctcggtttcgccggaacgccatcgccgcgagcccctccatccgcctcgccggagttgttcggccgcccgtccctccacgccgtgcaccggtcggccacacccccatcatcttcggcatcgcagctgagacgtagtcctcggcctcgcctcccctccgaccgaacaccgcgggtgcccgtcgtcgccttcaccgttccctctcgcccggctcgtcgtcttgcggcgccgcctccgtcatcgtcatcgctgcggcgtgttccacgccgtcctcgcctccgtgcagccgttgccggctgccctcgtcgtctcctcgccggctgccctcgtcgccttctcgccggccccggtcgtcgtcgtcctcgtcctctcgtcgttcccgatcgtcgtggcgttcgtccctccgtcaagccgttctcgttcgtcatcctcgcttcgtcaaagtcgctgcagcccccgtcctcgtcttcgtcctcgcctccgcgtcatcaagccccgtgccggccgcgtctcgcccgtgtgccggtgtcggtagtcgttcgcttgtgcgtgtggtgtccgtgttagtgtgcccgctcggtagccgcgtggtttctacgtgtgcatcccgtgtggtgtctagtggggtccgtttgttggccactcgcctcggttgacacacgggatccgcttccgtcgacccgtggaccgtctctgtgtacccggttttctttttatgtattgttattgcttctttataggcttgcagctttgcttgtgtgcttcgcgtagctttcgtcgttccggaggttcccgaagcgtggttcgtggtcgtcgccataggttcggaaggccgttctctctctcttcccctttcaaaacccctaaaacctgttttcggtggggtttgggtgcatgccagttgtgggaagtagcaccccggccactataaggattaagctcgggcctctgttgcaaagcactaccgtacttccacatgtctagtgggtaaggcttagtttgtggctcagtctagttataaacaaaagtacacggattggagatggatgaagtcgggggtcgatggacattctccagggcaaatgaaggctacacgagctgcggcccggtagtcgagatgtcatggcagagggttggtgccctgctgctaggggctcagtcttgcctgcctgtcccgggtgttccggccgtaggcaggattgggtcggtactcttgtctatggctaggatgggttggaaactatgtcacgtcttccgtctgtataccgtggtggtatgtggcacgtggttacacgtgaggaagatgtgtcttgtggcatttgtgggtgtgtcttgttgagtacggtggttgtactcagtcttgcttaattttcccaagcccagatgaggagctccttgaagatgaaggctttggtgtctagctcgtgcctgccgtcaagcgcctgtggtcgtcgccctagtcttccgctgtttttcgttgtctttgtgtgctgggccttcgctgcccatatggccggcagcgttacccgtcgtggtttggacatgactggcttcgtcttggagctgcgaggcatgtgcgtggtcttggggtatccacatggagtggattaccaggccaggccgctcccggagcaggagggtgaggatgcagagcctcacgctggttgggaggtcactgcagtgatcctctctggctctcccgagcggacttcgctggcagtcaccgcgggtggagattccttccccgccgcttgccagaacgccgctctcctcgccatcggcaccctccaccagcgctacccggacgagttgcagcactcgccctaccgctaccacccccgtcgcggaggagccagcgaccacgccaccttccgagacgccagctcggaggatgacgctaccgtcgtgcatctggcacgcatggtggaggcgtacgacgcggctcgtatcgacttccaccagatggtgcgtcgtggcatggtggagaacaacctgaagatcctggagctgcgtcaggagaacctgcagctcaagaaggacctcgacgcagtggaggcgcagctgcaccagctcaagatcgcccagggagagatctgccgccccaagcgtcgccgcgtctgccgcagccagaagatcaccgcccgtaagagcacctccaggcctgagcttgttcgtcagtccctggcgtggacttgcttcgtcgagacccctcgtgccgagcctgcgcccgtggttccccaggagggggaagcctccggcgttggtagctcggagggtgcgctgttgctcaccttccgtcctggcccgtcgcagcgttag

SEQ ID NO: 54018 - DNA, 1189 bp, Oryza sativa
  Clone ID: PAT_MRT4530_56162C.1
atggtgacatgttgtggggctatgtcttgtgggtacagtgctcctggtttggaatggtatattcctggtgtggagatagaactgtgcagccaggatggttgttcagaatggttgggcctatgcaacaggatcccccccgaggcccctgagtacgggcgccctaggccagctgcctctgacaacaaggaccggccccaccgaaaagtgcagcgacccgtctactttgtcagcgaggtactccgagacgcgaaaacccgatacccacaggcccagaagatgctttacgcagtcttaatggcctcgaggaaattgcgccactacttccaagcgcatcgggtttttgtcatgacgtcttaccctctcggccaaatcttgcacaatcaagagggtaccggtcgggtcgtaaagtgggccatcgagctcgctgagttcgacctacacttcgaaccacgacacgcgatcaaaagccaggttctggctgacttcatcgcggagtggaccccggtggacgaccatgttccgtccaatgttcccttcctccccggagacggaggaaacccaaacgccgacattcgcgccgggcactgggttatgcacttcgatggctccctcaaccttcaaggtgcaggggccggagtcacgctgacttcgccaagtggggatgtcctaagaaccctagcgggattgagggtggcggtcggaatgggcatccgccaccttctagtcctaggtgattcccagctggtcgtaaatcaagtctccaaggagtaccagtgcactgatgtcacgaccggaattaacccaacgggcgttccttacgtgcgtgcattattccttgtcccaggaggcaagactgagccacaaactaagccttacccactagacatgtggaagtacggtagtgctttgcaacagaggcccgaagaccggtccttatatggccgaggtgctactatcaaaaccatgcaccccgagcccagcctaaaaccatttttggggattttgaatagagggggagatgatgtgacttgccttgctcgctttcccaaacgtcggcttcaacttccacgaagagcggatcttccgaagctgcagcgtctacacgaccaacggaaaagaaaaggcttttactctaataaactccatataacaagctggaacaaagcacaaaaatgggttcttgacttct

SEQ ID NO: 54019 - DNA, 185 bp, Oryza sativa
  Clone ID: PAT_MRT4530_56163C.1
cggccggattcccggtcgccacgcgtcgtgcctctggatgacttgaccgccttctgctcaggcgcgctagcccaatgtgaggcgtacgaggactttgtttgccgatgcaccttatctgtactttctgagcgccgactgtgaaacactcgaggaccgcctcttgttaggttgaggacacagcattc

SEQ ID NO: 54020 - DNA, 9603 bp, Oryza sativa
  Clone ID: PAT_MRT4530_56164C.1
gactccgcctaagacatcttctccaaagcttctcttactgaaggggggaaagattgagcaagaatgagtacaaccacagtactcagcaagtcacaccggcagatgccacaagacacatctccctcacgtgttgccacgtgccacataccaccacggtatacggacgaaagacgtgacatagtttccaacccatcctagccttagacaagagtaccgacccaatcctacctacggccgggatacccgggacaggcaggcagaactgagcccctagcattgggcaccaaccctccgccgtatgacatctcgactaccgggccgcagctcgtgtagccttcatttgccctggagaatgtccatcgacgcccgacttcatccatctccaatccgtgtacttttgtttatgactagactgagccacaaactaagccttacccattagacatgtggaagtacggtagtgctttgcaacagaggcccgagcttaatccttatagtggccggggtgctacttcccataactggcatgcacccaaaccccaccgaaaacaggttttaggggttttgaaagagaaagagagagagaacggccttccgaaccttcggcgacgaccacgaaccacgctttggaaacctccggaacgacgaaagctacgcgaagcacacaagcaaagctacaagcctataaagaagcaataacaatacataaaaagaaaaccgagtgcacagagacggtccacgggtcgacggaagcggatcccgtgtgtcaaccgaggcgagtggccgacaaacggactccactggacaccacacggactgcacacgtggaaaccacgcggctaccaagcgggcacacaaacacggacactacacggtcaccacccgcacacgtgaacgactaccgacaccggtacacgggcgagacgcggccggcacgaggcttgacgacgcggaggcgaggacgaagacgatgacgggggctgcagcgatcttgacgaagcgaggacgacgaacgagaacggcttgacggagggacgaacgccacgacgaccgggaacgacgagaggacgacgacgacgacgacgaccgggaccggcgaggaggcgacgaggacagccggcagcggctgcacggggacgaggacgacgtggaacacgccgctacgatgacgatgacggaggcggcgccgcgagacgacgagccgggcgaccgacgggacgtcgacgacgagaacgatcggagacgacgatgatggaccgcggagggatttggatggaggggaaacgatgccgaggacgaccttgccgctgcgatgccggagacgaggaggaaggagaggccggcgcggagacgacggcgttccggcgaaattcgggcgacgccgtggcctggccgggagagaggacggcactccggtgccgggagaggtggtggcgacgtcggccggtgcaccggggacgcggcagaggcggccggaggcggagaagtggtggcgacgccactggacaccggcgaggacgcgtctccggtgatttccccgcgaaacggaggcgaagccgggaaagaggaggcagctgcgaggccgagggagaagacggcgcggccgggcggcgctcgggcgaggagaggaaggcggctggaggtggccggcgcgaaggaaagaggagggcgacggcgggaacgtagttccgggggtctcctcgcgaaacggagggcaggccggcgtggaggaggtggcggcgacgctgtaggaggcgatggcgcggccggacgactctccggcgaggcgggagaggcggctggaggccggccggcaacgtgggagggagagggcgacggtggggaggtggctagagaccacgggagagcttgggaggagaccaaaacggtagaacgcaaagagggggttccgccatgcctctacattgataagttcggatattcctagcaccggagaccaggaaagctaatatgagacagttcatgttgtcaatcatggtatccttagtaagcgggatatcatagtctaaagcatatggtggtaagctggaaggaaacgccaagcatggtattctcatgatgacaagcatggtatccttctctccgccgtcgccgccgaactccggttcaccgccgtcgtcgccccggacctcctcccgcttccgcatcgcccccttcggcttcgccgcgtcctcgccgaccccgtccgctcctccgtttcgcccgccgaccgccggaacgccgccgtcctcgtcgacccgagccgcgccgccgccttcctccgctccggtcgtcgtttccgccgtcctcgtcgtcccggggtgagccgtggaccgctcctttcgcttcccccttccctcctctctctcgggtgccgctccgccgcgtcggtggtcgccggcggtgaccatcggggcgcgggcgcgccgcctcccgtcggccgtgccggcgaggccgccttcgggcgcgccccgcggctgccaggtggggcccggccgtcagccgcccgcgcccgcgggtgcggctgacgcgtgggacccacggcgccgaccgccgccagccgcgtgctcccggtccaccgtggacccaccccggccactataaggattaagctcgggcctctgttgcaaagcactaccgtacttccacatgtctagtggggcaaatgaaggctacacgagctgcggcccggagaaggtctcatttgcatcacatcagttgcatggccctgcctctgaatggtgggatcacttccgccttaacaggactactgctgaacctatcacttggcttgaattcaccgctgctttccgaaagacgcatataccatcgggagtagtgtctctcaagaagaaggagttcaggtcgcttacccagggatctcgctctgttacggagtatctgcacgagttcaatcgtcttgctcgttatgctccggaagatgtgcgcaatgatgaagagcgccaggagaagtttttgggaggacttaatgatgagctttcttacccacttatggttggagattaccctgatttccagaaattagtggataaggctattcgtcaggaggacaagtacaatcgcatggagcagaagaaacgtcggattgctcaattcaagacacaacagggaaataatcaaaagccgcgtcttaccttaggaccccagtccatgccacagggaggttcttcgtctgttgttcgtccgcaacgtcagttcttcaacaacaatgctggcaacaacatccgtaatcaagctccacgtcctgttgcagctccagcacagcaacaacctgccaagagggagcaaggcagcaagcccgtggtgtgtttcaactgtggagatccaggacattatgctgacaagtgtccgaagccccgacgcgtgaaggttgtccctgtccagaataactctgctgtaccagcatcaaaggcccgtgtcaatcatgttgctgctgcagaagctcaagatgctccagatgtggttttggtccgggagtatcctgatgtgttcccagatgatttaccggccaatgagttggcagaagttaagaggcaagtagatgatttgctacagaaaggatacatcagaccgagttcatcaccatggggagctccggttatttttgtggaaaagaaagaccatactcagagaatgtgtgtggactatcgtgcactaaacgatgtgactatcaagaataagtatccactacccaggattgatgatttgtttgatcagcttaaaggtgccactgttttctccaagatagatcttcgatcagggtattatcagttgagaatcaaagaggaagatatacctaagacagcttttaccactaggtatgggttgttcgaatgtactgttatgtcttttggacttaccaatgcccctgctttcttcatgaacttgatgaataaggtgtttatggaatacctagacaagttcggggtggtctttattgatgatattcttatctactctcgaaccaaagaagagcatgaggaacatcttcgtcttgcattggagaagctacgagaacatcaactgtatgctaagtttagcaagtgtgaattttggttgtccgaagtgaaattccttggtcacgtcatctcagccggaggagttgccgtcgatcctagtaacgtggaatccgtaaccaattggaagcaaccaaagacagtttcagagattcgcagtttcctaggcctcgcaggatattaccggaggtttatagagaatttttccaagattgctaagcccatgacacgactgcttcagaaagatgtgaagtacaagtggtcggaagaatgtgagcagagttttcaagagttgaaaagtcgcttgatatcagctcctattttgattttacctgatccaaagaagggtttccaagtgtattgcgatgcatccaaacttgggttaggttgtcttctaatgcaagatggaaaggtggttgcctatgcatctcgtcagttacgtccgcatgagaagaactaccctactcatgatcttgagttagctgtagtagttcatgcgttgaaaatttggcgtcattatcttttcggtactcgtacagaggtatataccgatcacaagagtttaaagtatatctttactcagccggatctgaacatgagacaacggagatggttggaactaattaaggattatgacataggaattcattatcacccgggaaaggctaatgttgtagcagacgctcttagtagaaaaggctattgcaatgctacggaaggacgacagctgccattggaattatgcaaggaatttgaaagattaaatttgggaattgtcagtagaggtttcgttgcagccttagaagcgaagcccactctaattgatcaagttagagaagcccaaattaatgatcctgatattcaagagatcaagaaaaatatgagaagaggaaaagctatcggtttcttggaggatgagcacggaactgtatggttgggtgagagaatctgtgtccccgacaacaaagatttaaaagatgcaattctgaaagaagctcatgatactttatactccattcaccctggtagtactaagatgtaccaggatctcaaggaaagattttggtgggcaagtatgaagcgtgaaatcgcagaatacgtagcagtatgtgatgtttgtcagcgagtcaaggcagaacatcagaaacccgccggtttgttgcagcctttgaagattcctgaatggaagtgggaagaaatcggtatggattttatcactggtttacccagaacgtcatcagagacaacctattccggaagtcgcttagcggaattgtacatggcaaggattgtgtgtttgcatggcgtccctaagaaaatagtgtctgatcgaggcagtcagtttacctcaaatttttggaagaaacttcaggaagagatgggttctaagctgaactttagtactgcttatcatccgcagacagacggacaaaccgaaagggtgaatcagattttagaagacatgttgagagcttgtgctttagatttcgatggaagttgggataagaatctaccttatgcagaattttcgtacaacaacagttatcaagctagtcttcagatggctccttacgaagcactgtatggtcggaagtgtcgcactccgcttttgtgggatcaaacgggagaacgtcaggttttcgggacggatatcctaagggaagcagaagaaaaggtaaagatcattcaagaaagattgcgagtggctcaatctcgtcataagagttatgccgacaatcgccgcagagatctaagttttgaaggagattatgtgtatcttcgtgtcacgcctcttagaggagttcatcgtttccacaccaaaggaaaattggcaccgcgttttgtgggaccttataagattgtcagtaaaagaggagaggttgcttatcagttggagttacctcaatctttggcaggagtccataatgtgttccatgtgtcgcaattgaaaaagtgtttaagggtacctaccgaagaagctaatctcgaacagatagaagtccaagaggatctgacctatgttgagaaaccaatcctcgctccagccgtgcgccgccgccgttccagacgtcgccgtcgctcgggaagaccgccgtcgtggtcgccaagtatgccgcgctacaagcctgagtacttgtttggtgttgagggttttgtccaggagttgcgtacaatgtcctttgtcattggatttgggactgcccctttttatgcccagattcctcatgatcgtcatgaagagaagtgccgagtcaaagtcaccttgaacagtaatagtgaagatatcccctcagtgatgttcaaagctggaggaagaaactacatccatgcatgtcaggaagtggcaaggatcgccataggagagcttcgcgatcgctacagtgatcaattggccgacactgagtatcgctaccatcctcgtcaaccacagggaagtgaccgtggcagttaccttgagactgaaggaattgagaatgatgctaccacaaggcatttggtggagatgctgtgggctatggatgaaagtcgtgcggagattgtgttagcagctcaagatcgtgaagaccggaatcgtggtaagatttgcaagctagaagacaaagtggatcgtttggagaaggaactagctgtattgaagggagaagcaccaccgcagaaggccaggattcgtctcaccgcaaggaagagagctctatttgtccctcgctatcaattggcgccaaaggttcgtgtggtggagaaagaagttgccccaaccctagcagatcctccggtcatcatcatggtgaacactcgcagcaacgggaatggccccagtaacaataacaacggagagaatcccactcttgctcaagttcttgctcaacagacacagctaatgaacatgatgatgcagcaactccagaaccagcaaaaccaaggaaataaccatgcacctccccagaacaagttagcagaatttcttcgtgtgaggccgcctgttttctctagcaccactaatcctgttgaagctggtgattggctgcatgccatagagaagaagttggatttgcttcagtgcactgatcaggagaaggtctcatttgcatcacatcagttgcatggccctgcctctgaatggtgggatcacttccgtctgaacaggactactgctgaacctatcacttggcttgaattcaccgctgctttccggaagacgcatataccatcgggagtggtgtctctcaagaagaaggaattcaggtcgctcactcagggatctcgctctgttacggagtatttgcacgagttcaatcgtcttgctcgttatgctccggaagatgtgcgcaatgatgaagagcgccaggagaagttcttggaaggacttaatgatgagctttcttacccactcatgactggggattatcatgatttccagaagttagtggataaagctattcgccaggaggaaaatgctggcaacaacatccgtaatcaagctccacatcctgttgcagctccagcacagcaacaacctgccaagagggagcaaggcagcaagcccgtggtgtgtttcaactgtggagacccaggacattatgctaacaagtgtccgaagccccgacgcgtgaaagttgtccctgtccagagcaactctactgtaccagcatcaaaggcccgtgttaatcatgttgctgctgcagaagctcaagatgctccagatgtgattttgggtacgttccttgttaacttagttcctgcaacagtgcttttcgattctggtgctacacattcattcttatctatgagttttgcgggaaatcatgggatggaagtagaagatcttagacgtcctttgatggttagtaccccaagtaatcaagcactctctttgcaacgtagcccctctgtcagaatagaaattcaaggagtaccattcctggccaatcttatcttgttagaatccaaagaccttgatgtcatcctagggatggactggttagccagacataaaggtgtgatagactgtgctaacagaaaagtaactctcaccagcaatgatggtcgagttgtaactgttcatgcattgtcttctgagtctttaaggtcaagactgaaccagataactttggaagagatttctatagtccgggagtatcccgatgtgttcccatatgatttacctggggatcctctagagtcgacctgcaggcatgcaagcttggatgactgtcagtatggacttcatagagggactgcctaagtcaggcaaatatgacacaatcatggtagtcgtggacaaattttccaagtttgctaaatttatccctcttgcacacccttttactgcttatacagttgcttaggcatttatccagcaggtgtatgatgtctttgggatgcctcaggttatcatttctgtcagagacaggatttttactagtgctttctagcaggagctgttcaaactagcggatgtcaaacttaacatgagctcttcttaccatccacaaaccgatggacaaactgagcgcttaaccagtgtttggaaggtttcctcagatgcacagttcactttgctccatctaaatggtccagttggctgtcccaggctcaacactggtataacacctcctaccacaatgtgctgaataaatctccatatgaggtcttgtttgccagaaagcctacacattttggccttgtggatgtgggtgcaagtacagtgccggatgtgcagctttggctccaagagagagctcatatgaatgaacttttacatcaacaattactaagggctcaacagaggatgaaaagtcaggctgataagaagcgttctgagaggcaatttgctgttggagatcgagtttatctgaaattgcaaccatttgtacagatgtctgttgcccgaagatcttgtcagaaactgagctttcggtattttggaccgtatacagtgttggaaagggttggcgctgttgcttaccgcttggatttacctgctactagtcagatacatccggtggtgcatgtttccttactcaaggcggcaatcaaaccaggcacccaggtcagttctgatctccctctcaactattctgacgaacaatctaccattcagcctgaagcggttcttcgtcgaagtctgattaaacgtggcaagagtgttgttccctgtgggctgatcaagtggattggcatgcctgaggagctggctacttgggagaaccttgtggactatggtgaacttgtggggttcgtcggccgggaagaagggcgcaaagatgcaatccttggtgcaccgccgccgcagcagcttgcacgacgcgcacggcgacccagtggcggcggcggcggcaacgacaacgtgggagaaggagacgcgcctctgctgtggggatcggctccgacggcggattgctacctctccgcccgctgccgcgctgctccgcccctttggcttcgagcgccgtcgctccacccgccgccacccaatccgcccctttggcttcgcgcgtcgttgctccgccctgctggctttcgccagcctgcgccgtcgccccgccggctttgggcgcatcgccat

SEQ ID NO: 54021 - DNA, 460 bp, Oryza sativa
  Clone ID: PAT_MRT4530_56165C.1
ttgctatgctctataatgctacttctaggtgacttatcatatgttttaacttctcaagtctgtcgaataataaaacacacattttaagctgaaaatttggttttcctgaacagataagcaatagaggaccttgagttatttcggatatttgctgactgttgtggaaaggatattctgatattttcttgtgataataacaaacattatattctgacttcaaaatgattcatattaaacgaaaatatcttaaatacatagtgccggacaaagaaagtgagagaaagtggaagaaaatggagtactgaatgtgtatatcatgtactactaatttagtaaaacatacaggacgtgaagctgaatatcatggatcatagtggagaagatcatgtaacattgtcaagcatcaaacagctcagtgataatatgtagagtagaggggcatcatgttctgttgacctta

SEQ ID NO: 54022 - DNA, 4802 bp, Oryza sativa
  Clone ID: PAT_MRT4530_56166C.1
gaagttcttttcccccccttccctcttgggccggctcggcccacttctccctccctctctctctctcctcccccgcggcccatcggcctccccgcgcgcgcgcgccgctgacaggcgggcccgcccgccactctcgctgacgggtgggacccacctgtcatccccaaccccgcgccgcgcccgccgccgcccgtgccccccgcgtttccctctcccgattccccctcttttccctctctctctccctcggattcgtccggattcatcccgcgaagttcgccggcgtcttcaatggcgcccgagatctccgcgcgcggtttcctctctccccggccgcgttctccccctctcggtgctatataattgctccccgagctccgctcttccgtttccgccgctcgccgctcgctctcgccgtcggatccatgctcgcgccgtgctcctctctctccgccgtcgccgccgagctccgttccgccgcccccgccgcttcggacttcctccctactcggcgacacctccgtccgcttcgccgagtggttgccgaccccgtccgccgctccgcttcgcccgccgactgccggagcaccgtcgccctcggcatcccgaaccgcgccgtcgccttcctccgctccggttcgccgccgccgttgctccggtcttcctcccggctcggcgccacctccctcggcatcgccgcatcgccgtcgacctcgtccgcgcctccgtttcgctcgccgaccgtcggagcgccgccgtcatcgtcatcccgagccgcgccgccgtcttcctccgctccgtccgccgtttccaccgccttcgccgtcttggggtgagccgtggaccgctccgttcgtttcccccttccctcctctctctcgggtgccgctccgacgcgccgttggtcgccggcggcgaccatcggggcgcgggcgcgctcctcccgtcggccgcgccggcgaggccgccctcgggcgcgccctcgcggctgccaagtgggcccggccgtcagccgcccgcgcccgcgggtgcggctgacgcgcgggacccacggcgccgaccgccgccagccgcgtgcgcccggtccaccgtggaccgtggggctgacgcgtgggccccacttcccgtggacccgacgctgcagcttcggaagatccgctcttcgtggaagttgaagccgtcgtttgggaaagcgagcaaggcaagacacatcatcttgatcatattgaatcccatacacggattggagatggatgaagtcgggggtcgatggacattctccagggcaaatgaaggctacacgagctgcggcccggtagtcgagatgtcatatggcagagggttggtgccctgctgctagggggctcagtcctgcctgcctgtcccgggtgtcccggccgtaggcgggattgggtcggtactcttgtctatggctaggatgggttggaaactatgtcacgtcttccgtctgtataccgtggtggtattttgctcaacaactaaaatgtggaatggttggcctgggttggcttgggacgagctgggacccagggtcgggttgccagttcggtctgaatcatcgtaggccttgggttaaggcagtactagatggtcagctttgcgaagaagaagatgtcgtcagttgtttgccgaagctccggaagactgcaggatccgctagcgaagcaaaggaagcagtgaagccagctgtgaagcaggacaaaagacttagatctgttaaggtcctatccttagtttctaatctgtctctcccctttgttttccctctctccctctccaaacctttgcaacagatggctgtcaatgagaaaggcaataaggtcagaagtcaggacattggtaccttaagctcccgggtgaatgaagcaccagacaccagttgtgtgacactggtccaacacctgattaaccagaaccgattgcttatagagatactacagcagcatcagacgccaattctgaacctgagtcaaatacaacctcaagtgcagttggaggcagtccaagcactcacaccacaagtcagcatgccgccagcatcccgaaggacccagggtgacgtgccacatgttgacccaaaagaagcaagtaacatttgctttatgtgtgatgagcaagggcactatgcaagggagcgtcctcagcagaaaagaaaaacaccaatgcgaaccgaagatgaagtccgtaagatgatcattactagcacagaatggcctccaccaggaatgaccagacgtcagagaagaaataccttccgaggtgcaccacagttgacagagcatcttttagctaatggaggtagagtgtctgatagtgaagattcagatcaagtctcctcagatgatgaagatgaaatggaatgtaaggcatgctctcgttgtggagaaatcggtcatgtcgccagctcgtgtgccactatatgcgttcattgcgaggaagaccatccacccgacaggtgtccaacaagcaggatcacttgtttcttttgtgaaggaattgatcatgtaccaaaagattgtcaattcagttttctgctgacgaagaagatggctaaccaacccgccagttccaacggagagaagcatcaaggcaacaccaatcctcgccaagattacagtttcagcctaactccagtgccaggacagaggaatcaaaatgagagaagaaaatgccgagtccgggaagatatctgttgcttcaattgtcaaggaatgggtcatttcgccgacaagtgcccaaaaccgagaaacatagctgccagcacgtcagtccacgcagctccctgcaatcagaagctcgctcctcagcgaattgtcatccatgcatcccaaagcagtcctatggcccgcgttgcaacagctccaactccagcgagtgcattaccacaaggtgtcaatgctcactttcagccccagcaaagaattgtcgtcgatggaagaagttgtgtctctccccgacctactccaggccaagcaaagggcaatcgacctccggagggcgataccaagcagaagaccgttattcgcctcaaccagcaatcagaaggaaacttctcctgtgaatgatagcaatatgcagtcctatcacatcatcacagaaccaatcaaggatgcagtcactagaacagagacctagggtctcatttcagaggaactatgttcgacaggcataggctggggtcctaaagtaagacgcggcttctgattactcccctgttgtgctttgaagtgagcaatccggcgtttcttctgctccatgcgattgtatttgtcctcctgacgaatagccttatccactaacttctggaaatcatgataatctccagtcatgagtgggtaagaaagttcatcattaagtccttccaagaacttctcttgacgctcttcatcattgcgcacatcttccggagcataacgagcaagacgattgaactcgtgcagatactccgtaacagagcgagatccctgagtaagcgacctgaattccttctttttgagagacaccactcccgatggtatatgcgtcttccggaaagcagcggtgaactcaagccaagtgataggttcagcagtagtcctgttaaggcggaagtgatcccaccattcagaggcagggccatgcaactggtgtgatgcaaatgagaccttctcctgatcagtgcactaaagtaaatccaacttcttctctatggcatgcagccaatcaccagcttcaacaggattagtggtactagagaaaataggcggcctcacacgaagaaattctgctaacttattctgaggaggtacatggttatttccttggttctgctgattctgaagttgttgcatcatcatgttcattagctgtgtctgttgagcaagaacttgagcaagagtgggattctctccattgttgttattggggttgttgggaccattcccgttgctgcgagtattcaccatctggcagggcacaagaagagaaaccaggggaaaaagctactctagttcttccaagcatcggaggtcgattgaaggctcatttggctcgtcttcatcatcttgagttgctacccactcaatcttggaattgttgcgcttggattcttcttcttcatcatcacttatgatcatgaccggaggatccgctagggttggggcaacttctttctccaccacacgaacctttggcgccaattgataacgagggacaaatagagctctcttccttgcggtaagacgaatcctggccttctgcggcggtgcttctcccttcaatgcggctaattccttttccaaacgatccaccttgtcttctagcttacaaatcttaccacgattccgatcttcacgatcttgagctgctaacacagtctctgcacggctttcatccctagcccacaacatctcaaccaaatgccttgtggtagcatcattctcaattccttcagtctcaaggtaactgccacgatcacttccctgaggttgacgaggatggtagcgatactcagtgtcggccaactgatcactgtagcgatcacggagccctcctatggcgatccttgccacttcctgacatgcatggatgtagtttcttcctccagcttcgaacatcactgaggggatatcttcactattgctgttcaaggtgactttgattcggcacttctcttcatgacgatcatgaggaatctgggcataaaaaggggcagtcccaaatccaatgacaaaggacatcgtacgcaactcctggacaaaaccctcaacaccaaacaagtactcaggcttgtagcgcggcat

SEQ ID NO: 54023 - DNA, 172 bp, Oryza sativa
  Clone ID: PAT_MRT4530_56167C.1
gtcccgggtccggaatcccgggttccccccttgagtcatgtttaaagggacggatttttctaccataaagttttacaggagggctcaattggggtcccaaaaaaccgccaagccggggtcaatgggatgcctggaccccgtacaaaaaaggtgttttccataacgtgaaaac

SEQ ID NO: 54024 - DNA, 5810 bp, Oryza sativa
  Clone ID: PAT_MRT4530_56168C.1
tcatgaatgaacccacacacttgggtaatatttcttcaaatatttaccattgagtgcccgtccataaacctctccatcaagtccttgcaacatataagctcctttggacaccactttgtggatctgaaacggtccttcccgatttggtgaccacttgccaaatttactatcacgagttcctatcggcaagatcaatttccaaacaagctcccatccagaaaaagatttaggcaccaccttcttgttataatgccgagcaattctctccttatccttggtaacttttgcaagagctcgtaatcttgactggaccaaatcttccctctcatcggccataaggttgtagtactcatcggctgtccatgtatcctgtaaatccgtccttcttgagccgattctgacttcccatggtaaaactgcttcatgtccataaaccagcttgtagggaggaacaaatcggtagataatgtgttccttgacaaattggatagcatctcctgaatcaaccttcttcataggaacagcttctacccacttggtaaaataatcagttgccaccaatataaatttatgtcctttacctgaaagtggattaatctggccgatcatgtccataccccatcctctgaacggcgacccaaccccacctatggccggaacctccgggacaggtaggtaggactgagcccctagcagcaggacaccagccctgtgccatgacatttcgactaccgggccgcagctcgtgtagccttcatttgccccactagacatgtggaagtacgatagtgctttgcaacagaggcccgaagaccggtccttatatggccgaggtgttactatcaaaaccatgcaccccgagcccagccgggtccacgggagtggggcccacgcggcagcctcacggtccacggtggaccgggcgcacccgggctcacaccggccggcgccgtgggccccacgcgtcagccgcacccgagggcgcgggcagctgacggccgggccccatgcggcagacactcggcgcgcccgaaggcggccatgccggcgcggctggcgggaggcggcacccgcgcccctatggtcgccggcggcggccataggcacggcggagcggcggccgagagaggggagggagagggggaaacgaggcagtggtccacggctcaccccgaggcgacggcggcgacggaggaggcgctcggagcggaggaaggcggcggcgcggctcgggtcgacggggacggcggcgcctgatgctccctgagccaaatcattagcttctatattctgctctcgagaaacatgcttcaaagttaccagccaaaatccatccatcaaccttcggcatttctcattgtagaccattaatgtatcattcttgcattcatactctcctgccagttgaccaataaccagtaaagaatcacccataatttcgatagcatcggcttcaacttccttaagcatttgcagccctttgagaaccgcttcatattcagcttgattaatagttgcataaggcttaatagtataggcaaactcaaaacttgcccccttgatgatcaattcctgcaacttcttcttgtcctctggaggttgaatcttctgaattgcatcaacactcctttgagttacctcaatccccctctcatgaacaagaaatcccaaaaactggccagccgatacgccaaaagcacactttgtcggattcatcttcaagccatattttctagttctctcaaacaccttcctcaaatcggctatatggtctcctatttcctttgacttgactaccacgtcatcaatataaacttcaaccaaccaaccgattagatcatgaaatatgtaattcatggccctctgatatgtagctccagtacttttcaaaccgaaagtcatcacaacccattcaaacaagccgattgcaccaggatatctaaaagctatcttatgaatatcttcttctgccatgaagatttgattatatcctgcattgccatccataaaacttaatatcttgtatcctgaagcagcatcgaccaactgattggccaccggcattgggtactcatcctttgggatagctttgttcagatctcgaaagtcaatgcacactctaactttgccattcttcttgataactagaactatattagaaacccattcagcatatcggcatggccgaataaaaccagtatcatacaaacgtgcaacctcagccatgtccttggtgtagacatttgaaccctccacgaccccctcaaaataataatttgggctctccatcttcaatcggctgtcggctggtacaatttcaatcttgtcaccttgccattgaatcaagcactggtgcatggttgaaggaatacaacaactagcatgaatccaatcccttccgagcagcaggctataggaacccttcccattgatgacaaagaacgttgtagggatggttttgttgccgactgtcagctccacattcaaaactcctttggtctctgatggattgccaccaaaatccttaagcaccatatttgtcttgatgagatcctgagcgtttctgcccaactttctgaatatagcataaggcatcaaattcactgtagccccaccatcgaccattattttggacatcaacttcccattgacataaaccatttatatacaatggcttgagatgccgattctctgtaccctctggcttctcgaagactgcttgttctggtgacaaaatcaatttagccgattcttcttcaacatcatcgacatcggcttgcttgaccccaaactcggtaggcaacatgaaaaccatgttaaccgatgcagttacaacactttttcctttggccaatctctttgcttcatcggtcgtggcttcatcggctgcaggaacctgatttttaacacgccactcctgccttggctttgttttctttaaccgatgactgatttcctgttcaacctcctgaaaacgttcccggttccttaatctctgaacccttctcttctgattttttgtaaaaaataccagaaggacaataaatgcagcgggaaaacggaagacaacaggagctaagccttgactagaactgcagcgggaacaccactccacaggcatcctcgatggcacggacgaagcctactccttggagaaacctccatctgacacacactcgtactcgccactcctcgcaaggcaacgggcagtcccctctcgtgcctaggtgaatccggaagcgacagaggccgtcgcagggcccgccccgctccatcacgcccacccttgcctggaaaagacggttgctgacgtcatcaaaggggaggggcggcgccggcaagcgggccccaccggtcagcggcacaagggcgccggtccaccgtggaccgggaccaccgaggcggtccaccgccggtccacgggaaccgacggtccggatcggcccaagccgatcgggcggccaggggcggcgcggctggggcacagcacggcacaaagccggctggccaaacgacggcgcgcggcggcgcggccacccgcggcgacggccggcgacagcgcggggaggagaggagggatgctcaccaaaggccggcgacggcgagactacaacgaggaagccgggggcgggctcctcggggaggcaacggtggtccggtggcgtaccacgggcgcgaggcggcggacggtgaccgggacgaccggggcgcggagagggcgatttcagtggttcccggaggcgaggaagcggtggccggggtgcggctcggagttgccgatccgagggaggaaacggcgcagtccggcgtcgaccggggaggcggggcgacacagatggagacgacaaacacggcggcgatctcgggttggtggtgaagttggtgctcgggcggcgagaggcgacaaccgagcggcggccgagcttgactttgaggcggcgaaggtactggcagtggtggcgcattggggcgacggctagggcggcggtggcgcgcggctggaggcggtgaaaggggcggcggcctcgggtgtgcggtgggagtggtgctcgaggggtggagagggggaaataagaggcggccggacttccccttgcggtggcgaagctggcggtggcggcggctcggcgcggtgacggctgtggcggcgggaaacggcgaccggagttcgccggagtgtggcagcgcgtgggtgcggcgtggggagagcgagggagagtatgccgggctcgggaaaaatggggaaacggacgaggggagcacggggatgctttttatgggctcgggaaggcgggatcgaggccggacgtggcggaatcggccggcgaagtggggcgccgacgtggggtggtggaggggttaactggcgccgattttcgcggggagagtgggggaaatggtggaggacgtggaggggatcgtgcccacgtcgttggatgcgagctcgggtgcgggagggcgccggattttgcggcgacgtggacggcaatggcggttggggtcggccggcgagagatattgatgaatgcaaagaaccgaagaaatacccttgttatggaaactgcaaaaatataccagggcatttcgactgtacatgccctaagggtacccgaggaaatgcctttgttgaaggagcatgccaaaaaatcatcttaacatccggagtacgaatagcaattggagttgttgcgggtgcattggttggcctctttggtttccttggatggggggtgatcaagtacaaacagagaataaaaaaacaagctctattaagacaggctgatgagttttttcaacaacacggaggtcagctccttctagaaatgatgaaggtagagggcaatgcggggttcaccctctatgagagagagcggatcaagattgcaacaaataacttcaacaaggcacacattattggggaaggaggacagggaactgtttacagagcagtgatagatggcactaccatggcaataaagaggtgcaaggagattaatgagagcaaaaaaatggactttgtgcaggaattggtcatcctttgtcgcgtcaaccataccaacatcgtcaggctgttgggttgttgccttcagtttgaggcacctatgcttgtctatgagtttgtgcaaaacaaaacactacaagagctgttggatctccagaggagcaagaggtttcatgtcacactaggaacacgtctaaggatcgctgcagaatccgcagatgcatttgcacatctctactcgctgccacgtccaatactccacggcgatgtgaagccagccaacattcttctcgcagagggattggttgcgaaggtgtccgactttggttgttcaacaatcgatgagaaaacccaagttgtgccaaaaggtacaccaggctatattgatccggactatctactcgagtaccagctcacagccagcaacgatgtatatagctttggagtcattcttctcgagcttctcactagtaggaggccattttcaaaagaaaggaagagcttaacatcaatgtttcaggaagctatggcaaatggcacacttgtcgagctccttgatagcgacatagttgatgaagctagcatgcgagtgatccaacaagccgcggttctagctaatcaatgcttggttgttccagcattagcagatgaagtgcagcagtacccacaaccgccattggtgcttgaggacctaagctttacggggatagggagaacatcgatgtctacatggtacggtgggagcaaaacaaatggggtttatggcctctcgaagaaagctgtgccgagcatagagtttgcgagatga

SEQ ID NO: 54025 - DNA, 600 bp, Oryza sativa
  Clone ID: PAT_MRT4530_56169C.1
atggacatcagtgagccaagtcaggagcttgaagtagcaaggggaacccggatgtttcatattaatgacctaaatgttcccccaatttggattgaaactccagaagaagaggaggatccagaagaacgagtgtttgagatgcaagaacatatttctatgtatgctgatgatcaaggagatgatgaagatccttactcatgctctgcccctaatactgctgcatcaacttctacacctcatgctgaatttttacatttcgcacctacatcattattcactaaccccgctgaagaagaagctcagcaggaccctaacatcttaatgggcgcagcaggggagggcgcgggcggcaccggcacggcggcctggcggccggcggcgaggcggccaagtggccacggccgtgaggcggtaggcgcgccggccggcggtacggcgcgtggtggccagccggagcggcacacgacggcgcagcggaggggcgcgtggcggtgcggccaggcgagcaccgtgcggcggcgatgcggcggccacggcggcgtgcggccgggcagtgcaggcagcgcggcggctacgaaggcgtgcggccgggcggcgcag

SEQ ID NO: 54026 - DNA, 671 bp, Oryza sativa
  Clone ID: PAT_MRT4530_5616C.1
atggcatcggcgagtgaaggcattaggagcgaagagctgctagatctagatcttgcaaggatcctactagcagcagggtaccagaggagtggttggaggcgcctgacgatcaagactgaagtctcaactctcaagaggtgtcaaggatgcgaggtgatcagcctgttgccatcatgccatgtactgatgaacagacgtatacagtgcattactactatgtcctatgttacggaaagttttgatgtgatgaaaaagttagaagtttgtgttgagattataggcgtctacgaaggcacgcagcacgcgagcgaagaggaagacgagccgtcgcggacgaacagggagcagtcgcgcaaagcgcttcccaaaaaccttattgccgccttctcccggtgcagaacgtcgaaggaagaggttccggagacctgctctcccgatcgcaggtgcacgccggcgagcggggtggagtaatcctcccctcgcctttctcgcgcgtcggcggcggcaccctccataggaagggaggcgggggcggcagcggcggcgtctgcgcctcccctccgccagatttggccgggagcggcggcccggcaggaggggaggcggggacggagggaaggcgacggcccggcggcggcgaacgggagcagaagcaaaaatcttgtgttcat

SEQ ID NO: 54027 - DNA, 2573 bp, Oryza sativa
  Clone ID: PAT_MRT4530_56170C.1
taaaaagaaaaactctaaaaagtcctttttccccctctccccttcttgggccggctcggcccatctctctccctctctctcctcttccccgcggcccaatcggcctcctccccgcgcgcgcgccgctgacgggcgggcccgcccgccaccctcgctgacgggtggggcccacccgtcatccccttcctcccgccgctcccgccgcctcgcccgtgccctaacgccgccgccgccgcgaatcccgccgcctcccgccgtccgcgcgcgcaataaagtggggggaaatattccccgtgattccctccctcttttcccccatttttccctctctctctccctcggattcattccgaaactttccccctaacctcgccggcgcatcaatggcggccggatcttccgcggccgtttccccctcatccgaccgctctcttcccctcccaaccctatataaacactccccgtgcctccctccaccgtttccaccaatcgccgctctctctctccgccggaatcgagctcacgccgtcgctctctctctccgccgtcgccgccgagctccggtccgccgccgtcgtcgccccggaccatctcccgcttcggcgccgtctccttcggcttcgccgcgtcctcgccgacctcgtccacctctccgtttcggtcgccgatcgccggaacgccgccgtccccgtctacccgagccgcgccgccgccttcctccgctccggtctccgttcccgtcgtcgccgtcgacccggggtgagccgtggaccgccgattcgcttcccccttccctcccctctctcgggcgccgctccgccgcgccggaggtcgccggcgaagaccatcggggcgcgggtgcgccgcctcccgtcggctgtgccggcgtggccgccttcgggcgcgtcccgcggctgccatgtggggcccggctcggccatataaggaccggtcttcgggcctctgttgcaaagcactaccgtacttccacatgtctagtgggtaaggcttagtttgtggctcagtctggttataaacaaaagtacacggatggagatggacgaagtcgggggtcgatggacatctctaggacaaatgaaggctacacgagctgcggcccggtagtcgagatgtcatggcacagggctggtgtcctgctgctaggggctcaatcctgcctacctgtcccggaggttccggccgtaggtggggttgggtcggtactcttgtttatggctaggatgggttgggaactatgtcacgtcttccgtccgtataccgtggtgctaaaatgtggaatggttggcctgggttggcttgggacgagctgggacccagggtcgggttgccagttcggtctgaatcatcgtaggccttgggttaaggcaggccttaagtgcctttgtaataatatgtttaacagagaaaaaggaaagaatgtcagcgggtatgcctcaagtaactccagttttcaactcaatccaccactggcctcaagagagttaaccagggcacacccttggtccattccaagtatgcggcttagttcacagctaccattggttggaagtcaagaccaaaataagtatgtgtttgatcgagcatttgccacccaggccaatgagcttcccatgccagaagagcatgtccccttttgtcatgattgtagagaacaaggacactatgccctgaattgtccatgggtatatgctaaagaagccccttcctttggtttagcagggcagacatcgctaagccagcctcctcgcaccaagtcaagcttgcagcctagtgtgcaaagcagagagcccaatgaagagaatccattgaatcccgggaaatgctttctttctagcctttcgtaccacgtggggtcacacactaagcaagccaaaggcaagaagagtaagaatcagaagagaaaagcgccgatgcgaactgaagaagaagtacgtaagatgactattaccagcaccgaatggcctccagcagggataactattcctagacgtcaaagaggaaataccttccgaggtgcacgacagttgacccagcacctcctaagccatggtggcagagtatatgatagtgaagggtcagatcaagtctcctcggattatgaagatgagtctccccgacatctcggtgaggaagagatggaatcaaaagcatgcaaccgttgtggagaaattggacacattgctagcatgtgtctcacactctgccctcattgtggggaagaccatccaccaggtgaatgtcccacccgcaaggtcacatgttttctgtgcgaagcaccaaccattctctgcaccgacagcctcagcaaagaattgtcatcgatggaagaagttgtgtctctccccgacctactccaggccgagcaaagggcaatcaatctcaggagggcgataccaagcagaagaccgttctctgcttcgaatagcaatcagaaggaagcttctcctgtgaatgatagcaatatgcagtcctatcacatcatcacagaaccaatcaaggatgcagtcactagaacaatgccagctatacctctccagaatcagaatgagtag

SEQ ID NO: 54028 - DNA, 597 bp, Oryza sativa
  Clone ID: PAT_MRT4530_56171C.1
atggcggggtacctacactatggaagttctctttttatgaggaaacttagtgtagtttgccctgttagtgctctaaggggttgtttggttgctgccctgagcaacatgcctgaaatttctgtgcgcctgagtggcatgcgagaagacaatgcatctagcctggtcagggaaaaaaagagagaggagaacgcaatcgaagagtcaaatagatcccaaatccgtgcatcaggagcacaaccttcagatgattctgcccagatgtgcaaatgcatctggcaacctgcaaatcgatctgcttactattttgcacgaaaggcagcctgggcagcatctagcatgggcggtgctgctatgctgggatccggcaagacggcgacagcttcacccgccggcgggagcaacacagcttcgcagggatccggcaaaacggcggtggcttcgcacgccagcgagagtagcacagcttcgcagggattacaaaagacggcgggcggcggcggcttcgcaaggatccggcaagatggcggtcggcggcggcttcgcggaagcagcgcagcttcgctcctggaatctacgtcgcgtggccgctttggataa

SEQ ID NO: 54029 - DNA, 402 bp, Oryza sativa
  Clone ID: PAT_MRT4530_56172C.1
gtggggagccaaaaaaattcaaacaatttttggggggttcacgaaaaaaacatggggtttttgctcttttagacaaaaaaatgaaccttttttcttttcaaaaatttgtcccccccccttaaagtatttccttccccccaaaggcgcccccctctaaaccaaatcttaaaaaataattttgatttggccccaaaatgaacaaaaatttggttcctttatttccaattttccctttgggcccccccgaagggggccccccctcccttttatttttttttaaaaacaaagggggaattttgttttggggggcacctttaattgtttggcaaataaatttcaaagaatttcctttcccccaaacattttcccaggggaaccttaaagaaaaaatttttgggtttt

SEQ ID NO: 54030 - DNA, 6848 bp, Oryza sativa
  Clone ID: PAT_MRT4530_56173C.1
ttattgcgtcagccgaggggaggggcgtgcggaccgggtccacgggagtggggcccacgtggcagcctcacggtccacagtggaccaggcgcacctgggctcgcaccggccggcgccgtgggccccacgcgtcagccgcacccgagggcacgggcggctgacggccgggccccacgtggcggccactcggcacgcccgaaggcggccactcggcgcggccggcgggaggcggcgcccccgcgccccgatggtcgccgccggcgaccaccggcgcggcggagcggcggtcgagagaggggaggaaagggggaaaagaggcggcggtctacggctcaccctaggtcgacggtgacgacgaaaaaggcggccggagcggaggaaggcggcggcgcggctcgggtcgacggggtcgacggcgttccggcggtcggcgggctcggcgaggtggtggacggggtcgacggcggtgcggcgaagccgaaggaggtgacgccggggcgggaaacggtccggggcgaagacggcggtggaccggagctcggcgtggttgctccattggaccttgcaaaaacggattacccagttcctggtcctgcgctccatggtgtccaggattttcacgggcctctccacgtaggtcaagtcttcgcgaacttcaatttgctctgaatcggcctgctcggatggcactcgaagacatttcttgagttgcgacacatggaacacatcatgcacgttgcccaaggaggcgggcagctccaactggtaagcgacttccccgcgtcgagcaatgatacggaaaggacccacaaaccgaggtgcgagcttccctttcgtctgaaacatgtgtacacctcgcaatggcgtgacccgaaggtacacaaaatcgtccactgcgaattccaggttacggcgtcggttatctgcataactcttctgccgggactgtgccacctttagattatcccgaatggttctgactttagcttcagcctctctcaggatatcagtcccgaacacttggctttccccaacttggtcccacaatagcggtgtccggcatttgcgtccatacaacgcttcatagggtgccatttataagctggcttggtagctgttattgtaggagaactcggcataggggagactcttatcccaggtcttcccgaaatctaggacacatgagcgaagcatatcttctaggatctgatttagacgctcggtctgtccatctgtctgcgggtgatacgcggtgctgaaatttaatctggtacccagctcttcttggagcttcttccaaaagtgagaggtgaattggcttcccctatcagatacaattttcttaggaacgccatggagactcacgattctagcgaagtagagctcggctagtttgttccctccataggtggtcttcacaggaataaaccgagctaccttggttagtcggtccacaactacccatatagaatcatatccgccttgggtttttggaagtccggtgatgaaatccatcccaatttcatcccatttccattctggtacttggagaggttggagaagtccggccggtcgttggtgctctgccttgacacgccgatttccgttccatagggttccgtgttcatcctctgtgaaaccagcggctttaccctgtttcatattcttgaggagtccatgcatatccggatcattcttctgagcctcgcggatttgatcgagcaaggtgggcttggcttccagcgtagccaagaatccacgaccaactatgcttaggttcaaggcttccatctgttgattaagttcgggtggaatgccacggacgtcaagagtgttgcaatggctttttcgacttagagcgtcggcgaccacgttggccttaccaggatgatagtgaattcccacatcataatccttgatgagttctaaccatctcctctaccgaagattcagatccgactgggtgaagatgtatttcaaactcttatgatcagtatatatttcacagcgattcccaatgagatagtgccgccagatttttagagcatgaactaccgcggctaactccaaatcatgggtagggtagttgccttcatgaggccgtagctgccttgaggcataggccaccacatgaccttcctgcatgagcacgcaccccaatccttggcgcgaagcgtcacagtacaccatgaagtccttgcgagtatccggtcagactaaaactggcgaggaaaccaacctttccttgagagtttggaatgccttctcgcattgcgggctccacacaaatttctcttctttcttcaacaactgtgtcatgggtcgagcgattttggagaagttctcgatgaacctccggtagtatcctgccaaacccaagaagctgcgaatttgagtgactgtcttgggttgcttccaatcaatgacggcggtcactgtttcggggtccacagcgactcctttagcagatatcacgtgccctaagaatttgacttcggacaaccaaaactcacacttgctaagtttggcatacaattgatgttcccgcaactttcccaacaccagacggagatggtgctgatggtcttcctctgattgtgagtacaccagaatgtcgttaatgaaaaccacaacaaacttatccaggtattccatgaacactttgttcactaagttcatgaagaaggcaggagcattggttaaaccgaacgacatcaccgtgaattcatacagtccgtatcgcgtggtgaatgcggtcttcgggatatcttcttcacgaatacgtaattggtgatatccggaacgaagatcaatcttggagaatacagtggcacctttaagctgatcgaacagatcatcgatccggggaagagggtacttgtttttgatagtaacttcattgagagctctgtagtcaacgcacatcctctttgtcttgtctttcttctccacaaaaatcacaggagcaccccagggggaagtactcggccgtatataccccttttctttcaactcttccaactgtttcttgacttcggccagttcatttgctgccatacggtagggtcgcttgtacaggggagtggttcctggagcaagatctatccggaactcaatctctcgcttcggcagcataccgggtagtttttctggaaacacgtctccgaactctctgacgatggggatttctgacagtcctatctgatgaagttctgaactaccgacagaagttgggggtgcaaagaaaacaaccggttgttccggccctcggtacagagtgacagtgcgtcttgcgcaatccactactccttggaattgagccaaccaattcatcccaaggatcacatccaagttcttggtgtctagaagaatcagatccgagggaaaaggaattccctggatttctataggaatggcagggctataatactttgctgtcataacccctccaggggtggtgatgagcagagggttcctaagcctttctatccccaaccgatttctccccacgaatggcacagatataaacgagtgggaagctccagagtcgaacaaaatggtagcagggatggaatgaatgaggaacgtaccaacgatgatgtctggagttgtcagcacgtcctcggccgtcacgtggttcacacgtccccgaatgacatccttaccaccgttgttggagcggggaggcgcttggccttgctggcgcctcggctttgggcatttatccgcaaagtgcccatgctcgaagcagttgaagcacagacgctgctgaccttgaacgtccctgcggccttgaccaggctgcacggctggcgtagggggacggggcgcacgagtcccttgctgactctgctgttgctgcggctgtgggatgcgcaccacgaattgaggtcggggcgcggagcgaggttgctgctgctgttgctgctgcgaggatgatccccctggatagggattggtgtagcggaccctttggttagccccctgttgattgcggaaattcgccaagcgacgcttgtgcgactccagttccttgtgcttggcttccaagcggatgctcttgtccaccagacgttggaaatccgagtagtccccggagaccagacgcacggacagctcaggatccattcctgccaagaacttctcttacttctcctcatcttcacgaacatcctccggggcgtaccaggccaggttgttaaactcatgcaaatactccatcacggagcggttgccttgcttcaactctcggaattcccttttcttaagggccatgactccggcgggcacatgggttctctggaaagcggcggtgaagcgggcccaagtaataggttgcccctctagctgcgtagcctggaaatggttccaccatagagatgcgggcccctgcagttggtgggcggcgaagatgactttctcctcatcactgcactgcacggtgtctaactttttctccacggcatgcaaccaatccaatgcatccacggggttattagagctagagaaggtaggcggacagatgcggaggaactcggcgagtttagagtgttgtgggggtggtggtggagcattatgttgtggcggattttggatgtggtggaggaaagcagccatcatgttggcctactgggcgacgatttgggtgaggatggcgttggtgtctggtggtggtggtggaggcggagaaggaggtggaggtgggctgacatggttgttgtggttgctgccttcggggtgactgccttcaccggtagcagcacttctcctggttgtcaccatggaaggtgagcaacagcgcatcctccgtactgccaacgccggaggctccatcctcctgaggaaccacgggcgcgggctcggcacgaggggtctcgacgaagcaggtccacgccagggactgacgaacaagctcgggcctggaggtactcttgcgggcggtgatcttcaggctgcggcagacgcggcgacgcttggggcgacagacctctccctgggcgatcttgagctgacgcagctgcgcctccactgcgtctaagtccttcttcaactgcagattctcctgacgcagctccaggatcttcatgttgttcttgaccaacccgcgacgcaccatctgatggaagtcgatacgggccgcgtcgtatgcctccaccatgtgcgccaggtgcatgatggtagcgtcatcctccgagctagcatcccggaaggtggcgtagtcgcgggctcctccgcgacgagggtggtagcggtagggcaagtgctgcaactcgtccgggtagcgctggtgaagagtgccgatggcgaggagtgcggcgttctggcaagcagcggagaaggaatctccacccgcggtgaccgccaacgaagtcctctcgggtgagccagtgaggatcactgcagtaacctcccaagcagcgtggggctctgcatcgtcaccctcctgctccgggagctgcttgccctggtagtccactccatgcggataccccagaacaacgcacatgccccgcagttccaaaacgaatccagtcaggtccagaccacgacggttgatgctgccggccatttgggtacattgctcggcttgcccataaccgagggcgcggctattcgaatagattatactctgatcagaggtgtacatcgacccaaccccacctacggccggaacccccgggacaggtaggcaggactgagcccctagcagcaggacaccggccctgtgccatgacatcttggctaccaggccgtagctcgtgtagccttcatttgtcccactagacatgtggaagtacggtagcgctttgcaacagaggcccgaagaccggtccttatatggccgagccgaggggaggggcgcgcggaccgggtccacgggagtggggcccacgcggcagcctcacggtccacggtggaccggccgcggggcgcgcccgaaggcggcctcgccggcacggccgacgggaggcggcgcgcccgcgccccgatggtcgccggcggcgacctccggcgcgacggagcggcgcccgagagaggggagggaaagggggaagcgaggcggcggtcctcggctcaccccgggtcgacggcgacgacgaaaaggcgaccgaagcggagagaggcggcggcgcggctcgggtcgacgaggacggcggcgttccggcggtcggcgggcgaaacgaaggggtggacgaggtcgacgaggacgcggcgaagccgaaggaggcgatgccgaggtgggaggtggtccggggcgacgacggcggcggaccgaagctcggcggcgacggcggagagagaggacgacggcgcgagctcgattccgacggggagagcgagcggcgaacggcggaaacggaggagggaggcacggggagggtttatatagtgttgggagggggagagagcggccggcggggaaggaataggcgcggcgatctcgggctccatcaatggcgccggcgagatttgcgggggcaaatccgcccgtttgaacgcgaggaagagaggggaaaatggggggaaagggtgagggaatcacggggaataattcccccctattgattgcacgcggggacggcgggaggtggcgggattcgcggccggcggcggcgctagggcacgggcgaggcggcgggagcggcgggaggacagggatgacaggtgggccccacccgtcagcgagggtggcaggcgggcccgcccgtcagcggcgcgcgcgcggggaggaggccgatgggccgcgggggagaggagagggagggagggagctgggccgagccggcccaagagggggaaggggggaaaaaggactttttagggcttttctttttataaaacctttt

SEQ ID NO: 54031 - DNA, 5026 bp, Oryza sativa
  Clone ID: PAT_MRT4530_56174C.1
atgtcgcatctagagggagacgaatatttggaggagaagggagacgcttctagcaccaaggagactggatcaaagggagctactattcactttgattacatcaaacttaatgttcctcctcataactttgtctccgtgccttccgggcgtgcacctcattttgatgggacacattatgccgcttggaagcacaagatgaagttgcatctaatctctttgcatccaagtatttggaaagttgtttgtacaggtattgatgtacccaatgatgacatggagctcacttcggagcaagagcaactcatccaccgcaatgctcaagcttccaatacaattctctccgccttgagtccgaaggagttcaataagtttgatggtcttgaggaggccaaagagatatgggatactttgcaattggctcatgagggatcacccgccgttcgtgaggacaagattgaattgttggaaggaaggcttggaagatttgtgatggatgacaaggagacacctcaagagatgtatgataggatgatgatccttgtcaacaagattaaaggatttgggagtgaggacatgacaaatcactttgtggtcaagagacttctccgtgcatttggtccaagaaatcccactcttgtatcaatgatacgtgagaggaaagacttcaagaggctcaccccaagtgacattcttggaagaattgtgtctcatgagatgcaagaagaggaagctcgtgaagtgaggcaaatggtgaagaatgccgccatgatcaaaaatcaagaagtggctttgaacgcaaaacaagaagaagagtcaagttgtgaagaaagtgaagatgaagagatggctcttattgtcaagagattcaagcactttcttctcaagagtggctatggcaaaggaaggaaggatgatgacaagggaaagaggcaatcagagagagcttgcttcaattgtggcgaatatggccacttcattgccgattgccccaaaacaaatgaagctaaggctaaaggagacaagaagaagccggagcgtgctcatgtggtgaaggcacacatggtggaggtgtggtactccgaagatgaagaagcttccgaggacaagcccaaacccaagccaaaagacaagattgaaggagagggtggtattgctaccgtcgccttcaagtcatcctcttcaagcaaagagtgtctcttcaacaacttgagtgatgacgacgacgactcctaccactactcatgcttcatggcccaaggccgcaaggtgatgactcaaaagccttctcacacttctcttgatgatgattctagtgatgaagaaactagccttagggatgtcaatgaaactcttcaagaaaaatttgctattttagacaaaagtcataaagatcttgaagttcaattagacactctttggagtagcacctctcaaccaaatgtggtttctaattcttccaatccatctactagtaatggttgtgctaggtgttacaatattgatttgacctcttatgctactaatgttgatgctatgcaagctcttaagaaagagaatgaaaggttgggtacattggtgaaatatggatgcatgaagacttaccattcaaaagatgccctttacaagaccatcaccgctcatcctaacaaggatggacacgggctcgggttttcgggtggaatgtcacgtcctgataaattcatcccaaaataaaaatcattttgccacctccccgccgtcgtcccctctctcccgtgccgccggccgtcttcagctgcccctgccgccgcgttagcacgctggccggctgtgccgtcgcctcctccagcgtcgcagccacctcctcttcgccggcctgccctctgtttcccgcgaagacctccggaagtgcatccccgccggcaacagtggcgttgccgccactgttccgcctccggccacctctgccgcgtcccctgtgcgccggccgacgttgccaccacctctcccggcaccggaatgccatcctcttccccggccaagccacggcatcgctcgtatttcgccggaatgccgtcgcgcgcgccgcctcttcctcggtctccggcgtcgcagcggcaagatcgccctcggcctcgcctccccttcgaccgaacccctctgcggtccatcgtcgtcgtctccgttcgttctcgtcgtcgacgtcccgtcgtcgcccagctcgtcgtctcgcggcgccgcctccgtcgtcggcatcgcagcggtgtgttccacgccatcctcgtcttcgtgcagccgctgtaggctgcccacgtcgcctcctcgccggccccggtcgtcgtcgtcgtcgccctctcgtcgttcccggtcgtcgtggcgttcgtccctccgtcaagccgttctcgtttgtcgtcctcgcttcgtcaagtgctgcagcctcgtcgtcgtcttcgtcctcggctccgcgtcgtcaagccttgtgccggccgcgtctcgcccgtgtaccggtgttggtagtcgttcacgtgtgcgggtggtgaccgtgtagtgtccgtgttagtgtgcccgctcggtagccgcgtggtttccacgtgtgcagcccgtgtggtgtctagtggagtccgtttgtcggccactcgcctcggttgacacacggggttcgcttccgtcgacccgtggaccgtctctgtgtactcggttttctttttatgtattgttattgcttctttataggcttgtagctttgcttgtgtgcttcgcgtagcttctgtcgttccggaggttcccgaagcgtggttcgtggtcgtcgccgaaggttcggaaggccgttctctctctccccctctattcaaaacccccaaaatggttttaggctgggctcgaggtgcgtggttgggttttgtttgtcgtacctcgggtactataaggattaagctcgggcctctgttgcaaagcactaccgtacttccacatgtctagtgggacaaatgaaggctacacgagctgcggcccggtagtcgagatgtcatggcacagggccggtgtcctgctgctaggggctcagtcctgcctacctgtcccgggggttccggccgtacgtgggattgggtcgatgtacacctctgatcagagtaaatctattcgaatagccgagccctcggatatgggcaagcctagcaatgtacccaagtcagtgtttcaattcttaaaatttgctcaacaactaaaatgtggaatggttggcctgggttggcttgggacgagctgggacccagggtcgggttgccagttcggtctgaatcatcgtaggccttgggttaaggcaggcctgaagcgcctttgtaataatatggataatactggtaacaaaggctatgggaatgatggatccgatgactcaagaacccaagccaatgggaatgagagaagcaccaacgaaacctcaccagagctaatccaagttgtggttaaccaaaccaacatgttggcaacagcctttcaactattacagaattggagcagcccagcaggggcaaccaacgttcaagtgcctacagtccagcaacagtgcaagttatcagaatttctcaaaactgagcctccaatctttgccattgccgtcgatcctatggaagccagtgattggttgcgcacaatcgagaagaagctagggttgattcagtgcaccgaccaggagcgggttggcttcgcaactcatcagctggttggaccggcttcagagtggtgggatagctacgaggcatcacggccagaaggacataccatcacctggaacgagttttcctctgtattcaggagatcacatgttcccgcaggaatgatcacactaagaaaacgagaatttcgctacctgaagcaaggagatttgaccgtcacagagtacctgcacgagttctatcgtttggctcgctatgcaccagaagatgtggaaacggatgaagacaaacaagagaagtttctccaggggttaaaagatgagcttgcagtgcaactactcctagaggattatgaagattttgagaaacttgtggacaaagccatgcaactcgaaagtgagcataatcggatgacgaactgcaagagaaggattgtcaacatcccagtaattccatgtggtaaccaaagacagcgcactgagccacttcagatcaccggatcttctgttgtgcatcaagagttcctgccccaagaagacggacgcaatgcagacaacaacactagcaatactaatgatgatgataccaccaacaaccatggttcttgccccattagtgaccactcgaataaagcgtgcaatgtcagtagcattcaccaagatgtcaacgatagtatcaatgttggaacccagaatgacaaccttagcaattttgacactgagaaagactccaatggtgatagcaactatggtaccactgatgccaatgttagcaaggatttccaaccaccaattccaactccaagtcagaacgatcgtcctcagacggatagctcagcaaagaagacgttgatttgctacaattgcaaagaaccagggcattactcgagggactgcctgcaaccaaggcaaaatcgacctccacattaccgccaatttacacgaagcagacattccaattgtattgtggtcactggagcaaacgccgtacccgcaaagagtgaaatcttcaactcggtatcagatgctacacggagtgaaaagtgcaagcaccggttaccaggcaatgccatgacttgggaagatgatccaatgggaaagaacacatcaagtggtaacttgtctgaggttgactccgaagatatgaatcatgagaagttctggaacggaagcatcactgaactaccgcaacctagtctgagtcagccaaaaggtgcaccctggtccaagttaggtgaagagaagattccatccgcaacaggaggtcaagccaagcagttccgagtggtaaagttttgctggaagtttgtcaagacgcaacggaagaagtcagacaagaagagaagaccgcccaacctatcttcttgctag

SEQ ID NO: 54032 - DNA, 321 bp, Oryza sativa
  Clone ID: PAT_MRT4530_56175C.1
aaggaaattaccatcacataaagggttttagcacttttgtgggataaaaacttgccaaagttattacaggttagggggcataaaaacaagggccttacatatagagcatattggggaacacttttattacaacttttagaaaatcatgggaaggttttttacaagactggttttttaaaaaggctttgttccagggttccagcaaacgatttaccatagggatgcagggggacattaaaggatttgtttttttctaaaaaagactggtttcatccaccaatgtttttctaaaataaaccccgatggggaacattctttggg

SEQ ID NO: 54033 - DNA, 3418 bp, Oryza sativa
  Clone ID: PAT_MRT4530_56176C.1
atggccgagcaagcaaaggtgcacgacctctctccgagtgtgagcggcgacgacggggagccaaacccacgccgtcgagctcgtactcccccacctcctccacaccaaaatcctaagcagggggaggcgctcgagagggtcgaaaaatccgcagcatcgccagtcgcgggtgatgcaggagaacggcgagatggggagcgtcgcctcctcgtctacggcgacggcagcacgcctcagggcgcgcttcaggctgttggcgcgctcctacgtcacccgcccgtcgtccctgacccggagtctccagcccagcgatggctggacgacgtggccaacttggtcatgacggcacagcagcgcctgggtgctggtggacggtccgccaccaccaagacctccggcgccgccactaccggctccgtgtcgtcaaggcggagggcgcggcgagcggcggctgttgcacgccattcggctgccactccctcgtcggcacctccgactcgggaggatcagcatggagagccggatgctcgcctcgacatcgagcgccggcgtaatagccggcgtactcctcgcgcaacggagggcgcctcttcgtccagagtgtcacctcgacatggacgtgaggaccagccctccgtgcccccggctggtggtgtcggctgtagagcctttgtggcgagtcttcggaatgtccgttggcccccaaggttccggcccaccatcaccgagaagtatgatggaagtgtcaaccccaccgagtttctccaggtctatacgaccgggattgaggccgctgggggtgacgacagggtcatggcgaatttctttcccatggccctgaagggacaggcgcggggttggctaatgaacctgccacctgcgtcggtccactcttgggaggatttatgccaacagttcactatgaactttcaaggcacttatccgcgcccaggcgaagaagcggacttgcacgcggtacagcgaggggatgatgagtcacttcgctcgtacattcagcggttttgccaagtccgcaataccataccatgcatccctgcacacgcggtgatctacgcgttcagggggggggtgtgcggcacaaccgcatgctcgaaaagatcgcttccaaagagtcccagactaccgcagagctttttcagctcgcggaccgagtggctcgcaaggaggaggcctggacctagaacccctccggttccggagtggcagcttcggccgcccccggatccgccactcagacagggcggcgtgacaggaggaggaagaagaggtcagcccataccgacgacgagggtcatgtcctcgccgtcgagggcgctccgcgggccacccgaaaggggaggcctgcgagcgacaaaaagaaggaagccgacgctccctgacctcggctacttggaagagcgaaggcggcgcgcggcccttcgagccgcgcgctaccagcagagcctgcggcgctaccatcagcgccacgtccgggcccgatcactctacgtcgacgacctcgtcctacgccgcgtccaaacgcgtgctggattgagcaagctctcaccaatgtgggagggtccgtatcgagtgatcggcgtcccccggccgggctccgttcggctggccacgggtgacggcacagagctgcctaacccgtggaacatcgaccaccctcgtcgcttctacccctatctatacaagaagggggcccgaaggcctcggaagaagaaagaaaaagttattcaagattggcgggggcctgggggctcactccgacgcgcccgggtcaccagccttgtcgtcgctgtcgtccgcaccaccgtcaccgccctcctcgtcggagtcgagggcgaacgcgagccgaggggccgtaccctcgaagctgtggacgatgtggtcggcggcgtcccggacctgcgcgcgtgcgccgtcctcagttccggaagggaactcttccagcgctgcccacggggagaagtcagggtccgagaggcccccaagccgaacggcggcccaaggcccccgacggccggagctggccctctgcctgcttgttcgacggtgccaggcgcccccgacccccaggatggccccgaggccactgcgggaaggccgcgcctgtcgccctccgaccccgaggtcgtcggcgcagaagccgagggcgccccgcgctgcctctcggaggaagagcgccctggagatgcggcccctagcgaagaggatcggccccgccgaaaggtgcagcggcccgtctactttgttagcaaggccctccgggacgccaaaacccgataccctcaggcccagaagatgctatacgctattctgatggctccgagaaaagcaccatcaccatatctccaggcgaagcaaatcggctcgcccagattcgtgcgctgctcaggtaatgtggcagtcttgaagagaccgcccattattgacagccaagttaccattaccgatgtgcatggtttgagaccgttgggtttttgcccaaccatggagaccggtcccacctgtcaccaggctttaggagtggcgtcatgcccgaccgcttcccttgagaagggcgatcgccctggcataacgccgggggctactgtcggtgatatgggaccgggagtatcgtgaccagaggcttgaggcagacgcaatcgcccacgtggcctggcaccttcggggacgtcgggcccgagggtgaggtgtccgccctcctcctgatttcccccgagggggggggggtcgggttgcgcttgccccggccccgagggccgaggcaccccgaccccttaaggaagtcagtcagatcacgggttaggtggcgactggcggtctgacgcacgccttgccccatcccgtcaagacgaaagcctctaggcactcgtctcaagccggagctagcgtgtaatctgcttcccagcggcccgaacctgtatacgtctcctgcgtctcgcgttacttttgggttcgcgatctttccacataccgagagagcttgggatttcaccctaagcccccggccgaactggcaaaggggggcctgcgcggtctcccggtgaggagccacgagctccgtcatgcttcccagcggcccgaacctgtatacgtctcctgcgtctcgcgttacttttgggttcgcgatctttccacatacagcgagagcttgggatttcaccctaagcccccggtcgaaccggcaaaggggggcctgcgcggtctcccggtgaggagccacgagctccgtcatgcttcccagcggcccgaacctgtatacgtctcctgcgtctcgcgttacttttgggttcgcgatctttccacataccgagagagcttgggatttcaccctaagcccccggtcgaactggcaaaggggggcctgcgcggtctcccggtgaggagccacgagctccgtcat

SEQ ID NO: 54034 - DNA, 138 bp, Oryza sativa
  Clone ID: PAT_MRT4530_56177C.1
gcacgaggcctcacttccctgggttatatacacgccccccatgtgtgcttccttccatcccatgtgtgctaggttagctagctgatcgattagcctcgtcagctacaagtgatcgatcgatcgatgtcgtggtggatg

SEQ ID NO: 54035 - DNA, 1070 bp, Oryza sativa
  Clone ID: PAT_MRT4530_56178C.1
atgccgagcccgctgaagcgccgcatcccaggccgcctcggccgcctcctcgcctccctccgcccgccctcccgcgcgggccctctccccgtccagaccggcttccccacctccctcgccgacctcctcgtcaagaaccatgaccgcctcctcctcaccaagcccaggcgccgccgccgcccgaccccgccgacgacgacgaccgctacggcctccgttgccgccgccgacgtcgagacaccgctgcccagtgggcgggaggagctcgaggaggagaaggttggcggcgtcgctgtcaggctccgcccggagctcctcggcgtcggcgcggcggcggcgctcgcgctgatggtgatctggagcaggtggttggtggcggccgtcaccgtcgcctcgctgtcgctgttctggatcgagtccgtcaggtcctcctcctcccgcctccggccacggccacggtcaactcccgcggcggagaccgccgctgagctgccggatttgcgcggccgcggcgtcgtctcaccgatccgggaggcggcggcagcgacgcccaggccgagctccgccgattccgacgtggggagcgaggtctccgtctcctccatttggaccgacggcgacgagatgagccagctcgtcgtcggcgattcgacgaccaatcccaccaagaggaaggagaagaggaggtggctgaggaagctaatcgccaagaggaaggagaagaaggattcctcggtggtctccccctcccacggcgaggttgtcggcaacgccgccgccgagcagcagcagcagccgtcaacgtcggcggagccgatcatggcggaggcgtcgccggcggatggtcgacgaggaggcgcattgcccgtcgcggcgttcgtcccggtcgtcctcgtaggcctcgtcggcgggaagctcccggcggtggcgctgaccgtgatcttcgccgtgttcttcagctcagtggagaggagatcaccagcttaggctctagtgatgatgaactcatctcaccatcagttcaggtttctgaatttttttcaagaaatcaatccgaaagcttccccctc

SEQ ID NO: 54036 - DNA, 462 bp, Oryza sativa
  Clone ID: PAT_MRT4530_56179C.1
atgtgtggtggagtggtgacagggatcctctccggttcatcaacaatgatgcccctggcttgcggatggtgccgatatgggggctttccccagttcgtggatggcggtgcaattagggcttctccccggtttgctgatggtgatggtggggctccattcctgagggtggtgacagggtgcttgaccatgggactaggcgaggaggtgatagggtggtatggcaacgactgggctaagcaggggagcatcgaggtagcgagcggccgggtgagcgagccgggtgagcgcctagatccggtcgcgtggtgccaagggcagcggtcatggacacgtttacatggattggacggcggaaatgctactgggcgggcgagcgccctcgctcgcccagagcgatcggaaaagaaggggaggaggaaggggagaaaggagggggggccgatcgctggatcgctcgcttag

SEQ ID NO: 54037 - DNA, 530 bp, Oryza sativa
  unsure (1)..(530): unsure at all n locations
  Clone ID: PAT_MRT4530_5617C.1
ccagcagcagcggcaaagcagccttcgagagatcgaagcaaggcaaccgccatggccaccgtcngcgccgccgcggcgacctccgtcgttgcccgcgccgtcctcgccgggccacttgggctgccgcanattaaggcgaagaagaacganagggtgaggtgcaactactccnaggangcggcgacaccggcggcggccgtcnagggagccggcgcgtccctnctggcgattgcggcgacagcggcgcccncgatggcgctcgtccaccaaangatntctaccgagggcaccgggctcnncctccggctgagcaacaacctnctggggtggatcctgctccgggtgttcggcctcatctggtcnctctacaccatctncacctccnacctccaaggggggccggttcccnattccccnatantgantcctnttacaattcactggccgtcnttttacaacntcctgactgggaaaacctggccttnccccacttnatccccttgcacacatccccctttcccactggcgtt

SEQ ID NO: 54038 - DNA, 261 bp, Oryza sativa
  unsure (1)..(261): unsure at all n locations
  Clone ID: PAT_MRT4530_56180C.1
attgaattgatggatatattttcactattaattcaattagtcatggtttctaaaaggtgagctttaaaatactataatannattttaacttttaactctatgacaggggctaacataatattatagtattttagcccctgtcatagagttaaaagttaaaataataactagttacgattaggattttttttagttctactnagaggaagaccaacacaaggatacccaagagggacgctatacattatagatccccccccc

SEQ ID NO: 54039 - DNA, 146 bp, Oryza sativa
  Clone ID: PAT_MRT4530_56181C.1
gagtccggtccgattcggtgccagcgtcgtgtctctctctccttctcgagacagcaacgcgcgcgcaagggacggggagcagactcggctgtctcctcgccggactcctcgcttcttgccgccggcgcgtttggccgcgagcgcgg

SEQ ID NO: 54040 - DNA, 393 bp, Oryza sativa
  Clone ID: PAT_MRT4530_56182C.1
atggcgctaggtttccgggagagaaagaggaggtcgggcgggaggaggacaacgacccggcgcgtgggacccatgcgggcgcgccgtcagcgcacgcacgtgcgtggcacgggcaggagggcgccgcttggcttgggcccggaggcggcccaggaggagaggagggagaggcagcccgggagggagagggaggaggagggagctgggctgaggggaaggagggaggggagggtcggcccagaaggaggaggagagacagaaggaaacaaagacttggttgttgatcaggagttgctactatgctgcatatctcaaagatacaggtgcagggagaagaaagcacatgaaagtatggagaatttatttttggtggtaatatggaatattgcttag

SEQ ID NO: 54041 - DNA, 1227 bp, Oryza sativa
  Clone ID: PAT_MRT4530_56183C.1
ctagtcacgatactcccggtcccatgtcaccgacaccaccggcggccggcgccgcctcctccctctgccgccgacgcgagtacgccgcccccccgtcgtcgccgccgccacgaggccgctgcagccaccgaagctggtgatcttgagcaccacctcgtgggcgatggggttcaagaactcgcgcgagccggcaaccgcggcgacggcgctgcgtcgccgccgccggcgaaacggccccgcgcgggtgggcgccgcggcgttgggcgcggaggcggagccggggccgggcgccgcggtggtgggcacggaggtggaggcggggcggggttgggcgccgcggcggtggccgcggaggtggaggcagggccgggcgccgtggaggtggactctggcggactcggagccccggcttgctcccgcgccgcatcctccctctctccgtgtgctcgctgtcgacgtccccacctcctccctcttcgcgcgcgcacgctgccggagctcgcgcaggtgtacgtcgtcgtcggccgcgacgtgggtgacgaggatgatgttggaagcggattcgagagggccgcagcaatgaccgccgtgtcgtccaatcgtcgccgatgggagcacggcgagtgcccagatgtagaaaccatggatggcgtcgaggacgcacatcttcagagacaggatgtgttcgcatgaggagaggtcgtagttcactggtgagtcggtagcctcgtcgccgtcgtatggcggcgccacacccaccaagcagctggatagcttcgtcatgacaggggagagctgaccggcgaggaactgcaacgtcatgaggcgcggcagctcatcaggcgctggatgtgccgctttcagcgcggcgaccctgagcgcgacctggatggggagcggcggcgtcgacgactctgcgccgctcggcctcatcgtcgtcggcggcttcgggtgggggcgccacaccaccggcttcttgtcgctcgtccgcggcgggggcgccgcgccgccggcttctcgtcgcttgttcgctgggccgcggccggaccggagtggcgagtgtcgacgacgacgaggcatgcgaactggtgagcggtgcggacctctcctccgcctcccccgccggccgcagccgcgcgccgccatcgccgacgcccgacggcagcgacttgatggcggcgtcgtcgagtcgatttccgcatgatggccgcaaccgcacgccgccat

SEQ ID NO: 54042 - DNA, 249 bp, Oryza sativa
  Clone ID: PAT_MRT4530_56184C.1
gtgccgccgcgccgccgccctcggtgccgccgcgccgcaccgtgtgccgcgccgggtgtcgctgtcgccttgcgccgccgtcgaacccgagggagttgcggatccaagtgaaggctaagacctgcaagactttgagcaggcaagtcatcactattctttgaacatgttgatcccaattgcgaaattattttgtttacaaataaaatcgcatgcaatgatgaacatcctacttgtgagtatgccatgcct

SEQ ID NO: 54043 - DNA, 357 bp, Oryza sativa
  Clone ID: PAT_MRT4530_56185C.1
gtcctgctggatacaggtgtgcccaagatgggctccatcgcatcaacgaagcatggctggacgtctatcgtctcggataagtacaggtaccagagctgaggcaggtaccctctctgggtgcacaccagcgtgatgttttatgagcgcgatgagacggagaacaacactgtgtttggtgtggacctgtgcgcgcacgtgattatgattgactttatcgagcaggacgatcttaagaagacacaagctcatatggacccagctggttgatccctcattctcatgcctcatgatctggctattctcactgtccagttgatcatgatcgacacgaactgaggtgtgactgcctcacgttgg

SEQ ID NO: 54044 - DNA, 1044 bp, Oryza sativa
  unsure (1)..(1044): unsure at all n locations
  Clone ID: PAT_MRT4530_56186C.1
atatgcacaacattcataccaattaatgtttagtttctaacatgcatctagcctagcatttttcttcttcttcttcttcttcttcttcttcttcttcttcttcttcttcttcttcttcttcttcttcttcttcttcttcttcttcttcaaagcacattgcaaacacaggcttagcttgcatatatacatttttttgtngccatggctatgcatcatatgcatgatgtttttgcacagacgacgagcatcatcggccatgaagaagaagaagtaaccattgacccgaccaagtggggcgcatgggctcatcgtggccaccgtctctgggcatccatgtcggaggatttctggatacacgtctacaaggtgcagcggtgcccgcggtcgtccagccacgactggacgtcgtgcccctacgcgcacaagggcgagcgcgcgcggcggcgcgacacgcggcgcttcgcgtacgccgccgtgtcgtgcccggactaccgcccgcgcgaggcggcgccgggcgccgtgcccagctgcgcccacggcctccgttgccgctacgcccatggtgtcttcgagctatggctgcacccgtcccgcttccgcacgcgcatgtgctccgccggcacgcggtgccctcgccggatctgcttctttgcccactccgccgccgagcttagggacgatcccaactccattgcgtcagccatcctcacaccgatgccaatgccgatgccgatgtcgataccgatgcggactcctgatgctgatcatcatcccagggtttctgctatgcgtgatcagcttgatctaatcgaagaggccatgagaaataggcttcgcttgtattctaatgctaatgctaatgctaatgttggttcttcttctgctaccgctgttgctaccaccaccataccggtgtcaacattggcaaatggtgagggttcaactggaaaaaggtgtggttgccgccgttgtgtggaggaggaagacgctttgctcaatggctacccacattatgatctcatcatggacttggtggatgaatag

SEQ ID NO: 54045 - DNA, 180 bp, Oryza sativa
  Clone ID: PAT_MRT4530_56187C.1
atgaggaggggtcgggtagaaggaggaggaggaagaaaggacaaagtcctgggcccaccatcccaggccggtcagaccggctatatgcggccggtcaaacctccggggtgcggtcggtcagactgggccctagaggctggtcagaccgccgctaccaggccggtcagaccgcgcatatag

SEQ ID NO: 54046 - DNA, 147 bp, Oryza sativa
  Clone ID: PAT_MRT4530_56188C.1
atgtggcagttgcaatggctagaaggcccatcgccgtcgtccacggggctttacgtgggagtccagctggatggtgcagctcacagtggttcacctcaccaaggggcgaatgtcgaactcggcaagaaattgagggacctaaagtga

SEQ ID NO: 54047 - DNA, 216 bp, Oryza sativa
  Clone ID: PAT_MRT4530_56189C.1
acgtttacttgaacgagaaggaacagggcgggcactgggggttgaatgcatagcccaccaccagcggggagagagtatatgacagtctgaacggacactgacacgacggtaccaagctgaactggggacgatctgagaaagaacacttgtgaagcaaagagacagaccgtcgcagagtgaaccagacgctgaaaatgtataacttgatccatagga

SEQ ID NO: 54048 - DNA, 1309 bp, Oryza sativa
  Clone ID: PAT_MRT4530_5618C.1
atggcggaggcggccaccggtgcaactgacacgtcactgccgccgccgccgccgcacgtcgtcctgatggccagccccggcgccggccacctcatcccgctggccgagttggcgaggcggctcgtgtccgaccacggcttcgcggtcaccgtcgtcacgatcgccagcctctccgacccggccaccgacgccgccgtgctctcctcgctgccggcctccgtggccaccgccgtgctcccgcccgtcgccctcgacgacctcccggcggacatcggcttcggctccgtgatcatcagcttcatctccgtcgtgcgcagcgtcgtggagctccacgacggcgccgccgccggcgagtaccgtgacctcccggacccgctcgtgctccccggatgcgcgccgctccgccacggcgacatccccgacgggttccgggattctgccgatccggtctacgcctacgtgctcgaggaggggcggcgatacggcggcgccgacggcttcttggtgaacagtttcccggagatggagccgggcgccgcggaagcgttcaggcgagacggggagaacggcgcgttcccgccggtgtacctcgtcgggccgttcgtccggccaaggtccgacgaggacgccgacgagtcggcgtgcttggagtggctggaccgccagccggcggggtcggtggtgtacgtctccttcggctccggcggcgcgctgtccgtggagcagacgcgcgagctcgccgccgggctggagatgagcggccacaggttcctctgggtggtgcgcatgccaagaaagggcgggctcctttcctccatgggcgccagctacggcaacccgatggacttcctccccgagggcttcgtggagaggacgaacgggcggggcctcgccgtggcgtcgtgggcgccgcaggtgcgcgtgctggcgcacccggcgacggcggcgttcgtgtcgcactgcgggtggaactcggcgctggagagcgtgtcctccggcgtgccgatgatcgcgtggccgctgcacgccgagcagaagatgaacgcggccatcctgacggaggtagccggggtggcgctacgtccggtggcacacggcggcgcccggcggcgtggtgtcgcggaaggaggtcgcggcagcggtgaaggagctcatggatccaggggagaaggggagcgccgtgcgtcgccgggcgagggagctgcaggcggcggcggcggcgagggcgtggtcgccggacggggcgtcgcgccgcgcgctcgaggaggtggccggcaagtggaagaacgccgtgcgtgaggatcgttga

SEQ ID NO: 54049 - DNA, 697 bp, Oryza sativa
  unsure (1)..(697): unsure at all n locations
  Clone ID: PAT_MRT4530_56190C.1
ctagtggatccggccgggccttgcttgtttttttctcaactcgatccatctctctctctctctcgatctctccattaatttctacgtaagcattcgtagctatggaggagtgcaagggcggtggcatgtcgccgtcctcctccatggatagcagcacccacccggcgctgtccacgacgtcgtcggcggcgacggcgaggcgggacctcagcaccgatctccggctagggcttagcctctcgacgtcgtcgtcgtcctccctcctgcaggccgccgccgccgccgccgctgctgatgatagcatcccttctactccaaggttattagatttctttctttcttagtttcttgccgcgaagcctgctttttgattaattacctctccctagctacaaagattcatgctgtttagtttgataagttttgtttcgtttcttctttcgattcaatattgaaacacatatagctttgttcttcatttaaaatatattcgaacatatatacatactccgatatgtaattatactagnttttgatgttctatgttcttctatctatcgatcttggtttgttttagggaaaaatctccgtttctttatacgaatccatcgtgcatgcttctcatgtatatgtagtccgatggggcttatgtaagttttttaagttttaaggggaaaaaaaactttatctgagtttt

SEQ ID NO: 54050 - DNA, 400 bp, Oryza sativa
  Clone ID: PAT_MRT4530_56191C.1
tcgttcgaagacacggacgcgacggcgggggcggagcgcggcgcgacccagaggcgacggctacggcgacggcgacggcatagctctcttctccggccgccaccttctctccagttccatgaaatcgactggtagggaaattccagataatttattcgatggtagtaattgtctgaagttcctgaagatttattgcttcagacagcatgacgaaagtcagggcatcattatagtgtctcctgctgctcagctcattccactcataaacctgtttagtttgtgatgtatctgagttacaaaaaatgtgtttaaactgagtgctcccacacagtgaaatgtgtgatatttgatactgtcgaaaacaacacctacctgaacaacgacgcgcacctacattagg

SEQ ID NO: 54051 - DNA, 348 bp, Oryza sativa
  Clone ID: PAT_MRT4530_56192C.1
atgatgaacgactacgaggcgagatccaacatcggggccattgctaactgctggcgaaaagatgccgcacagtttctgaaccttttgattgattctcgtcctacacgcttgaaggcggactatgcgtctatgccctacgcggctacgcctcgatcaccgagagcgatcgatcgatcgcgggagcaccgcaccggcgttgcacggcctcgtgagatgagatcatgcatgcaggattcacccgtagaccacacaaatcgggcccgcaccgacgagccagcccccgccggcgtggaccattgtccgccactccacccgatcacagaaaacacacgcgcgtttctgccataa

SEQ ID NO: 54052 - DNA, 678 bp, Oryza sativa
  Clone ID: PAT_MRT4530_56193C.1
taggccaatcacccgttgccccttatcctgggtgaaaagaaaaaccaccctgggcacccaataccatacccctctccccgcgctttggccgattcattaatcgcaccctggcacgacagtttcccagactggataatcaggtcaagtgagcccaacgcaattaatgtgagtacgctcactcattaggcaccccaggcatttacacttttattccttccggctcgtattttttttggaattcgtgaccggtataacaatttcacaacaaggaaacagctatgaccatgattacgcacaagctcttaatacgactcactatagggaaagctgtacgcctgcaggtaccgtccaggaattcccagggtcagacagaagttcatcacgccctggtgcaggttcacaggtttcattggacaggcacgaggtagacacaggggtggtctgcacacgtttgccctggcgcgcgagttgggtgtacttgaggtagacccgctcgtcggcgtcgaagtaggcgtagaccttgtcggtggaaaccacgctggtcagcggggtgacatcggcggtgacgatgttgccggcggtgatttcggcacggctgacgcgccgctctagaggatccaagcttacgtacgcgtgcatgcgacgtcatagctcttctatagtcacgtaatcatcatg

SEQ ID NO: 54053 - DNA, 7182 bp, Oryza sativa
  Clone ID: PAT_MRT4530_56194C.1
gtcatatggcagagggttggtgccctgctgctaggggctcagttccgcctgcctgtcccgggtatcccggccgtaggtgggattgggtcggtactcttgtctaaggctaggatgggttggaaactatgtcacgtcttccgtccgtataccgtggtgatggataatactggtaacaaaggctatgggaatgatggatccgatgactcaagaacccaagccaatgggaatgagagaagcatcaacgaaacctcaccagagctaatccaagttgtggttaaccaaaccaacatgttggcaacagcctttcaactattacagaattggaacaacccagcaggggcaaccaacgttcaagtgcctacagtccagcaacagtgcaagttatcagaatttctcaaaactgagcctccaacctttgccattgccgtcgatcctatggaagccagtgattggttgcgcacaatcgagaagaagctagggttgattcagtgcaccgaccaggagcgggttggcttcgcaactcatcagctggttggaccggcttcagagtggtgggatagctacgaggcatcacggccagaaggacataccatcacctggaacgagttttcctctgtattcaggagatcacatgttcccgcgggaatgatcacactaagaaaacgagagtttcgctacctgaagcaaggggatttgaccgtcacagagtacctgcacgagttctatcgtttggctcactatgcaccagaagatgtggaaacggatgaagacaaacaagagaagtttctccaggggttaaaagatgaacttgcagtgcaactactcctagaggattatgaagattttgagaaacttgtggacaaagccatgcaactcgaaagtgagcataatcgaatgacgaactgcaagagaaggattgtcaacatcccagtaattccatgtggtaaccaaaggcagcgcactgagccacttcagatcaccgggtcttctgttgtgcatcaagagttcctgctccaagaagacggacgcgatgcagacaacaacactagcaatactaatgatgatgataccaccaacaaccatggttcttgccccattagtgaccactcgaataaagcgtgcaatgtcagtagcattcaccaagatgtcaatgatagtatcaatgttggaacccagaatgacaaccttagcaattttgacactgagaaagactccaatggtgatagcaactatggtaccactgatgccaatgttagcaaggatttccaaccaccgattccaactccaagtcagaatgatcgtcctcagacggatagctcagcaaagaagacgttgatttgctacaattgcaaagaaccagggcattactcgagggactgcctgcaaccaaggcaaaatcgacctccacattaccgccaatttacaagaatcagacatcccaatcgtattgtggtcactggagcaaacaccgtacccgtttcactgaaaggcagcaagccaaaggacctcatcgtccccagaagcgtccgcaatccacgacatgaagtgggtaacttgtatgaggttgactccaaagatatgaactatgcaaagttctggaactgaatccccatcttcaagtgccgcaacccagtcgaagtcagctaaaggttcaaccagggataagtcaggtgaagagaagattccatctgcaccccgcgcgcgcgcgccgctgacaggcgggcccgcccgccactctcgctgacgggtgggacccacctgtcatctccctccccgcgccgcgcccgccgccgcccgtgccctagcgccgccgccgccgccgaatccgccgcttcccgccttccccgcgcgccataaagaggggcgaattactccccgcgtttccctctcccgattccccctcttttccctctctctctccctcggattcgtccgatttgaatcccgcaatcatcgccggcgtcttcaatggcggccgagatctccgcgcgcgattccttcctccccggccgccttctctcccttccgacgctataaaatcgtccctcgtgcttcgctcttccgtttccgccgctcgccgctcgctctcgccgtcggtttcgtgcccgcgccgtgctcctctctctccgccgtcgccgccgagctccgtttcgccgccgtcgtcgctccggtcctcctcccgactcggcgccacctccatcggcttcgccgagtggttgccgaccccgtccgccgctccgcttcgcccgccgaccgccggagcaccgtcgtcatcgtcatcccgaaccgcgccgccgctttcctccgctccggccgccgttctcgtcgtcgtcgttgtcccggggtgagccgaagaccgccgttcgctttcccccttccctccgctctctcgggcgccgctccaccgcgccgatggtcgccggcggtgaccatcggggcgcgggctcggcagctcccgtcggccgtgccggcgaggccgccttcgggcgcgccctcgcggctgccaggtgggcccggccgtcagccgcccgcgcccgcgggtgcggctgacgcgcgggacccacggcgccgaccgccgccagccgcgtgcgcccggtccaccgtggaccgagcggctgacgcgtgggcccccacccccgtggacccgatgccgcgctacaagcctgagtacttgtttggtgttgaggggtttgtccaggagttgcgtacgatgtcctttgtcataggatttgggactgcccctttttatgcccagattcctcatgatcgtcacgaagaaaagtgccgagtcaaagtcaccctaaacagtaatagtgaagatatcccctcagtgatgttcgaagctggaggaagaaactacattcatgcatgtcaggaggtggcaaggatcgccataggagagctccgtgatcgctacagtgatcagttggccgacactgagtatcgctaccatccttgccaaccccagggaagtgaccgtggcagttaccttgagactgagggaattgagaatgatgctaccacaaggcatttggttgagatgctgtgggctatggatgaaacccgtgcggagattgtgttagcagctcaagatcgtgaagaccggaatcgtggtaagatttgcaagctagaggacaaagtggattgtttggagaaggaactagccgcattgaagggagaagcaccaccgcagaaggccaggattcgtcttaccgcaaggaagagagctctatttgtccctcgctaccaattggcgccaaaagtccgtgtggtggagaaagaagttaccccagccctagcggatcctccgatggtgctcactcgcagcaacgggaatggccccaataacaacaacaataacaacaacaatggagagaatcccacacttgcccaagtcctggctcaacaggcacagcttatgaacatgatgatgcagcaacttcagaaccagcagaaccagctcaaccaagggaacaacaatgctccaccgccgcagaacaagttagcagaatttcttcgttgcactgatcaggagaaagtctcatttgcatcacaccagttgcatggccctgcctctgaatggtgggatcacttccgcttgaataggactactgctgaacctatcacttggcttgaattcaccgctgctttccggaagacgcatataccatcgggagtggtgtctctcaagaagaaggaattcaggtcgctcactcagggttctcgctctgtcactgagtatctgcacgagttcaatcgtctggctcgttatgctccggaagatgtgcgcaatgatgaagagcgccaggagaagttcttggaaggacttaatgatgagctttcttacccactcatgacgggggaatatcatgatttccagaagttggtggataaggctattcgccaggaagacaagtacaaccgcatggagcaaaagaaacgccggattgctcaattcaaggcacaacaggggaatagtcaaaggccgcgtcttactttgggaccccagtccatgccacagggaggttcttcgtctgttgttcgtccgcagcgtcagatcttcaacaacaatactggcaacaacatccgcaatcaagctccacgccctgttgcggttttgacacagcaacaacctgctaagagggagcaaggcagcaagcccgtggtgtgtttcaactgtggagacctaggacattacgctgataagtgtccgaagccccgacgcgtgaaggttgtccctacccagagcaactctaccgtaccagcatcaaaggctcgtgtcaatcatgttgctgctgcagaagctcaagatgctccagatgtgattttgggtacgttccttgttaacttagttcctgcaacagtgcttttcgattctggtgctacacattcattcttatctatgagttttgcgggaaatcatgggatggaagtagaagatcttagacgtcctttgatggttagtaccccaagtaatcaagcactctctttgcaacgtagcccctctgtcagaatagaaattcaaggagtaccatttctggccaatcttatcctgttagaatccaaagaccttgatgtcatcctagggatggactggttagccagacataaaggtgtgatagactgtgccaacagaaaagtaactctcaccagcaatgatggtcgcgttgtaactgttcatgcattgtcttctgagtctttaaggtcaagactgaaccaaataactttggaagagattcctatagtccgggagtatcccgatgtgttcccagacgatttacctggtatgccgcctaaaagggatatagagttcagaatagatttggtaccaggaacaactccgatccataagagaccttatagaatggcagccaatgagttggcagaagtcaagaggcaagtagacgatttgcttcagaaaggatacatcagaccgagttcatctccatggggagctccagttatttttgtggaaaagaaagaccatacccagaggatgtgtgtggactatcgtgcactaaatgatgtgactatcaagaataagtatccgctacctagaattgatgatttgtttgatcagcttaaaggtgccaccgttttctccaagatagatcttcggtcagggtatcaccagttgaggattaaagaggaagatatacctaagacagcttttaccactaggtatgggttgtttgaatgtactgttatgtcttttggacttaccaatgcccccgctttcttcatgaacttgatgaataaggtgtttatggaatacctagacaagtttgtggtggtctttattgatgacattcttatctactcccgaaccaaagaagagcatgaagaacatcttcgccttgcactagagaagctacaagaacatcaattgtatgctaagtttagaggagttgccgtcgatcctagtaatgtggaatccgtaaccaactggaaacaaccgaagatagtttcagagattcgcagtttcctaggcctcgcaggatattatcggagatttatagagaatttctccaagattgataagcccatgacacggctgcttcagaaagaggtggagtacaagtggtcagaagaatgtgtcacgaccggaaataacccaacgggctttcctgacgtgcgtgcattaatccttgtcccaggaggcaagactgagctacaaactaagccttacccactagacatgtggaagtacggtagtgctttgcaacagaggcccgagcttaatccttatattggccggggtgttacttcccacaactggcatgcacccaaatcccaccggaaaacaggttttaggggttttgaaagaggaagagagggagaacggccttccgaaccttcggcgacgaccgcgaaccacgcttctggaacctccggaacgacagaagctacgcgaagcacacaagcaaagctacaagcctataaagaagcgataacaatacataaaaagaaaaccgagtacacagagacggtccacgggttgacggaagcagatcccgtgtgtcaacctaggcgagtggccgacaaacggactccactagacaccacacgggctgcacacgtggaaaccacgcggctaccgagcgggcacactaacacggtcaccacacgcacaagcgaacgactaccgacaccggtacacgggcgagacgcggccggcacgaggcttgacgacgcggagccgaggacgaagacgacgacgggggctgcagcgaccttgacgaaacaccgaggacggacgaggacggctcgacggagggacgaacgccacaacgacccggaacgacgagaggacgacgacgacgacgaccggggccggcgaggaggcgacgagggcagccggcagcagctgcacggaggtgaggacggcgagggacacgccgcagcaatgcccacgacgatggcagcgcagccagacgacgagccgggcgagcgacgggacgtcgacgacgagaacgaacggagacgacgacgatggaccgcggagggcgagccgacgagccggggaggaggaaggggcggccgaagggacgccggcgacgaagaggatggagaggccggcgcgggcgacggcggtctccggacgaatcagagagcaggccggggtggaggtcgacgcggcgacgctgaagaaggagacggcgcggccggcccgcacctgagcggcgcggcaggggcggctggaggtggtacagtggcggcaacgccactggacgacggcgggaacgcgcctccggcggtcaccgcgcgaaacggagggcaggccggtggagaggaggcggctgcgacgctggaggaggcgacggcacggccggacggcgctcgggcgaggagggagaggcggctggaggccggccgacaccggagagagagaaggagaaggcggggagaggtgaaaatgatttttaatttcgggatgaatttatcaggacgtgacatagcggctgccgcgtggggcccggccgtcagccgcccgcgccctcgggtgcggctgacgcgtggggcccacggcgccggccggtgtgagccaggtgcactcggtccaccgtggaccgtgagactgccgcgtgggtcccactcccgtggacccggtccgcgcgccctctccccggccttgttcaccctagaataaacaaaaccccaactagtggacactctactcat

SEQ ID NO: 54054 - DNA, 207 bp, Oryza sativa
  Clone ID: PAT_MRT4530_56195C.1
atgtcgtcgtggctgaggagcgcggtgagccgggcggggcggaacggcgtggcccgcgccgtcagggggtacgccgacgccgtcgcgcaccacgccggccaggccgtcgccgacatcctccaggaccgcacggggtcagaagatagaaagaaggtgtgcaacgtcttacatgtgggtgataatgggttgtacaaagagacatcatga

SEQ ID NO: 54055 - DNA, 2105 bp, Oryza sativa
  Clone ID: PAT_MRT4530_56196C.1
gtttggcatacaattgatgttcccgcaactttcccaacaccagacggagatggtgctgatggtcttcctctgattgtgagtataccagaatagagagactagagggttttcacaaatacaaaggatttttatttcgaaaatactgctatggcttgggatctacggctcgtcctagggtcaagggtggctctgataccaacttgtcacgaccggaaataacccaacgggcgttccttacgtgcgtgtattattccttgtcccaggaggcaaggcccagcacacacaaagacaaacgagaaacagcggaagactagggcgacgaccacaggcacttgacggcaggcacgagctagacaccaaagccttcatcttctaggggctcctcttctggggttgggaaaaattgagcaagactgagtacaaccaccgtactcaacaagacacacccacaagtgccacaagacacatcttcctcacgtgtaaccacgtgccacataccaccacggtatacagacgaaagacgtgacatagtttccaacccatcctagccatagacaagagtaccgacccaatcccacctacggccggaacccccgggacaggcaggcaggactgagcccctagcagcaggacaccggccctgtgccatgacatctcgactaccgggccgcagctcgtgtagccttcatttgtcctagagatgtccatcgacccccgacttcgtccatctccatccgtgtacttttgtttataaccagactgagccacaaactaagccttacccactagacatgtggaagtacggtagtgctttgcaacagaggcccgagcttaaaccttatagtacccgaggtacgactaaccaaacccaaccacgcacctcgagcccagcctaaaaccattttgggggttttgaatagagggggagatgtggagaacggacttccgaaccttcggcgacgaccacgaaccacgcttcgggaacctccagaacgacgaagactacgcgaagcacacaagcaaagctacaagcctataaagaagcaataacaatacataaaaagaaaaccgagtacacagagacggtccacgggtcgatggaagcggatcccgggtgtcaaccgaggcgagtggccgacaaacagagtccactagacaccacacgggctgcacacgtggaaaccacgcggctaccgagcgggcacactaacacggtcaccacgcgcacaagcgaacgactaccgacaccggtacacgggtgagacgcggccggcacgaggcttgacgacgcggaggcgaggacgaagacgacgatggggctgcagcggcacacttgacggacgcggacgacggacaagaacggcttgacggagggacgaacgccacaacgagcgaaaccgggaacgacgagaggacgacgacgacgacgaccggagccggcgaggaggcgacgagggcagccggcagcggctgcacggagacgaggacggcgtgttccacgccgctgcaatgccgacgacggaggcggcgccgcgagatgacgagccggcgaggaggaacgatgacgacgatgacgaacaccggcggggccgaaggtggtggaggtgcggccgaccggtgcacgggtgaggagggacgggcggccgaacaactccggcgaggcggatggagaggttcgcggcgatgtgcggcagcttccgggcgaaaccgaggggtggacgaggtggagggctacgtcaccgtgccgagggaggggacggcagcgccggctgacgcacgggcatggcgaaaggggttgccggaggagacgtcgacgaggaggaagggaagggcgacggcgggaacgcagctccgggggtctccgcgggaaacggagggcaagccggggaaggggaggccactgcgatgctggaggaggcgacggcgcgaccggacggcgctccggcgaggagggagaggcggctggaggcggccggcggcacgggagagagaggaggacggcggggagagggcaaaatgatttttatttcgggatgaatttatcaggacgtgatagaagctcattaggtaagatcttatttacatagttgattaattattagtta

SEQ ID NO: 54056 - DNA, 250 bp, Oryza sativa
  Clone ID: PAT_MRT4530_56197C.1
cccgaaccacttcaaagaaccaaaccagggtatatagaccaccaggtccacttcaactcctagtatttcaacacacactaatctaccccaggattactcgaatgagtccgaaagcagagacttcagagtaatgtaattgaaactagtatcgccttagagtaaaataaaccaccaccaagtatacactggttgtattctatccaatacccgtactaaataaagtacaatttctagccttacatctccacta

SEQ ID NO: 54057 - DNA, 1614 bp, Oryza sativa
  Clone ID: PAT_MRT4530_56198C.1
atgtggtcgtcgtgggcgtggacgtggagctggagcggcgcggcggccgtggccgtggcggcggcggcggcgtgggtggcggtgtacgcggcggcggcgagggcggcggaggcgctgtggtggcggccgcggcgggtggagcggcacttcgcggcgcagggggtgcgggggccggggtaccggttcttcgtggggagctcgatcgagctcgtccgcctcatggtggacgccgcctcccgccccatggagccacccacctcccacgacatcctcccccgcgtcctccccttctaccaccattggaggaagctctacggtccgatgcatttgatttggtttgggcggacgccgaggttggtggtgagcgagccggagctgatccgggaggtgctcctgacgcgggcggatcacttcgaccggtacgaggcgcacccgatgatctgccagttcgagggctacggcctcagcaacctccacggcgagcggtgggcgcgccgccgccgggtgctcacgccggcgttccacaccgagaacctcaggatgatcgcgccgttcgtcgccggcaccgtcacccgcatgctcgacgagctggcggagcgcgcgcgcgccggcggcgccggcgaggcggaggtcgacgtcgccgagtggttccagcgcgtgccgcaggaggccatcacgttcgccgcgttcggccgccggaactacgacgacggcgccgccgtgttccggctccaggacgagctcgccggctacgccaccgaggcgcacagcaaggtgtacatccccgggtacaggttcctccccacgaggaagaaccgccgcgtgtggcagctcgacagggagatcaggagccacctcgccaagttcgtcaccggcctgcagagctgcagcagcagccatggcgacgacgccgatgatggcggcgatggcggcggcggcatgagggagttcatgagcttcatggcgccggcgatgacggcgggcgagatcatcgaggagagcaagaacttcttcttcgccgggaaggagacgctgtccaacctcctcacctggaccaccgtcgcgctcgccatgcacccggagtggcaggaacgtgcccgccgcgaggtcgtcgccgtctgcggccgtggcgacctccccaccaaggaccacctccccaagctcaaaaccctcgggatgatcttgaacgagacgctgaggctgtacccgccggcggtggcgatgatacggacggcgaaggaggacgtggagctgggcgggtgcgtggtgccggcggggacggaggtgatgatcccgatcatggccgtccaccacgacgcggcggcgtggggcgacgacgccgcggagttcaacccggcgaggttcgccgccgacgacgacggcggccggcgccgccacccgatggcgttcatgccgttcggcggcggcgcgcgggtgtgcatcggccagaacatggcgctcatggaggccaaggtggcgctcgccgtcgtcctgcggcgcttcgagttccggctatcgccggcgtacgtgcacgcgcccagggtgctcatgatactcagcccgcagttcggcgcgccggtgatcttccggccgctgacgtcagccgcagcttag

SEQ ID NO: 54058 - DNA, 1461 bp, Oryza sativa
  Clone ID: PAT_MRT4530_56199C.1
cacgcgtccggaccagatgaggaaccaacaattaccatttaaaactccataaaatacaaaaagggaagggatagtacgtactttgctgaagagatggcagctcctttgttgttatcaacaatcattttggctctagtggtggtagcatcctctactcatggtaccatggccaatggggtattccaggtgcgccgcaaattccatatcgtggacggtgtgtacaaggggagcgacataggtgcattacaaacccatgatgagaaccgccatcgtcgccgtaaccttatggctgcagagctcccacttggtggcttcaacatcccatacggcactgggctatactacacggatatagggatcgggacacccgccgtgaagtactatgtgcagttggacaccggtagtaaggcattttgggttaatggcatctcctgcaagcaatgccctcacgagagcgacatattgagaaagctgacattttatgaccctaggagctcagtaagttcaaaagaggtgaaatgtgacgatacaatatgcacttcgcgaccaccatgcaacatgaccttacgttgtccgtacatcacggggtacgctgatggtggcttaacaatgggcatccttttcactgatcttctgcactatcatcaactgtatgggaatgggcagactcagccaaccagcaccagtgtcacatttgggtgtggtttacaacaatctggaagtttaaacaattcagcagtagcgattgatggaattattggttttggcaattctaatcagactgcgctatcacaattggctgcagcagggaagacaaagaaaatattttctcattgccttgattccacaaatggaggtggaattttcgctataggagaagtggtggagccaaaagtaaaaacaacacctatagtaaagaataatgaggtatatcaccttgtgaacctcaagtcgatcaatgttgctggcacaacacttcagcttcctgccaatatttttggaacgaccaaaacaaagggtacattcattgatagcggttcaaccttggtgtaccttccagagattatatattcagaactaatacttgcggtatttgccaagcatccggatataaccatgggtgctatgtataattttcaatgttttcattttcttggaagtgttgatgataaatttccaaagataactttccattttgagaatgatcttaccctggacgtgtatccatatgattaccttcttgaatatgagggtaaccagtattgctttggattccaagatgctggaatacatggatacaaggatatgatcattttgggagacatggtcatctcaaataaggtggtcgtctatgacatggaaaagcaagccattggctggacagagcacaactcggttgaggaggcatgtggcggtagcgagggcctcagcccaataggaaggatgcatggaggcttgtag

SEQ ID NO: 54059 - DNA, 1318 bp, Oryza sativa
  Clone ID: PAT_MRT4530_5619C.1
caacattcatggctgctctattcaaagctgtggcatggagtacgagaggatacacaaagttcagatgggagtgatgtctccaaccaagctgaggatgaagctgctgggatcccatggcggcagcatcggcagggttgacgaggcaaagaagtcgccgcgagcgtcgccggcgaggctcgacgccgacgaggacgacgacgaccaccccaagaacagcctcctgccccaagaactcgacgaagattatcccaaggaccagtcggattcttctcgctcgcgctccgacgcgagccatgggagagctggcaatggctacgacagcggcggcttcgagttctacagggaggagaggccgccgccaccgccgccggcggcggtggcggtggtcggcgggacgttcttcaggcaggtgccgtcaaagtggaacgacgccgagaagtggctcgccgggagacacgtcgtgcactccaacccaatcttctccaagaaggccgccgccgcagcagcggccgtgtccggccgcgttgcgccggaggcctcggcgtcgtcgtcgccgccgtcggtggcgagcaggcagcgccagcagaagaggctccgcgtgtcgtcggaggcggcggcggtgtcgatgcgggacgtggggacggagatgacgccgatggcgagcaaggagcagtcgcggagcggcacgcccgccggcgccgccacgccgtcgctgagtccgctctgctcggtgccgacgagcccgaggggcgccgcgtccgcgtcgtcggcgtcgtcggagcgggagctccagatcaggacgcgccgcgagatcgccgcgctcgggctgcagctgggcaagatgaacatcgcgtcgtgggccagcaaggacgacgacgacgagctcccccgcgcctcgccggagaagagaccgagaccgagaccgagacctcactccggcgacggcggcggcgaggccaagaaaagggagttcgaggcgcgcgccatggcgtggcaggagacgcacaagtgcaagctcgcgttgaggtttcagaggaaggaggtgaagattcaggaatgggagagctgccagaaggccaaattcgaagccaagatgaggcacgcagaggtgcaggcagagcagatgaaggcgagggcgaagcagaagctgagcaggaggctgtcggcgttgagccacaaggcggaggggaagcaggcgagggtggaggctcgccggagccggcaggcggcgcggctggcccgccaggtgcaccgcatccgggagaccggcgccgcgccgtcgcgcctccgccgctgctgcagctggctgttcctctga

SEQ ID NO: 54060 - DNA, 351 bp, Oryza sativa
  Clone ID: PAT_MRT4530_561C.1
atggaccttaactttcagggcagcggcacacgatatgcaatccttttgccaaggtggctttcagagatgggcgaatgcaaactttcagctagcatggacaactacgttggcgccaagaccagtcacacatgcttaatttgggtgcaccgtgcacctactctctatgaccatcaaggtgcagagaaatgcaaggccaacaagaaatttcttcatgtggatggcatcatcttcattattcttaagagtaaattgtactttgcactatgtaaattgcatcgtgtttcacttgtttttacatggactcaattgctatgtggcaccgctcctgcggtaggaatcactgacatgtag

SEQ ID NO: 54061 - DNA, 276 bp, Oryza sativa
  Clone ID: PAT_MRT4530_56200C.1
atggctgaactagtaccaatcatctcgaccaacagcagcagcattgcgctgtcgtcctcctacatctacggtggatcaatgccccatggatggatggtgcaattaaatgatgctaatcaaacacccgtagctatagctagtaaatgcaaaaaacagttatccaccatgaaaaaaggctctcatcttctgtctcctgaagaagaaaaggaagaagacgaagatggaatcgatcgaattcacaccaaaattggaagtttgattgaaattggaataatg

SEQ ID NO: 54062 - DNA, 3156 bp, Oryza sativa
  Clone ID: PAT_MRT4530_56201C.1
tcatttcttaaccacctgagacagaagatattcatctctgattgcatgcatctttgacacagcatctgctaacaacattcgatctttggcttgttgctttgagcaggatatgccaagtctaaggacagaaaccaagcagtcttgaacaatacttcgtgttatgcttgcatctgttatatctttattttttgcttcttcatgtagccagattgttcgatcagctatatctaggactcggccaggaaatgctgctgatgcaaatttgtgcagatccaccgaatccttgaacatgtcatcagtagggctccttccggtaaatatctcaagcaataatatgcctaagctgtaaatatcacctagtctggagactgcagaaccttctccgtactctggtggaatataaccaatggaacctctgattccaactatgctgtctgaatgttgcagtgctttaactatactttcagggaggattcttgatatgccgaaatctccaaccttagcgctcatgtcttctgcaagaagaatattacttggtttcaggtcgcaatggatgatcggtggctgacaatggttgtgaagataatccagtgcatccaagatatcaactgcaatgccgagtctctgcgaaaggctcagtgtgttgctagaagtgggattgcctgacacgggatgaagccaaccatctaagcttccattgggcatgtactcaaaaactaatgccttgaactcgtgaccctgtggattgatacttgagcaacaggtgatgatctttataagacaacgatgtcgtactcttctcaaagcctcacattcaacctcaaaactcttggcagatcctgattgtcgaaggttgaacacttttacagccacaattgcaccttcatcttctaaagtacatctatagacggaaccataacttcctttgccaagcaaattagcttctgaaaattcattacttcctctggctaatgcataatatgaaactctatgatagtgttcatcagtacctgggattgttgctcgactattttgtctccgtttaagcttcctgcagaactgaattagaacagtagctgaaactaacagcaagattgatcctgttattggcagggcgattttaagagacttatgccaccgtttgttgtttttgcttgcatcaataatgggacatggagccaagtgaagctgaggtattccaccacacaagttgtcgttccctgcaaccgatgcgtacgtaaggttcttgaaaactccctcatctggtacttctccttgcaaattattgaatgacacatctaatttccacaacattgtcaaattttgcagagttgctgggatgggtcctgaaaaattgttctgtgctagaaatagttgttgcagattgccaatcctaccaatggtatcggggatcctaccagataacttattcatggttaggttcaggatgttgagccctttcaggttggtcaaagattgaggtatgccgccttcaaatgagtttttatctagcagtagcgattccagcacctgacaatttcctatactgtcaggtatttgaccagacaactggtttcccgacagtatcaactggtttaggttagccaaggtagcaacttctattggaaggggtccagagagagaattgtatgacaagtccaagtaccaagagagtgaaggaagctccaagatttcctttgggattgacccattaagacggttggtcgataagtccagaacaaataacgtttttagcttcccaaggcttgcagggattggcccttccaaattggtgtagtatgcgtagagcctattcaaatttgtaagatttccaattgatgatggtatgaggcctgacaagctggtgttgtacagggcaacttcaaccaaatttgatagcttcccgatgctcgctggaatcactccagataaggaagtgaaccccagatccagcgtgtccaagccaatcaaattgccaatgtcctcaggtatgctcccagagatgctattattatctaagtagagcttatggagtgtggtcgacaagttgacaacagagtttggaagttgcccgctgaaagagttgtctgagataacaagctgttgcagctgactgcagttggttagtgaagtgataaattcccaacccttcctgttatttgcctcaagtcggttgccatacaagtataatcgccgaagagatttcaaccttcccacagtaggaggcacaaatccactgaatctattaccataaaggagcacaattgtgagtgatgaaagattgaagagagaagaaggtattactccactgaattggttatccgccaatccaaagtattgtatgccagggaacttgtcaccgatgttggcaggaatgcttccttgtagcatgttgtcatttgctgcaagcaccgtcagtgttgacaggttccacagagaggacggaaatatgccggagagactgttctgctgaaaactaaattcacgtagagctgcagctttgccgaggtccagcgggatcaggccctccaggttgttgttgtccatgtacagatactgaagcaatgacaggttcgctagcgatgccggaattggcccagtgaagctgttgttttgcagctgcagcttctggagttgtgtcaatgtgttgcccagctccaccgggatgcggccgccaagctggttaaaggcgaggcccagattcttcatgctgatgcaggaactcagattggcagggagctcaccggaaaacgagttgcctccaatgtccaggatctctagacgccggaggcggccaaggctcgggggaatttctccatacagctcgtttgagctcaagtttaggctctgcaagaagctgaggttcccgatgaccggagggagcccgccggcgagattgccggagggcagcgtcagcgccgccacccgcgccggcgtccgacggtcgcacgtgacgccctcccagctgcagaaactggtgctgctgttccaggaggcgagcgcacttgagctgctccccctgaacgctgccttgaaggcaagcaacgtggcctcatcgctgctgctgctgctgccaccaccagcgacggctgcaacgatcggcgtcaggatgaggacgagggataattcaagcctcaggctcatcatgatcgtcat

SEQ ID NO: 54063 - DNA, 567 bp, Oryza sativa
  Clone ID: PAT_MRT4530_56202C.1
ccggccgggatctctctctctctctctcggagattatacttcaagcatatcagcagaatcttatctcctcgaacatcattctcacagttgctctccttcgaatagatgcatgccacgcttctgcgcagcctgcatcttcttgagggagaaggatactctatatgaactacaggcccatctcctagtactccaacaagtgctcagaccatgctcgtgaagacctaaggaaacaagatagcatagtgctaactcccttctgagaaccacctacgtctcaatggagaaacaaacaaaccctgtaggactagagctgacaacagctcaggctgagaccacaacaatctcactaccattgcattaacattgaacaggcaaaagcgcaaaatgtactactgcactaatgttagagccgtactactaatgatcagagtcaaactcaagaccaaagtctgtggacattcaacttgccatccatatgagaaatctacccgaaatactatagtgatcacacgaccattgccactgttgaaggcgaatgttactgaaatgaaacaatataataggtcc

SEQ ID NO: 54064 - DNA, 2538 bp, Oryza sativa
  unsure (1)..(2538): unsure at all n locations
  Clone ID: PAT_MRT4530_56203C.1
ttctcatcttcgcttaaaaacacaaacaaaacgaatttcacaaaaatcctcgagaaacatctcctcctcccccttctctctctcttcctcctccccccacatctcccgcgagatacgaaaccctagcgctcgcggnctgaatccgcagcagcaggcggggggcctcgccggatcaccgccgggcggcgggcggcgggcggcggcgggagatgagttccaggaagaagccgtcgaggatcgagccgttcaggcacaaggtggagacggacccgaggttcttcgagaaggcgtggaggaagctcgacgacgccatccgcgagatctacaaccacaacgccagcggcctctccttcgaggagctctacaggactgcttataatctggtacttcacaaacatgggccaaagctctatgacaaactgacagaaaacatggaagatcacctgcaagaaatgcgcgtatcgattgaggctgctcaaggtggtttgttcttggtagaactacagaggaaatgggatgaccataacaaggctttgcaaatgatcagagatatcctgatgtacatggacagggtttttattcccaccaataaaaagacacctgtatttgatcttggattggatctttggagagatactattgttcggtcacccaagatccatggaaggttgcttgacactcttcttgatctcatacatagagagagaacaggtgaggtgataaacagatccttgatgaggagtacaactaaaatgttgatggatctaggttcttctgtttatcaggatgattttgaaaggccattccttgaggtgtctgctagtttttatagtggtgagtcacaaaaattcatagagtgttgttcctgtggtgaatatcttaagaaggctcagcagcggcttgatgaagaagcggaacgtgtttcacagtacatggatgccaaaacagacgagaaaataactgctgttgtggtgaaggaaatgcttgcgaatcacatgcagaggttgattcttatggagaactcaggtcttgttaatatgcttgtggaggacaagtatgaagacctgaccatgatgtacagcttgtttcaacgtgttcccgatggtcactcgacaattaaatctgtgatgaattcacatgttaaagaaaccgggaaggatatggtaatggatcctgagaggctgaaggaccctgttgattttgtccagaggcttctaaatgagaaggataagtatgacagtattgttaccacttcctttagcaatgacaagagtttccaaaatgctctgaattcctcctttgagcacttcattaacttaaacaatagatgccctgagttcatctcgctgtatgttgacgacaaactgcgtaaaggaatgaaagaggccaatgaggaggatgttgagactgtcctggacaaagtgatgatgctgtttaggtacttgcaagaaaaagatttgtttgagaaatactacaagcaacacttggcgaagcgccttctttctgggaaggctgcttctgatgattctgagagaagtatgcttgtgaagctcaagacagaatgtggatatcagttcacttcaaaattggagggcatgttcaatgatttgaagacctctcatgataccacacagcgattttacgctggtactcctgatttgggggatgcccctactatatctgtccagatactcaccactgggtcttggcccacacaaccatgtaacacctgcaaccttcctcctgagattcttggcgtgtccgagatgtttcggggtttctaccttggtacccacaatggcaggagactgacatggcaaacaaacatgggtactgcagacatcaaagcagtgtttggaaatggcagcaagcacgagctaaacgtgtcgacctaccagatgtgtgttctcatgttgttcaactcggcggactgtttgtcttaccgtgatatcgagcagactacagcgataccatccgcggacctgaagcgctgccttcagtctctcgcgcttgtgaagggcaagaacgttctgcgcaaggaacctatgagcagggacatctccgacgatgacaacttctacgtcaacgataagttcaccagcaagctgttcaaggtgaagatcggcacggtggcgacacagaaggagtctgagccagagaagatggagacccggcagagagtcgaggaggacaggaagcctcagatcgaggcggccatcgtgaggatcatgaagtcgaggagagtgctggatcacaacagcatagtgacagaggtgacgaagcagctgcagcctcgtttcatgccgaaccctgtggtgatcaagaagagagtcgagtctctgattgagcgcgagttcttggagagggacaagacagacaggaaactgtaccggtatcttgcataattactcttttttttttcttctggattctttaacctgaccataagtaaaccgtggtctatgtatacctgttatatcacgataatgcttttggttggattaaaaaaaaaaaaaaaaaaaaaaaaaaaaaaaaaaa

SEQ ID NO: 54065 - DNA, 1181 bp, Oryza sativa
  Clone ID: PAT_MRT4530_56204C.1
cgcacgcgaagctccagacaaccgcagcactcactgccatcctgtgtctgcggaccgtacgtcctaatggacctctcgcatcccaggtactaacccagccatggacggcaaggactccaccaccacccccgcccctgccccggctccggctccggctccggcgccggcggcagagcctcagacgacggggaacgcgccgccgccgccgccgcagcagcagcagcagcagccggaggcggcgaagtgggggacgaggcagatgggcccgccggcggcgcccggggcgcacccggagaaccagcaggcggcgcggtggacggcggcgaggggcgaccaggagctcccgccctacgtcatcatgggcgaggcggcggcggcgccgccgcgggggcggccggagagaggggacagcccgatggagcacatcctcgacttcttcaacacctggagccgcaaggccgaggagctcgcctccaacatctggttcaacctgaagacggcgccgtcgatgtcggacgcggcgatggggaagctgagcctgggagcgaaggccctcagcgagggcggcttcgacaagctctacaagcagacgttcgccggcgccggcgccgacgagcggctgaggaagacgttcgcctgctacctctcgacggcgacgggccccgtcgccggcacgctgtacctgaccgaccggagcgtcgcgttctgcagcgaccggccgctctccttcgcggcgccctcggggcagacggcgtggagctactacaaggtgatgatcccggtggccaaggtcgccgccgccgagccggtgacgatgaaggagagcccgccggagaagtacgtgcacgtcgtgacggtggactcgcatgacttctggttcatggggttcgttagctatgacaaggccgtgcaccacctcgtccaggccgtctcctcccagcaacgtggcggcgccgccgctgacacggccgccgccgtccccggagacggcaagtgatgatcggatcgaacgatgagctttgtctgtttggctttgtacagtgtggctgtgtttcattacttgtattttgatgtgttttgagtatatatgcatgctttggtgtcctcctcctagttgttggcatgtatggaggacatcatttgttatactatatatactactaaaaaaaaaaaaaaaaaaa

SEQ ID NO: 54066 - DNA, 927 bp, Oryza sativa
  Clone ID: PAT_MRT4530_56205C.1
atggggggcgcctttacagcggcgcccgcactcgctctggtcttgctcgtcgccctctcggtggcggccaccgcgaatgtgggggattcatgctcgacggcggtggactgcggcggcgggcagtggtgcttcgactgccagccagagttcgccggctccagctgcgtccgctccgccgccaccaatcccttccaactcactaacaactcgttgccattcaacaagtatgcgtatctcacgacacacaattcatttgcgatcgttggggagccatcgcacactggagttccacgcatcacctttgacaaccaggaggatacagtcactgatcaattaaataacggtgtccgcgcgctgatgcttgatacatatgacttcaaaggagatgaacctgcattggacacattcaaggaaatcgaagccttccttggagccaatccatctgaaatcgtcacgttgatcctggaagactacgtgcatgcaccgaatggcctgacaaacgtgttcaaggcctctggtctgatgaatgacatggttgcgagcaaccagcgcctccttgtgttcacctccatcaggtcaaagcaggctactgaaggaatcgcataccagtggaactacatggtcgagaacaactacggagatgatggtatggatgctggcaaatgctcaaatcgtgcagaatctgcacctctgaatgacaaaaccaagtcgttagtcctggtgaactacttcccatcggtcccggtgaagactcctgtgtggatgccaggatgtcagggcttgctcgtttcggttgaccctggcggtcagaccggtcgtgtgccgctggtcagaccacaggtgttgcggcgatcagaccggccgacccgacggtctgaccggcaggatcctgtgttgcttgaggcctcgggagaatgttgtcggtga

SEQ ID NO: 54067 - DNA, 346 bp, Oryza sativa
  unsure (1)..(346): unsure at all n locations
  Clone ID: PAT_MRT4530_56206C.1
atttgcatacaggcgacaacattcatactaattggaaagggagaccgctctttgggatcgaattaactctgacctctagcagaggttgcttgtcacttagatttgtggaactgcttgcgatgaacattgctggcanagatgtacacctagcgctaataatttggggaacaaagtcttttgtgttccctgagttaaaacccttagcagaataancatgcagaagcaactctcccgtgttaaactaattattctgttgtgcagtgtaccatttacatgtgaattttggccactctgtaaacactctgctgaaatgagaaattgcttnctgaaaaaaaaaaaaaaaaaa

SEQ ID NO: 54068 - DNA, 450 bp, Oryza sativa
  Clone ID: PAT_MRT4530_56207C.1
atggctgcccacggcgaagacgacgacgacggcgacggcggcgggtgcgatggcagtggccccccgcgtggatccggcggcggcggccaccccccgcgcggatccagcggtgcgacggcggcggccgccgccccccgcgtggatccggcggcgacggccaccccccgtgcggatctagcggcggccctccgacgatggcgacgacgacaggaaggcggtgacgacgacggaaaggcgacggcgactatgggaagacgacggcgacgacgacgggaaggcagcagatctggccacggcgactgcgacgacgaccagaaggcggcggatctggccatggcgacggcgacgatgacgggaaggcggcgacggctaggacgaactgctccagacgggctgaagctccgcacgcgaaaatccgttcgaccgcacgggaaaatcttctgtgtatga

SEQ ID NO: 54069 - DNA, 492 bp, Oryza sativa
  Clone ID: PAT_MRT4530_56208C.1
aaattggggattttaaataaattaaaaggacatcaagcagcaactggcacccaggaggaagcaagactttattaaaaacattggaaccattataccattacaattcaggaccaaacaccgccaaggggggaaaagggaccgggggcaccatagggcctaggggggaaaccatatgcaggggggacggcaaaagccaacagagcctgagcccgagcccaattccgaacaaaggagagaacaccaaactgccggagttgtagctgctgggccatggcccgaacaatggtaaaggccccaaagggagaagggcgcgccaccagcgcgagccggggccaaacttgggtggtcctcaaatgaaacgcatctgaaagcaagaaggggcttgccgctataccaaacggctgcccaacaaacacaatatatgggctaaacacctgtggctggagcaagacaggcgactggagctgatattgcctataaccggacgccggg

SEQ ID NO: 54070 - DNA, 843 bp, Oryza sativa
  Clone ID: PAT_MRT4530_56209C.1
atggccgcgaacacggcgtgggccgcgtgcccgacctgcaccggcgcgccgccagacgccgccgacatctccgacccgcagcagcggcatgcaggccccgtcgagctgcctcgtcgagagcaggtgctcggcgccgatcctccgcagcgcgcgccacttgcggcgcggcgggaggacgaacacggagttggcggcgtgcccgaccccgacgccgtgccacgcggccggtttaaggtctcaatcgagacgagaagggggaataagccacaattccggcggctacggctccgtctccttcatcagggaaggaaaatgagtagctttaaggaggaaagaagtgaagggaaagttccggccacggcgattgatcccaccaacgagaaaaaaaagaggactaagatggtgcgctacactcaagaccaaattcagtactgctttgcgaactcggtggagttatctgacgacgacgaggacgattttaagctgacggaggtgctgagcaaggagtgtcttggccggatgtcgcaggagtatctagccaagttgtatgccatggaaatcgctgaagagaaggagaaggctaatctgaagaagatacaggacgtcctccgcaatgaacgagagaacatcttcaacatccgtgaaaaacccgaggacgtccttaagcagtaccacaccaaaggctatgctgagtacgaggttgtcgttgacgatgacaagggcgatgaagacaataaagttcatgcgcgagttgctccccctggccgaagaagattccggaatggggttgccatgaagaagaatcagtcaggaggaggaagtattattaggaagataaattga

SEQ ID NO: 54071 - DNA, 296 bp, Oryza sativa
  unsure (1)..(296): unsure at all n locations
  Clone ID: PAT_MRT4530_5620C.1
cgcgccgagaccgtggagncgaggaangncgtcgtgatgancgccgacnccgagctctggaacnggncggttcgccatgctcggcctcgtcgcgctcgccttcaccgagttcctcaccggctcgncgctcgtcaacgtctaatttaattaantaattaattaagctgtacgtcnaatacgtgtatgtacgtatgcgtgtactgggtagatagctanggatgtgtatgtatgcactgtagccaatagcaagcttgatagtgcttggtgtactaccttggnatttgaaaaaggnattc

SEQ ID NO: 54072 - DNA, 1881 bp, Oryza sativa
  Clone ID: PAT_MRT4530_56210C.1
atggcaacagggcggggtggggccaaatcaacccccgtccccgacccctccggggccccgcaacccgaccgggcccccgcattggatagcatctccatccaatcagaaaaaaaatacaagacattcatcaaattagcaaaaacaaaaattgcacatagtggacacaccatcaaaaatagaatgaatcgtcggcatcgtgaatcgctggctgccgccgcgcctgtcccctcgctgggcgccgcgcccttgccgcaacctcgccggccgttgcgctcctgccgcaacctcgccggccaccgcgccttgccgcacgaccgggcctatgcgccaccccgtgcgtcgtttgcactgccggagggagaggtggaggtggactcgggagggagaggtaaaggggacgggatgggaggccagaggggagaggagaggaggggagggaagagggcgaccgacgaccggcgagattcagaggtgcgccatgcgccctgcatcgcgccgccgtcgtgcgccctgcgcaacgccgccgccgtgcgtgatgtggacgggagggagatggggatgggggagactagggagaggataaggtggcgtggggagcagctgcacgggcggaagccggcggggaacaattgggcggcggtgcacgagctcctccgacttgctgaaagagcggaaggccaacgcggcgacgaggggtgcctgcgtgacttcctggagagggcgaacaaggacggcggcacaacgatggagtacagggagcgcggcgtgttcaacgcgagcgagatggtggtggagatacagagcgtggaggctatggggaacaaggacctgttcgtggaggtgcttaaggaggagacagccgctgggctgtggttgaagctggaacagatatgcatgactaaggatctgaccatagatacatggctaatcctggcaaagagcattggaaagctgttcaatggattttcagatacctacgtgatgttccatgagagaacaaagcacattgatgtgagatatcactttattcgaggtgtgattgctgaaggtgatgtcaagtatagtcctagagactatttggcgcgcggtgattttacctacatgaggtcgccgctgttgtcggtgtccatcgggctgctgctcaacaccaagtgtatcatcgagctcgtcatcctcaacattgcaaggaacaaagggatcatgagtgaccagtcgttcacggtgctcggtgctggtgttcgtgccggctctgaatcgctgatcacggcgatggtgagccctttcctcgccatggtggtgaagccgccgcggcgcctcgtgttctacaagcggcgcacggtggcgtgggctcacccggaaccagaatcggagctccgcatcctggcatgcgtccacgtgccacgtgatgtgcccgcgctactgacgctcctcgacgtggtgacgccgtccagccggtcacccgtcggcgtccacgccctccacctcatcgagttcgtcggccgctcctcctcatcaacgcatccgtgtcgtcgtcgtcctcctatgacctacgacgcctccgtccacgggctcagccacatgaagatgcagttcaagcacatctcccacgccttcgtggcgtacgaggagcaggcggtgggcgtgtcgatgcgcaccatggccgccgtcttgcgcccgtgcagctcctccccccgccgcctgcgcccggctcctccccacgcctcccgcgcccgccggcggcagcccgtgcagttgctccccactgccgcccgtggagattggagaagagaggagagaggaagagaggtggagaggggagagaaagaagaggctgacgcgtggggcccacgtgggttccacgctgagtcagctgccacatag

SEQ ID NO: 54073 - DNA, 627 bp, Oryza sativa
  Clone ID: PAT_MRT4530_56211C.1
tcagccaagccaccaaagagccacttcctccacatggccagcaccaactctttggaagagactacaacacgtcatcgttgccaagcgtcgccgcaccccaacagcgagcagctccaacttcatccgcagaagcaaccgaagagtgtgtcgtccatcatagaacgaagcagacccaagaggcttaggcctcgccgaatgccaaggaaagaaagcttttgagccgaagggaccatcaatagtcatcgatgtaaggaactttcccgaagcgatgcccccaagaaggacacgacgcgtaacgtcgtcaccgctcgtccgaggccggagcaaggttttcacctggagatttgtggggcaaatggcagagcgccatgacaacgccttcaagaagggaaacggcgccaacggcgtcgtcgtcatcgaaccggccaaaggcacggcaaggctttcaccggcgtccgactccacgctgccgagccggcctccacgccacgccgccggccgcatctccacgggccgcgccggcctccacaccaccggcctcgcctccacgctcctccacgcgccaccaccaccagagccacgcctcctatgctcccgctgccgcctgcatccccgctgccaccgcat

SEQ ID NO: 54074 - DNA, 714 bp, Oryza sativa
  Clone ID: PAT_MRT4530_56212C.1
atggcgacgaagcgcaagtgccccgccaatggcgacgacggcggcgtggccgacctcgagccggtagcaggtggttccttcgcctccccgccgccggagaagaaggccaagttgaccgtcgccgtcgccgtcgccgtcgcgccctcctcctcctcttctgctaccaccgctgccgcgggggaggcgacggccaagcgcgagcacggaggcttcttcgccttcgcgaggcccgagaacaacaccaggctgagcgtcgccgtcgcgtcctcctcctcttctgcatccgccgccgcggagaaggcgatggccaagctgaccgtcgccggcgtcgcgccctcctcttctgcatccgccgccgccgcggggaaggcgacggccaagcgcgagtacggcggcttctgcgccttcgcgaggcccgacgacaaaaccaggtggcgcgtcgctgtcgcgtcgtccgccgccgccgcggcggacgcgtcgtattcttcttcgtcgccggcgacgggggagcagccggaggcgaaccggtgcgcgacgtgccggaggaaggtggggctgacggggttcaagtgccggtgcggcggcacgttctgcggcggccaccgctacgccgacgagcacggctgcggcttcgactacaagagctccgggagggagctgatcgccaagcagaatccggtcgtcgtcgccgacaagctggccttcaggatttga

SEQ ID NO: 54075 - DNA, 1452 bp, Oryza sativa
  Clone ID: PAT_MRT4530_56213C.1
atggtccgcacgcccaccataatcccgctacggcccaactacagcccgccgggcgacggtgccgcattccgccgcgagcccgcgacgtattcccgtttcccacccgccgcggctcgcaacgaatgtgatctcaccttcggtcaggaaaggaaacgagagggaatgaaaggcaagcccccgatatcaaggaaaatcatttataatcaccgagattttgtttccatgggtgaaagatttgttgctctttgctttatatttacgatgtctccatgcattgatgcaacgctattcgttcgcgtggttttggatttcgtccggcgagaggagacgagacgagacgagatgcctcgcacgaagcttgtgttgaagctcatcgagaacgagaagaagcggaaggccacgttcaagaatcgccgggacggcctcaagcagaaggtgtcgcagttcgcgacgctgtgcggcgtcgaggccttgctcatctgcgtcgcccccgccgtggcgggcggcgaggtcacgacgtggccgcccgaccgcgccgccgtgctggacctcatcgcgaggctccgggcgacgccgccggagaagatccggcagctgcacaacacccagtcccaactccgggacgatctggacaagcagcagcggttgctcctcaaagtccagaagtgcggcgccgacgacgtgctcacaccgtggcactgcagcctgtacgacctctccctcgacggcctcaatgcgctccacgacaccctgtccgagacgctggacagggcgcaccggcggatagccgcgctcggcggcggccacggccacgtccacgacgacgccgcgtcgtcctccgagttctcggtccccgcgcccgcgccgcacgccgtggcattgccggacaacgccttcgacttcccgttcgccccgtcgaacaccggccccgtcgtcggcgcccactacttctaccctctccacgacaccctgccgctgccgctgccgctgccacagcaggttcccggccagcatccgccgtgcatcgcctaccagatgccgccgccgccgtgcctcgcctatcagatgccgccgccgccgccgccgtcgctcgccgcggcgccattcgaccagtgtatgagcgccacgggcttcatggacagcaacccttacgccacccacatcatgcacggtggctcgacggctgctggcctcctcgacgatcatggccagatcttctccgccggcgcagggtacgacgacgacgacattcttgggcacggcttcggcttcgccgccggcaccgggtacgatcttgacccgcgcatggccaccgccgacgtttggccgatgaacacgctcaacaatattccaaacgatggcggcatcggcttccagctgcagaacgatctgaagtggatgcttccaggtggtagcaacgggagtaatttgcaaggcggctttcagatttag

SEQ ID NO: 54076 - DNA, 683 bp, Oryza sativa
  Clone ID: PAT_MRT4530_56214C.1
tacaaatttgtgtatttactttccatattattcactgaggtgtggcatcatgttcttgtattttctaaatcctgattttcaaatacctgaatgtatactcttggagcttaatttgctctaaggcccccgcgtcgcctcccgctcgggcgactcgggcggcgacccaagccaccgccgccgccgttcttcccccctcccctctgcctcgccgccgcctgagcaaacggccggcaagggctcgtggcggcggccaccctagatccggcgcgggcgaatctgagggtggaggccggccggagcggcgctgtcgtcgaggccggaggcgtgcagggcgcgcgggcgacggcggcaggtggtcgtggtggcgacaggcggcgcaggggcgcggggttggccggcggtaggtggaggcagagactggcggcggggtgtgggccgcggtggtgaaggcagcggtggcggagtctacgacctcgggcatcaccggatccgcgtcgaccattgccggatctggagctaggtgcgggaggggaggcgggtggcagcggggatgcggtggcagcggggatgcaggcggcagcgggagcataggaggcgtggctctggtggtggtggcgcgtggaggagcgtggaggcgaggccggtggtgtggaggccggcgcggccgtggagggtaccgagct

SEQ ID NO: 54077 - DNA, 618 bp, Oryza sativa
  Clone ID: PAT_MRT4530_56215C.1
aagtgatatccccaagtgtctcaattagaaaataatgctttagtagatgaatttacagaaaaggaaattaaagatgcaatttttaaaatggaacatattaaatctgtaggtctttatggatttcctgctgagttttatcaagtgttctagaatgttatcaaatctgatttggtagatttatttaaggattttcatagtgaaagtctaaatctttattcactcaactttggtactattattttactgtctaagtgcaaagaggctattaagaatcaacaatataggcctatttgtttactcaatgtcagttttaaaatttttactaaagttgctacaaatagaatttctggagtagcttagaaagttattagtcctacacaaacaacatttatatatgggagaaacattatggaagggttgctatcctccatgaaacaattcatgaattacataaaaaaatgaatggtgtaatttttaagattgattttgagaagcctatgatatgatagagtttaatcttgtcattaattagaatatatgcatggttctattttcgatgcggtggtgcgagaatggagcaaacaacgttcatgaagaccaagctcaactgcatgtgga

SEQ ID NO: 54078 - DNA, 357 bp, Oryza sativa
  Clone ID: PAT_MRT4530_56216C.1
atggcgcaaccagtggcactggcagcatcacgtctccaggggccaatgcgcttcgcgttcgaccttggcgacaggggctgcgtgggcggatctagttggccggcatctgctccggtcggcagtggcaacgatgatgatggtggggtccctccttggaggtggacgactggggcagccgacagtgggagttccgatggtggtggtggtgaatgcagtgataaggctattgaagcggctggtcgggtggtggtgatgggaggtggcgatggagttgggcagagatgggggctagtcttctgtcccttcctctgtcgccagtggcgagggctggcagcgtcaaaaagcgataggggctag

SEQ ID NO: 54079 - DNA, 2196 bp, Oryza sativa
  Clone ID: PAT_MRT4530_56217C.1
tcaccacccaacagcgagcagctccgacttcatccgcagaagcaaccgaagagtgtgtcgtccaccatagaatgaagcagacccaagaggtttaggcctcgccgaatgccaaggaaagaaaccttttgaaccgaagggaccatcaatagtcatcgatgtaaggaacttccccgaagcgacgcccccaagaaggacacgacgcgtaacaccgtcgccgctcgtccgaagccggagcaaggttttcacctggagatttgtggggcaaatggcagagcaccatgacaacgccttcaagaagggaaacagcgccaacagcgtcgtcatcatcgaactggccaaaggcacggcaaggctttcgccagcgtctctgccaccgccggccgcacaaccacgcgccgtcgccagcctccacgccgccggccacgcctctacacaccgcaccggcctcccgctgccagccgcgtctccacgctgctgagccagcctccacactccacgtgacgcacccgactccacgccgccgggccggcctccacgccacgccgccggccgcatctccacgggccgcgccggcctccacaccgcgggcctcgcctccacgctcctccacgtgccaccaccaccagagccacgcctcctctgctcccgctgccgcctgcatccccgctgcctgccgccgccactgcatccccgccgccacccgcctcccctcccgcacctggctccagatccagcaatggtcgacgtggattcggtgatgcccgaggtcgcagactccgtcaccgccgccttcaccaccgcggcccacaccccgccgccagtctccgcctccgcctgccgccgccaaccccgcgccctgcgccgcctgtcgccaccacgtccacctactgtcgtcgcccgcgcgccctgcacgcctccggcctcgacgacggcgccgctccgaccggcctccaccctcaaattcgcccatgccagatctagggtggccgccgccacgagcccggtggcgcgcggggacttcggcagcggtcggcggtggcggaggcggcatccggcggcggcggtgttcggcagcggcggcgcggatatccggcgacggcgctgaggctgggcacgaaggtcccgcggcggcgcggaggctgagcgcggagatccaaaggcggcacggaggaggaggaggctcgccggcccctggccccctcccgctgccgccgcgggctcccgcccgcccgccgccgccgctggcccccgtcccacgctgtcgaacgccgccgccgctggccgctctctggtgatggcggcggcggtggaggaggaggaggctcgccggcccctggccccctcccaccgccgccgcgggctcccgcccgctctccgccgccgctggcccccatcgcacgctgtcgaacgccaccgccgccggccgttctctggtgatggcggcgacggtggaggaggaggaggagcgctggcccctggcctcctcccgacgccgccgctggcccccgtcgcacgctgaagttttggtcgaagtgcttcaagaggccctttaggtttgtggcttccaccttgcttgcctagagcccaatcagcagaatcaaagtaagcccgatcatgatccttagttatatgtggcgtcctcttgggcagtattccaccatattttttcttgatggctgcttcctcttcttgtggtgagggcattccacttgcttcgctctgctcttgagttttttcttcctttttgtcagaaacatctccttcgagcctcacttgaccagttgcctcatcagatggcattccagacatagtgaacttaagcagcatctcatccaaagaaacagccatcacacggcgcaatagtgggatagaatgtccattgccatcggcagccaccacaccagctgctggaaaattgctatcatgaagcacaatgctatcttggatggtgcattcagcattggtgctggtgcaaagctgtgatccctccacagaaatgtcctccatcatcgtcgtcgtcgtcatcacacaaccaaaatcaaaatcggggtaggaggggacgattacgcggatggcgagcacgttgatcatatcgcacaggaagcggagggctcgggccggtggggtgtaggcggtgtcgtcggtgaagcgcatcggagcaaggccggactcctcgtcgaggtcgaagtcggacat

SEQ ID NO: 54080 - DNA, 918 bp, Oryza sativa
  Clone ID: PAT_MRT4530_56218C.1
atggcagcggcggggctcgtggcggcggccaccctagatccggcgtgggcggatctgagggtggaggccggtcggagtggcgccgtcgtcgaggccggaggcgtgcagggcgtgcaggcgacggcagcaggtggacgtggtggtgacacgcggcgcaggggcacggggttggcggcggcaggcggaggcgaagactggtggcagggtgtgggccgcggtggtgaaggcggcggcggcggagtctgcgacctcgggcatcaccggatccgcgtcggccatcgccggatctggagccaggtgcgggagaggaggcggggtggcggcggggatgcagtggcggcggcaggcgacggggatgcaggcggcagcgggagcagaggaggcgtggctccggtgatggtggcgcgtggaggagcgtggaggcgaggccggcgcggcccgtggagatgcggccggcggcatggaggccagttcggtggcgtggcggaggcgggggtctggtgctgcgacaggaggcggttgcgggaggccctttgtcggcgcggtggcagcctccaactcccaccggcgtcttggcggcgatgcagtgaggctgtgggcatttgtggcgacggtggctagccgagtttcgatgaccggtcccttggccgccttggccggttcgtttcccttcttgaaggcgttgtcatgacgctctcccatttgccccacaaatctccgggtgtaaaccttgctccagcttcggacgagcggcggtggcgttacacgtcgtgttctccggacgagcggcggtggcgttacacgtcgtgttctccttgggggcgtcgcttcggagaagttcgtgttgtagtctctttcaaagagttggtgctggctatgtgaaggaagtggctctttggtggcttggctgatgtccat

SEQ ID NO: 54081 - DNA, 315 bp, Oryza sativa
  Clone ID: PAT_MRT4530_56219C.1
atattatcttcaaaatacttttcttttttacttacaattttgttttaattataattatttttttttaactaaaaaaaagcacaaaaaaacctaaattcaaaaaaaaggggcataaacaaaaatgcagggatccgaagaaagcaaaataattcagctcttaagaggaaaactattggagggcgggggacacttatctacaaaaaaggcgttaaccatggaccaatacaaccacatatatccttacccggactacgggggaccatgcacactgcacaccaaggcacaaaaagtggggaaaaatgacacccatgcccc

SEQ ID NO: 54082 - DNA, 517 bp, Oryza sativa
  Clone ID: PAT_MRT4530_5621C.1
ccggccgggaggagcacctccgctcctctccccgggggtcggtccaacccaaaccggggtggggagcacggtggcaacaaggggatgaagggacggcaaggccaggcgagaggaagaggacggagggaaagacgagatacaagaggtcgaagtcgaaccagtacaagaacacgtcacaggggggggggaggagaagaacaacaaggaggaggatggagggtacgcagggaagaagcatcgactacgggtacaagggcaagacgaaaagaaacgagtccacgatccggtgcataaggggcaagggcacccgacggcacggcaaaagcggtggcggccgggccaaggtgcgggccaacctacggcccacctgcatgggcaagaaggaacgcggaaacatgtaccccagcaagaggtaaaaggaaccaagggtcgatgactaggctgcgaaactgagagctgagaaagaggagggggaacagaccagctagccacttggtcaaccagggagaaaatgaag

SEQ ID NO: 54083 - DNA, 549 bp, Oryza sativa
  Clone ID: PAT_MRT4530_56220C.1
tttttgtttttttgataggattgtcattaatgcttttttcaagagcatggttgtagttatttagacctaaacttgtcacaacaacggggtaaaccataaaatacaccaaaaataataataactcatgttgattaatgaacttctaaaaaaaaaaacccccggcctctaactttgcctccatatattgaatcccacaagttagggtcattcaacccgaattttttgggatgaaaccaaacgttagaccttgagtcccaaaaataatgctactttcaagcatcagtgtgccttcaaggcgaacttccccccgcccctaaaccaagttctgaacaaaagcccaccccttggtcctgcgcggcaaactctaaccttgggggggcaaaaacccgtaggggcaagaggaactaaaaatcatccttttgtttttgaaaatctataaaaatgaagtctggttttgtttccccccaacaatggggggacccccacggagcccccccccttgtctccgggaccagtttaaccccctctggaaaatttttttccaaaata

SEQ ID NO: 54084 - DNA, 815 bp, Oryza sativa
  Clone ID: PAT_MRT4530_56221C.1
caagaacaatcattcaactccatttactttgggcataaaaaaagagaggaggaaaatatcattcagctcatttactttttcaaaaaaaaagaggaagaaaatatggcaagaaagggaccctgtccactagaagttttgtacatttcgatttcgttcgatgcaagcaatcaaatccagcgactttgcatttcggacagcgacttccttgcgccaataattcagtcgcgagacgcgaagcttcgtttgattcagagatcggacggctgaggtgcctcgatggggtggagggcgcggatcttgatgtcgtagcgcggcggcggcggcgaggacgacggcggcgagcgggcggcgcggtcgtcgtaggcgaagccgacgtgggcgccgcacttgcggcagaggaggcgcgtccgccgcgtgaagaggcggcgcgcgcgcacgtccacgcaccggaactcgtccacgtgcccgaacctcgcgtcgtcgatggcgccgaacctcaccaccccccgccgcctccggtatcccccgccgccgccggcgacgaccatccccgccgtgtccctcgccgacgagctcagcttcaggtcgtacccgcacgccccgcagcagtaggagacagtggagaggctactgggaagatcaagagctggctgatctggcttcttcatcgccattgacgagctgatcgagctcagctgctgcttcttcttcttcttcttcttcttcttcttcttcttccaagtcgtagttagcacactactccttaattaactaactagattctgctggatcccacgcgtccgcccacgcgtccg

SEQ ID NO: 54085 - DNA, 699 bp, Oryza sativa
  Clone ID: PAT_MRT4530_56222C.1
atggccgcgcgatccctccaccacctcctcctcctcctcttcctcgccggcttccactccctctccctctcccccgccgccgcactgcggttcgacctgcagtcgggccacaccaagtgcatctccgacgacatcaaggtgggcgccatggcggtgggcaagtaccacgtcgtggtgcccgaggggggcggctccacctcctcctcctcctcgtcgtcgtcgtcggcgcagccgctgctcccggagtcccaccgcgtctcattgcgggtcacgtcaccctacggcaacagcctgcactactcggagaacgtgcagtcgggcaacttcgccttcacggcgtccgaggccggggactacctcgcctgcttctgggcgcccgaccaccgccccaccgccaccgtcggcttcgagttcgactggcgcagcggcgtctccgccagggactggaccaacgtcgccaagaagggccaggtcgatatgatggaggttgagctcaagaagctggaggatactatcaactctatccatgaagaaatgttttatcttcgcgcaagggaggaggagatgcaggaactgaacaggagaacaaactcaaggatggcttggcttggtttcttctcactagctatctgcctgtcagtggcggggttgcagttgtggcatctgaagaacttctttgagagaaagaagcttctataa

SEQ ID NO: 54086 - DNA, 772 bp, Oryza sativa
  Clone ID: PAT_MRT4530_56223C.1
tttttttttttttttcaccaaaataaacattcagcagataatattggacaaacagcaaatgtgactgaatgcagcgtggctcaataaacctctttacaggtggttaaaaatctctaatccaaatcaaacctattctattcagtttctccacctgttgagagtgaaaatgttcccacgaccgtcgaccgctgggggaagatggcaaactagccagtgtcaaaggtagagggtggggccgctgccgcgggactgccgtccgccctcccccgccgtattccacctattaaccaacacacaaatggactactggaaaccaatgcaatcatgtttgatataaagtttagaatatgagcatgcgaataagtaaatgtcacatgcttaatcaaagatatcataaaaagttctcttgcatatgttggacaatgtcttctccattgagaatgggcaatccatgttactcccagtggagccattggcggtagtgatctcccaggactccatcaatcaaagctttggcattctgcacttgcttcgtgagatgactgattgccttcgaaataaccttcttaaaaggctcagcttgaacaactggcagtcttatctcaaaattatatgtgcatctgaaagtttgaagagaagctaatagtttactatacttgaagtcacatggccttaaacgtcctgagctcatatcacatatacgacaggcccacctcaaaatgcagttgagcagggcagaatttgaagagcagcatcatcacggacgcgtggg

SEQ ID NO: 54087 - DNA, 1773 bp, Oryza sativa
  Clone ID: PAT_MRT4530_56224C.1
atgactgaagcgatcgggagggggccagtagatccggtggctcctgagctccatctgctcggatccaatggaaggagctttggagccacgacgaccctgcgtttgaaaggagaaggggaaaaggagggcacgatgacactagtgagctccctcattagtgccaagaaagaaattaatgtcctcatcagggcttcagcaggtgagtgcacggtgaaaagcagaaaaattaagcacaagtacatcgatcaggctgcagcgagcgaccaatctggttgggcgttggccgccatacgaccagatcgaccagagagcaaaacacatgagaaatccaggggtcaccgcccgtacagatccgcgcccatccatccatgcatctacgtaatggatttgctgccgctggtgacgctgctgctgctggcgcacgcggcggcgtgggtggcgtggcaggcggcggcgcggcggcggcgggcgacctgctacctcctcgactacgcgtgccacaagccctccgacgaccgcaaggtcacgacggagctcgccggcgccatcatcgagcgcaacaagcgcctcggcctccccgagtaccgcttcctcctcaaggtcatcgtcaactccggcatcggcgagcacacctactccccccgcaacgtcctcgacgcccgcgaggactgccccaccctgcgcgacgccctcgacgagatggacgacttcttcgacgacgccgtcgccgccgtcctcgccagggccgccgtctcgccgcgcgacgtcgacctgctcgtcatcaacgtcggctccttctcgccctcgccgtcgctcgccgacagggtcgtcaggcggttcgggttgcgggacgacgtcatggcgtacaacctctccgggatggggtgcagcgccgggctcgtctccgtcgacctcgcccgcaacgtcatgctcacgcgcccgcgcaccatggcactcgtcctcacctccgagtcgtgcgcccccaactggtacacggggaccgacaagtccatgatgctgggcaactgcctcttccggtgcggcggcgccgccgcgctgctcaccaacgacccggcgttccggtcgcgcgccaagatggagctccgctgcctcgtgcgcgcgcacatcggcgcccacgacgacgcccacgccgccgccgtgcaccgcgaggacgccgacggccgcctcggggtcagcctcagcaaggcgctcccgaaggccgccgtgcgcgccttcaccgagaacctccagcgcctggcgccgcgcatcctccccgccggcgagctcgcccgcttcgccgcccgcctcctcctccgcaagcttctccgccgcaaggccgccgccggcgccgccgccaagatcaacttcaagaccggcgtcgaccacttctgtctccaccccggcgggacggcggtgatcgaggcggtgaggaagagcctcgggctggacagctacgacgtggagccggcgaggatggcgttgcaccggtgggggaacacgtcggcgagcagcctctggtacgtgctgtcctacatggaggcgaagcggcggctcaacgccggcgaccgggtgctcatggtgaccttcgggtcggggttcaagtgcaacagcagctactgggtggtgaccaaggacctcgccgacgccggcgcctgggaagattgcatccacgactacccgccggcgaacttggtcaacccttacatggagaagttcggctgggtcaacgaccttcccagccagggtcagggaggcgcatttcccttcttttaa

SEQ ID NO: 54088 - DNA, 1821 bp, Oryza sativa
  Clone ID: PAT_MRT4530_56225C.1
atagcgcgcgccctccgctccgcctcatcagcgagggcccaccgtctgtcgcgccccatgagctccccgcccctcgggcgcgccgcctcggccaccagcatcgggtcctccttcttccccctctgctcctcccctccgtcctccggctcttgcaccttgcggaggtccagctccgtgtgcggcgcaagcgagccagaagcgtcgggggccacctccctcgacaccgacgtgctcaggcgtgtcgccggcgccgcggacgccggcgaggcgctggacatcgtcgcggagtcggggggaggcaggggcgggcaggacgcgtcggactttaacgcgatcgccgcggcggcggttgaccggggcaacgtggagctagcgctctcggtgttcgaggcgatgcgatccggctttgcacgagctggggcctggaggtgggcgaggccagacgtgcggacgtacgcattgcttgtccagcgattggcagctgctctgcgtgtttctgatgctcttaggataatcgattatgtatctcgcgcaggcatttcttcggcagaggaggtcccatttgggatgattattcgctgtccaagctgcatggtagcagtcgcagttgcacagccccagcatggaactcagactgtttcttgttcaaaatgccgatatcagtacgaactattttctggagatatcatgagcatcgagtctgaagaagttagcatggacatttcagctttggacaaggcattgcgatttataaatgtgataaaagacggtcttccagctgctgtgcactctattgtgattcgcacaccttcaggaacagcccgtacccatagatttgctacgcagactgtagaactgcctgctcaagaaggagaaagagtgaccatttccttggctgccccatcaaatgtttatcgtgaaatgggtccccttaagatttctgcacgctcacaagggtttagaccaggagaacccatgtctctcaccaatcacatcaacagacaagtctcaagattgctaagagctccatcaaagaacgagggaccattcgtctttaatccatatttgttggtcggtgctcttgctcttcttgcctctggagatgctgcttctgcattcatcgacccaagcctccctagatttattacagcaactgcttttgcatcagctgctgttggaacagcactaaatcaagtgatcctgccagagattcgaaagcttccacaaaagacagtagatataattgctgttcggcagcaacttttatctcagtacgacatgcttcagactcgtctaaaggatctgaaacaactttccgaaaaggaggtgtggatgctggcaagaatgtctcaactagagaacaagatattagcagtaggtgaaccatcatatcgtgctcgtcgaggtagagtgaagagggtacttgaaagcttggaaagtacactcctggcaaagattgagctgatggaaagttatgcaaaagtaatagagcaaattttatatatgttgtgttctatgattgaaattgaagttgagatggactcagatgttattgttgctgaagcagcaagtagtgcagaaaggatatcagaacaaatacagcaactaatggagattgatagtcttgaagaggcaagtatatcctatgttcatcagcttacattcaacagaaaatgtttctgtactagaaggaaagctggatggatagtcaggcaattgcacagagataccatcagagtgcaggtcaccaatgtaaactcgtttcgggaacaccatcgtagcaaatccaaacgctcaggttattgggcgaacctcccttag

SEQ ID NO: 54089 - DNA, 504 bp, Oryza sativa
  Clone ID: PAT_MRT4530_56226C.1
tagctaatattctctatccgatgccctcctggtacttcgtgaagccacccctaactgtcgagtttcttacgacagcccgtcatgaccatacaaccggggctaaatacagaggaataccttccccaggaaattaacttagaactatatacacgcgcggaggaatatccgtactgagctgtcaccatcagcggcccacctctcatccgcagcatataaccccaaataatgatatcccataatctagacaccacgtctaaactaccagatactactctaatatccctccaaccgtcattgggggctaatccacaccgtccaggcaaagccctggatcggatggcgctgaggaggattcggccgaacctggggccggcccaatccagcccatttttggctggcggcctcctccgttgttcttctctgcagacttgtgaattttggcccggtttgtcgtgtcaattctgagttcttggcccactcatacataagtataattctcgacat

SEQ ID NO: 54090 - DNA, 400 bp, Oryza sativa
  unsure (1)..(400): unsure at all n locations
  Clone ID: PAT_MRT4530_56227C.1
gttgacttgtcgacaaacccacttcttactgtnatatgttgtagacaaggtgtgtatgtgcatcttaaaatcccaaatcctttgctccatttgctntgattgcaactccgaactccacgaatgtgcacacgagcaggagggcagcgtatagctcgcgagctaaacgagctagctcgagctttcaaacgagccgagccgagctagccttttagctcgttaggataacgagccgagccgagctagctcgttatcctaacgagccgagccgtgtcgagccgagctggctcgatatccagccctagtgcatgcataactgcatctccacttcatatttgtagaatgatccttgtaattcttttaaagttcataatagtaccttcagtcaaaaaaaaaaaaaaaa

SEQ ID NO: 54091 - DNA, 1305 bp, Oryza sativa
  Clone ID: PAT_MRT4530_56228C.1
aatactcccaactcaatcaactcataataacactccatagaggaaaattaactagcttctagtacaggaaaactaactagggccgcctgcctcttcgatgtagctaggattaattgaagttacaagtaattgatgatgtatacaatatagtacgatcgagtatatatacatatatatagggaattaatatatggaagaaataattagcagcaagattatatgagaagaaacaagataagtaataatgaagtggatcgagtagctagctagctagctagcgtgccatgtcgggcttgggggagtagatgcttccggcgtgctgctccgatacggtggacatctcccaggtgagcttcagggcggtggcgtcgtgcggcggcggcacgtattcctcgagcttgcagagcaggtcggaggcggtgggtgcggcgacgatgatgcggcgggcgggcggcgagacgaagccttcgtggacggccttgtcgatgaaggcgagcagggagtcgtagtagccgtcgacgttgaggaggccgacgggcttgtggtggatgcggagctgagcccaggtgatgacctcgaggagctcctccagcgtgccgtagccgccggggagggcgatgaaggcgtccgactcccgcgccatctccgccttccgctggtgcatgcttcccaccgccctcacctcccccagcgtctcgccgatcagctcgcgtggcagcacgccattgggcaccacgcccaccacgtgcccgccgcctccgtggacggcgcgggacaccagccccatcagcccaacgctgccgccgccgtacaccaggtcgatgccgcgctccaccagctgctgccccagctgcacggcggccacctggtacgacgccttcttcccggggctgctgccgcagaacacgcacacacgccggaaccgcgacgccgtcttcttcttcttcttcttcttgctattgttgttcgccggcgacgactccggctgctgctccctgctattctccatcatcatatatacggccgacgaccttaattattggctgctgctggtctgcacccaattcgatggaggtcggaaggcagagaggctcccaacgatagaaagaaacctccggtcggcctctagtttcccacttactaatagtgtttttttctgaatgacccgctcaagacaacacaagaagattcatattgatatagcatgaaaagtattatgtatagaattacaacagaagaaggtcatacttacggaaaaaaagactactcccccccatgctacaggctccaaacacacacacgtta

SEQ ID NO: 54092 - DNA, 526 bp, Oryza sativa
  Clone ID: PAT_MRT4530_56229C.1
gggcagcatgatgagaacacaactagctcagatataatcatggctactttatgtattaatcaaccaaagcatcaacttcaaacggacctagccactgatctagaaggaatttcggggcccatgaatacttgttggaaagcttatggagtctactttctgatggttttggttccacgttaaaattcctactgagctgccgggaatctgcaaaacaagccacggattagccttctcggcaaggtcatccgcgtttcgacacgggtgataaccagagtagacgtggtgctgcgattgcggggctcaagagcgtgcgcgtttaagaagccggatcgatttgtgtcgcgactccgtccaaatcgttgtttatcagaacctttcggaagatcaagacctacatccctcatcaacctagacaatttgagccgttgcattgttctattagattttgctttattgaattctagattgcatcatcgtgtcgagtgctggtttagttttagatttaatttttagttttgagtattgc

SEQ ID NO: 54093 - DNA, 141 bp, Oryza sativa
  Clone ID: PAT_MRT4530_5622C.1
atggatggatcgttgggcaagaaaggagaaggatgcgagggttttgaagaggagagggatcgatggggcagggaagcgaggacaggggcagtaatggcaatttatggtgacatgccccatttggcacagcgggtgccctaa

SEQ ID NO: 54094 - DNA, 209 bp, Oryza sativa
  Clone ID: PAT_MRT4530_56230C.1
tttttgtttttttttttttactattcttaatctgactttacaacaatgttggctgatgacaaagaaaaacggaaattgggttcgagcaaatcatttactgcacgatacgtgcaattggctggacgggagcacccaataccaggagccaacaatggatgcgctttccttataggggatcaagggaaataagtcaaacgtgcccgattcga

SEQ ID NO: 54095 - DNA, 237 bp, Oryza sativa
  Clone ID: PAT_MRT4530_56231C.1
atggccctccaggcgcacaacggactctcgtggacggccggtccttcaaaaaaaaagtggggcaaactcaatacaaatagctcaggttatgcttatgcataccataatccatttctagagtctacaagcaagagttcacagacagttgacagtgacatcctgcagtttttctcagttggtaagtgggtcatgctgcacagtgatatggcgccccagacggaacttaactgtgcttga

SEQ ID NO: 54096 - DNA, 1296 bp, Oryza sativa
  Clone ID: PAT_MRT4530_56232C.1
atggcagcagcggacggaggcggcgaggactacatcagcgagctcccggacgccctcctctccgtgatcttctccctcctcggcaccgccgaggcggcccgcaccgccgccctctccacccgcttccgcggcgtgtgggccgccaccccgctccgcctagacgacctcgacctccccgccctcgccgccctgggactgggaggaggaaccagaaccaccgcctcctcgtccccgatcgcgccgtggaccgcgcgcgccgacgccgtcacccgcgtgctcgcctcccacccgggccccgtcgcgctcttccgcctctcccgcacctccttccgcggccgcgtcgccgcggcggaggcctggttccgcgagctcgccgcgaagcgcgccagggaggtcgccctcctctgcgcgcccgagtggtgccacctcgcgctcgccgacccgctcctcggctgcgccaccctcgagtccctcgccctcggcgagtgccgcgtctccgaccggggggcctccgcggcccgcctcacggagctcacgctgtcgagcacccacctctccgaggccgccctccagagcgtcctctccggctgccccgcgctgcgcaccgtcatgctcaagcacgtcgagggcccccgcagcatccgcgtccgctcttgccgcagcctcgtgctgctcggcgtgtggcagtacaagaacctcgaggagctcaccgtggaggacgccccctgcctcgagcgcctcctcggcgacatgcgcctcaccgcggccatcaacgtctctggcgcgccaaagctcaccgctttcggctatgtcgtgatcagctcgtccaatttcctcctcttcgacgaggttattgagaaggatgtctgtaatggtttgcgtgctccgcttctgagcgtgaagattctggctatcagtgtaaagttctcgagcaagaatgacatggacaagctgatgaacttgctaaatttctttcctttcgtggagacattgcacgttcaggcctctgatacaaggttcgatctgactcaggatagcaccgacactgttggctcaagctaccacgaaaagcttgatcacattggagcacaggtgctgcagctcatgacgattcagtctaaggtgttcagcaccccccaatgcgttgcaggtcagcaagctctgctcaaccaaagccacgtggcctccacagaagctgagatcgtgtttgaagacatggaaagccatgatctcgagcacttgagcttagagcttgcgaatactctgcctgatcccttcgacacctatcatcgctga

SEQ ID NO: 54097 - DNA, 1167 bp, Oryza sativa
  Clone ID: PAT_MRT4530_56233C.1
atggagtcgctccaccacgacgtgatccgcctcatccacagccgcctgccgtgcctcgtcgaccgccgccgcatgggccgggtctgccacagttggcacctcgccgtcgcggagaggcagcgcagcaagctcccgtcgatcctcgtgccgcgcgcggacggcccgtccttcgcgtgcgccctcgccggctgctgcgccacccacggcttcgcccacccgctcaaggacgacgcgcgcgccgcgcgctacttcggcgcctacgacggcggctgggcgttcgtcgccttcggccacaccgtgggctacgcgctcctcagcctccgcgacggcgaccggctccacatccccgacatcggcatggccgtggtggccgccaccctctcctcaccgccggacgacgaacgctgcctcgccgccgccatcaacctctccttcctgattgacgatctacgcactcacgcgttctggcccatgcggcgtcaatctgcggctgcgccggagaaggcggcgaaacctgcaaaggtcatcagcggccacgctctggaggatgtcgtacaccacgacgacgccttccatttcctcacgagagaagaaaacctccatgtttttccggtagcgggcttccgcgaagacgacgagggcaatctggagataccgcccgtggaggttcatcgcttctcgcgtggcgggcgagattacggccaaaacaacgctgttcgctacctggtggagtccggcgagaatctcctcatggtcgtcaggctcgttccccatcctccccaattgccgccgaggacgtcggcgttcaaggtgttcgagatggtggagccgccgctggggactcccatcaacaacgacgaggcaccatacgcctggaacgagctggaatcgctgggtgggcggatgctgttcgtcgcgcgaggctgctccagatcgtacgacgcgaacaacaatccgggctccgagttcagcgagggcgtctacttcctggatgacgggagactctacgacgaggagttgatgctcggtgagcccgatttccgggagtatccctgcagagacaccggcaagtggttgccagcggcggaggcgaatccccgagtggtcgagttcttgccggagcaagccccgtcgagctactcgccgccggcgtggcttctcccctga

SEQ ID NO: 54098 - DNA, 771 bp, Oryza sativa
  Clone ID: PAT_MRT4530_56234C.1
gcacgaggcccatctcctccccaccgcgccccgcaccggcggcggggactgtctccgccgttcgtgctccccacgatgctgtcgtccgctctccccccgccgccccttccgccctcccaccgccgcctccgtgcgccatcccaccgccgccgccgtcgacgacgaccctcctcccctccctcgcacgagggcccgtcggagctcggcgcctcctcccccttgtactctctcccttgtggcggcgtctgtgcctgcggcggtgtcggagtcggcgccggttcacccctattctcactcatctcgttgcgtagttcgacccggcgctagccttcctccctcttcagatctggagcagcaccggtggtgacggcggcaaagaaggaggtgttacgggcgggacgagtaggacaggcggtggggagtgggacatgggacgggcagatggcccggtgcctcctcccccttcatatccccctaccttggcggcagagccggcgtcggtgctcccttcccctttcttctcccgcatcctggccgcctgctcctcctcccgtcctcacctctccacaacgccgccctccccctgcgtctcctccaactcctgccgctccgcctccctcgcacccggctcctctttctcctttcgagtctacgtcaaccacccgctcctcccctttccattcttgtcgttgtagccccgtggctggcgccacttctccctctggatccggcggcatccccttcgccatctagccatccctcctccccaac

SEQ ID NO: 54099 - DNA, 957 bp, Oryza sativa
  Clone ID: PAT_MRT4530_56235C.1
atggcgagcctcgtccagggcgtgtacgtcatggagcgcgaccggcagtggaaccggcacggccacgacgcccgcgcgccggcgtggtggaggttcttccacttcgaggtacgagaggtgctcgtggacgccgccgactcctccatcttcggcgccgtctacgcgttccagccgccgtggcacctcctcgaccccgccgccgccgccgctgccagcgcgccgcactacgtcgtcgcgttccgcggcaccatcaccaagaaggcctcggcgtcccgggacctggcgctcgacctccagctcgtccgcaacggcctcgaccgcacctcccgcttccacgccgccatgcggaccgtccacgccgtcgtggccgcggcggggcatcagcatcaccaccgcgtctggctggccggccactccctgggctccgccatctcgacgctcgccgccaagtccatggccagggcgggcgtcgccctccccacgttcctcttcaacgcgccgttcccgtcggcgccggtggagaggatcggcgacaggcgggtgaggcagggcgtccgcatcgccaacagcttcgtcaccgccgccgcggccaccctcctgcaccatggcagcggcggcggaggctacgacgccttcgcggcgctggcgcggtgggtgcccaacgtgttcgtcaacccgggggacccgatcagcgccgagtacgtggggtacttcgaccaccggaagaagatggaggacatcggcgcgggcgccgtggggagggtggcgacgaggaactcggtgaaggacctgctgctgggcatcggcacggcgggtggatgcgagccgctgcacctgttcccgtccgccgtcctgacggtgaaccgcggcgcgtcgccggacttcaaggcggcgcacgggatccaccagtggtggaggccggacctggcgctggaatgcgccgcccattactactaa

SEQ ID NO: 54100 - DNA, 385 bp, Oryza sativa
  Clone ID: PAT_MRT4530_56236C.1
atttgtgtctgtgactgacatgtgggtcccacgggttttttttagggtgtgtttggttggagggatatccctagatgggagatggcgatccagtttttgagtgtgtttgattggtgggcgaaggtggataggacggcctggagagggaatattccacgaagatgctggatgagtgtatgcgaccaaattggccggatgaggatattcacctttgctaattttgatcattagttcttgattagcaataattaaattatattattgttaatcagtaattagcttgtcaaaattagatataattactctattttattgttaattagtataaattatggctatattaatgataattaacatatttcattattaaaaaaaaaaaaaaaaa

SEQ ID NO: 54101 - DNA, 1900 bp, Oryza sativa
  Clone ID: PAT_MRT4530_56237C.1
cccacgcgtccggaacgtgatcgatccaaagaacaacaactcggagcaaagctagctaacgaagttagttccaaacaaagctagcttatcgcgattagctagctagaagagagttagctaggcgccatggagctaggcgtgccactgccacgacggcccgtgcccggtagctacggcgtgccgttcgtctcggcggtgcgcgaccgcctcgatttctactacttgcaggggcaggacaagtacttcgagtcgcgcgccgagaggtacggctccaccgtcgtccgcatcaacgtcccgcctggcccattcatggcgcgcgacccccgcgtggtggcgctcctcgacgccaagagcttccccgtcctcttcgacgtcgccaaggtcgagaagcgggacgtgttcaccggcacgttcatgccgtccacctccctcaccggcggctaccgcgtctgcgcctacctcgacccgtccgagcccaaccacgccaagatcaagcagctgctcctctccctcctggtctctcgcaaggacgccttcgtcccggtcttccgctccaacttcggcgcgctcctcgacaccgtcgagtcgcagctcgcgagcggcggcggcaagtccgacttcaccgccctcaacgatgccacctccttcgagttcatcggcgaggcgtacttcggcgtgcgtccctccgcgtcgagctccctcggcaccggcgggccgaccaaggccgccctgtggctcctatggcagctcgccccgctcaccacgctcggcctgcccatgatcatcgaggatccgctcctccacacgctgccgctgccacccttcctcatcagctccgactacaaggcgctgtacgcgtacttcgccgccgcggcgtcgcaggcgctcgacgccgccgagggccttggcctgtcgcgggaggaggcctgccacaacctgctgttcgcgacggtgttcaacagctacggcggcttcaagctgctgctcccgcagatcctgtcgcgcgtcgcgcaggccggcgagaagctccacgagaggctcgccgcggagatacggagcgcggtggccgacgccggcggcaacgtgacgctggccgctctggagaagatggagctgaccaggtcggtggtgtgggaggcgctgcggctggacccgccggtcaggttccagtacgggcgcgccaaggccgacctggagatcgagagccacgacgcgtcgttcgcgatcaagaagggggagatgctgttcggctaccagccgtgcgccaccagggacccgcgggtgttcggcgccacggcgagggagttcgtcggcgaccggttcgtcggcgaggaggggaggaagctgctgcaatacgtgtactggtcgaatgggcgagagacggagaaccctagcgttgacaacaagcagtgccccggcaagaacctggtggtgctcgtcggaaggctgttgctcgtcgagctcttcctccggtacgacaccttcaccgccgaggccggcaaaaaggtggtcatcaccggggtcaccaaagcttcaacctccgccgtcaatcgtactgcttaagccggccatcacttcaggcgtgggtcgtcgatcatccactcaaccagctccgtcctacgcatatgcaataagaaatactcgtacctgaattcttgcatggctaaacactactaataagtgtatgtattctgtttatttgttcgattccatatttgtaattttgttgttattgtttgctgttgaattacgattgtgtattttacagggctgacagtgtctttaaacacctctaatatgtatcggatcaatctgccctagtcatgtctaatttgtgaagatcccctttctttaattattcaaaaaaaaaaaaaaaaaaaataaaaaaaaaaaaaaaaaa

SEQ ID NO: 54102 - DNA, 392 bp, Oryza sativa
  Clone ID: PAT_MRT4530_56238C.1
accttcatggtttttttgacccgcacacccacacaacatccatagctcacaaattacaccattcgaagcaaagctacgaggcgagcgatcaccctccattccaccggggttagcaacaccccctttagcctacctcggttattacattgaaacaaggagttgggttccttcgccgtgaaaggggataacagctggttggaacctaccttcggagtgaccgaccgggaacaccggccgtaagctcatctggttagaggaagaagtcttctttaacacagcctgctcctttgccttgacaagtgtttaggctaaggaccctatcggagaaaccccaacggatacctctaggcccttagcctgcatctagtatatgcatgaggcagaatcacctt

SEQ ID NO: 54103 - DNA, 565 bp, Oryza sativa
  Clone ID: PAT_MRT4530_56239C.1
tataggcgaagcattgttggagaattcaacatcaatgacaaccattttggtgatcgctctccttgctattgttgcaggcaatgcctctggccgggtcgatcctctgagtcaaagttataggcaatgtcatctacagtcgcatctactactacagcaacaagtgctcaaaccatgcattgagctatgcaggcaacagtataggatacaggctaccctattgtggacaccagcttcgtttcaattgataaacaaccaagtcatgcagcaactgatgcgccaacagcttaggctgcaagtacagctgtctcactaccaggccatctaccttgctcaagcgattgtgcaacagatacaactgcagctacttattggtgtctactttgatcagacttaagctcaaactcaaactctggtgacctttaacttgacatccatatgtggaatcttccctaactactatagtgattacaagagcattgccactagcggtggcgcctggtactgaatcgggaccatataatgtgccgtatgataaaaattaatgtcatacatcatcatgtgcgac

SEQ ID NO: 54104 - DNA, 645 bp, Oryza sativa
  Clone ID: PAT_MRT4530_5623C.1
atggggttgccgccggtcgttgactgcagcttggcctccaacgagcggtcgaccgtgccggcgcccacggtgaacatccagggcacgtcgttctccacggtggaggcgccggggccttggttgccggcacacaccacgaacggaatacttctccatggcgctgtaggcggcgatggcgaccacgtcgcggtcgtaggtcgtcttgacttcttggctgatagagaaggagatgacgtcgacgtcgtcatggacggccctcgtccatggcgtggattactgcgtcgtccgagcaggcacggtagtcgccaacaagtgacgtggtttctagaaacgtatctcccaggtactgaacttactcttccactcaggtacaaggaatttccaggcccaacactgcccctgctcgcgccttgggaccaagggtccggccctccatgcagttcactggaagctcctcgcttcctgagcagcagagcaggtgtacgggacaaggtggaggcccggagaatttcacgagccgaagaaatccacgagccactggtgcaaggggtgggagaggaggttcccctatctcactcagatctaaataggaatgccgaatggccttggtgtataactgtctggtacatcttagatgctctgtga

SEQ ID NO: 54105 - DNA, 355 bp, Oryza sativa
  Clone ID: PAT_MRT4530_56240C.1
gcacgaggaaaaatatcctaaggagccgaatgcaaaaatctattttcgcatatggacgcttaagtggtccacatgcaaaaataccccatctattttttttctctcctatctctttctcttctcactacaattttttttaccctctcctctctcttcgatcctctcttgatatttctctcctctgctctcctcctccaaatctgcatgggcggtagcgggcggcgacgccaacgaggaggccggccatcgggtgcggcggcaggcagaaggcgagcagctacgcaacctctgcgacgacaggcggtgaggtgcgctcgccgtcggcgaaggagctattagaggcgggggttagggt

SEQ ID NO: 54106 - DNA, 519 bp, Oryza sativa
  Clone ID: PAT_MRT4530_56241C.1
atggcggtggcatcacccctcattcaccggacctcaccgccaagccaccccttcacgctgaccgcaagccgcgactgccccaaccaccatacagacacacattgtgccgtctccctcaccaccatcgacctcctctatggcgggaggggctcgggcgcctctgcctctctcgccaatgacgtcactgatgccatggatggggtcaaagatgagactcttgccaagaggaggtaccttggcagcgccctcaggagggttacggtgttcaaaggtgtaattgttgccgccccagtgcaacattgggcgaggcttttgcctagaaccccctacaacattgaccgtgcccgagcaactgtctgcccaagccaggcggtgaatccgccactgatcataaggcctctgccacatgggaccaacaaccctccgcaagccaacttccagtcctactatcagcaagaccgctgctgtgcactgctattagcaccctttagcgtgctgcggaaccaccagtttggctga

SEQ ID NO: 54107 - DNA, 528 bp, Oryza sativa
  Clone ID: PAT_MRT4530_56242C.1
atggagggaggagcaacgcagtgtcgctgccgccgagtgcctgctcgtgcgcacgcgacgccgctaggcctggagcacggcggcgtgccggccgcccactccgcctccgccatcgcttgccctggcgagctgccaatgagccacggcgcgcgctcacgcggaggggggggcacaggagcggcggcgggcgcaccggcgtggctaggtagaccaagccagcggcagacgcgaacgggagagggaactggctggcagcgggagcggtggggaggtggcgaccacgatgacggcagatcaagcggcgccggtgacgggagtcggcggattgaggtcatgacggacggccggctgctatcgcgcgtctcccttccatccttctctgagggtgagcaatgtccggtttcgtggttcaggggtgtaattcggtcgaccgcaatagttcgagggaagctgttcctgtacaacgtcaccgttgggctgtacgtcatggactggtgggagcgctacctcttcagtatccttaattaa

SEQ ID NO: 54108 - DNA, 366 bp, Oryza sativa
  Clone ID: PAT_MRT4530_56243C.1
atgaacatttttatctccaactaccagtacaacctcgacctcatgggtgtcgtccgcgagcactctggtgacaaccgcgattgcgccgagcaggtcgccttcaacccgtcccacaagaagcccgacgaccagcagcaacaaagctacaacatcacccaattctccaattcacgtgcactcgagttgagaagaaagcatgctatagagaggtacgcctcccccattgccgagcagaaggaagataggaccacatacttattgttgacgttgctctcaactcctgatggacagaagagagatgttagtgatgactactcctcgctgtcaagaaggccgatagatgttggtaacttctacaaggactag

SEQ ID NO: 54109 - DNA, 252 bp, Oryza sativa
  Clone ID: PAT_MRT4530_56244C.1
atggcgcaccggatggactggcggaagacgacattgttgcgggtggaaatctcgtcgaagaggaagtcgcctagagatcgcctttgcgccggacgagtcgccggagaagagagagaaaaggtttcgcttgagcggaaagaggattggatcaaagcgaagtcggaggcggagatcgagtttggaaacagagcaggaatcggctggagtccagatcggctgcggttaggatcggctaggtctgagttgggctaa

SEQ ID NO: 54110 - DNA, 1254 bp, Oryza sativa
  Clone ID: PAT_MRT4530_56245C.1
atgtccaaggccgccgccgccgcgtcgctccctccgccgccgccggaggtggcgcacctggtggatcagctccagcgccaccacctcgcccccgacgcctccctcctctccagctgcgcccactccgacctcctccaggcgcgggaggaggtcgcgtcggagcgcgcgcgatacctggaggcactggctgtgtacgcggaggccattgctatggtggaggagtatcagcacgccatctccactggcgtcgccaacgctgggaagaagctcaactgctccccgcaggtgtacgagtcattggagcaccatttggcggttgcagaggctgcgcagaggttaaggcttccactgctctcgcaggatggagatgtacatgaggaggagatagagaagctgagcaccttgtctaggagctcattcgatagcaccatgacaagtgccgcacctagctcgagttcaatctcgactagttacaataactacagcagcaccgcaagtgcagccactgttgctgcggcccctggtactggtggttcggagccagttgagcctggtgttggcggtgttcctgatcgttttcttggaatcacatcggattatctctaccaggtgcagcaagagcagccagccatgaccgtggacatggttgactatcaacgaactctggcaagagagattgaggcccgcttagaagccaagtgtgatgctttagctgatctgtttgcaatggatgaaagggattcatcatccattagtcagatttcaagtgccagacttccagaaagggtgaagttaattattgaagagattgaaaaggaagaggcccttctactagacgatcttgcttcgatggatagaaaatttgccgaacactataatgtcctggagcaaattcttgctgtacttatacagttcgttaaagacaagaaattggaacatcagcatcaatatgatgatctgaagaagacttggcttattaaaaggtgccggacaatgaatgctaaattaagctatcttgagcatcatctcttgcgtgacacctataccaaggaaacagtaccggcactacataggatcaggaaatatctagtagaggccacgaaagaagcatccaattcttatactgaagcggtttcacggttgcgcgagtaccaaggtgtagatccacactttgataaactggagggcatgcaatggacgattcatcaggtcgaaatggatctgaagcctcaccatgaccatgcagatgtctag

SEQ ID NO: 54111 - DNA, 826 bp, Oryza sativa
  unsure (1)..(826): unsure at all n locations
  Clone ID: PAT_MRT4530_56246C.1
gggnttcatcatccattagtcaggtttgcgaggtgccaggcttccanaagggtngaagttaattattgaanagnattgaaaaggaagaggcccttctactagacgatcttgcttcgatggatagaaaattgccgaacactataatgtcctggagcaaattcttgctgtacttatacagttcgtgtaaagacaagaaattggaacatcagcatcaatatgatgatctgaagaagacttggcttattaaaaggtgccggacaatgaatgctaaattaagctatcttgagcatcatctcttgcgtgacacctataccaaggaaacagtaccggcactacataggatcaggaaatatctagtagaggccacgaaagaagcatccaattcttatactgaagcggtttcacggttgcgcgagtaccaaggtgtagatccacactttgatgtaattgcaaggcaataccatgagattgtaaagaaactggagggcatgcaatggacgattcatcaggtcgaaatggatctgaagcctcaccatgaccatgcagatgtctaggctccatctctccaggagtgcaggcatctttcatgtttgtttccagaatgtgatagcctgtggatgttgccatgcccttgttccactttacaggcttgttgtttattgctcccagctgattgccgagtaagctggatagcttctgcattatgtaaagtttaacctcaagcatgcaatatatatggagatgtgtgtttgtattgtgtaaaaaaaaaaaaaaaaaaaaaaaaaaataaaaaaaaattagaaaaatttaaaatattttttaatta

SEQ ID NO: 54112 - DNA, 293 bp, Oryza sativa
  Clone ID: PAT_MRT4530_56247C.1
ggggcaaaaacgggagggggccccctttttttttttttttttttagccccggaattttggaaaccaattggttttacatttttaccaaaaaaaaaaaaaaaggtttgaatttgggattttttttgaagcccgcaaaaacttctgaaaaccctgtcaaatttttcttttgaacctgtcgggggccccccccccccaaacccatggggaacgggaaattttctttttccgcccccccatttacaggtttacattttacccacttcccccgaaggatgaatttacttggccacggg

SEQ ID NO: 54113 - DNA, 1523 bp, Oryza sativa
  unsure (1)..(1523): unsure at all n locations
  Clone ID: PAT_MRT4530_56248C.1
aggagaaagtattattttgttaaccattattaaaaaaaatcagtctcccaaagctgccacctttgctggttttcttggtttgttcagtttgttgcttgtgtgtcccccagttgcatataaacatgggcatgtcacacctcacaacccccctttgctttggccattttctcaagcacctaatttgcttggatccttcttgcacttgcaacttgcaaaacaaccaaaggaaatactagtagcatcatcaagcgaagaaggtcagctcaaaagggcgttgtgtgcttcgcctcgcgaaatgagagtcgcattgctccggagatgatggtcgccggagtaatcaggagcaaccaggatggcggcggcggcggcgggacggtgtccggtgcggcgaggattagcccggcggtggtgttcgtcctggtgatattggctgtggtgctgttcgtgtccgggttgctgcatcttcttgtcagattcttgctcaggcgcggccgtgggcgagatggcggcggcggcggcgacgcggaggcggcggagggtgtggaggagtcggcgttgcaacggcagctgcagcagctgttccacctgcacgacgccgggctggaccaggacgtcatcgacgcgctcccggtgttcatgtaccgggaggtggtggtcggcgtcggcggcggcggcggcgcgggcggcggagccaaggagccgttcgactgcgcggtctgcctgtgcgagttcgccggcgacgaccggctccggctgctgccggtgtgcggccacgcgttccacatcgactgcatcgacacgtggctgctctccaactccacgtgcccgctctgccgcgccgcgctcggcgccgacgccgccgctctgttcgacgccgcgttcgacgagatggccgacgaggaggaccggaagcagcaggaggacgccgtgttccccgtccgcctcggcaagttcaagaacctctccagggcggtcggccccgtccacgaccgcgacgacgccgccgccgccgccgccggcgtcggcgtcggcggtggcattatcacgcgagaggaaggcgagtcgagcagcagcagcttggacgccaggcggtgcttctccatgggctcctaccagtacgtcctcgccgaggcgagcttgcaggtgtccgtacaccggaggcacggcgacggcaatggcagggcgaggctgagagggctcgccggcgccaacccggccggcaacgacgccgccgccgccgccgacgggaagaagatcggcgccggcagcaagggcgacagcttctcggtgtccaagatttggcagtggccgcggcaaggcaaggggaagctgccggtgctcgcctccgacgactcgccggcggtggacggccggctgccgtggccgaggagaagccccggggcttcctgatgctgatttcncatggtgtgtttgcaatttgcaaaactttttctagagctaattctgctcatctttttaacaccgtattaatcaatctgttcatagccaattcgttccattct

SEQ ID NO: 54114 - DNA, 2228 bp, Oryza sativa
  Clone ID: PAT_MRT4530_56249C.1
gaagaagcactacttcactagccagctagctgcacctactccgtccaatgccgtccttcgtcgacggccccactctccggtcgctgctccggccgtccaccaatggccgccggacgaaggcctcggacggcggaggaggtggtggtggtggagggatctttaagatgttcaagctcatgcccatgctgacgtccgggtgcaagatggtggcgctgctcggccggcacaacagggcgctcctggccgaccacgcgacgacggtgacgctgttcgggcagctgctgccgatgctcaccacgggatgcaagatggccgcgctgctggggcggcacagcggcggcagggcggcgcccctcctcgccgaccacgcgccgacggtgacgctgttcgggcaccggcgcgggcggctgagcctagccatccacgaggacacgcgcgcgccgccggcgttcctcatcgagctgcccatgctggcgagcgcgatgcacagggagatggccacgggcaccgtgaagctggcgctggagagcgacacccgcagcgcgcggcggcggctgctggaggagtacgtctgggccgtgttctgcaacggccgcaaggccgggtacgccatccggcggaaggacgcgtcggacgacgaccgccacgtcctgcgcctgctgcgcggcgtgtccatgggcgccggggtgctcccgccgccgcccgccgaccgcagggggggcgcgggccccgacggcgagctcacctacatgcgcgcccgcgtcgagcgcgtcgtcgggtccaaggactccgaggcgttctacatgatcaaccccgacgacggcagcgacaacggcggcgccgccggccgcgaccgcgagtgcgccccggagctgagcattttcctagtgaggaagaagggttttagccaaggccacaaggattccaagcgaggtcgcagggattccaagcaaggccatagttccaaccgaggcctcaaggatttcacccgagaccacagggatttcagcataggggttttcgtcctcaacaatcaaggcctttgggtggagctcttagggaaaatcaggtatggcaaggttgaggttaaaggtgaagctgggttaattgtgcagcagaagagggagagctctaatgtggaggctatgttaaacaaggaaaagaaaagtgaggagtcaaagacagaaggggatacaaaaggcacaggtgttcagattagtgtaaagagatggtcccatgaagctgaggctgtgggctcaaatcttggtcctgtgtttgagatagatatggaactgctgaagctagaagactgtgtaagaattaaagttggagttatggatcctggggctttaccattgacttttatccttacagatactaaaggtttaatgtatgcggcacattatcacctggaagaaattgtggaagtgggctggttccagggaaaagagaagctaaaacaaggggaggatgatggtcactctgaagggttagaggtcttgggagtggggagttcaagaaaagggaaagttgtgaggcaagatatagagaaatattgtgatgactgttgtgctttcagtggaggaaagaataaggggggaggtttacaggggcagctaggtcagagcatgagcaaaggggaaatggttagaaatttgagtcagatagagaaggatagggagttggctgaagctttacaaatggaggagcaattgaaagtgagtacagaagtgggtcagccatctgggatgggaggaaagattaaaaatgatggaagagagatgaatgaggtcatggagcaattagaggctgagggggaaagagttcagctaataggcagtgaagaaatggaatctcaggagttagggggagataacatcaaaggtaaagaagatcataagagtgaagaggaagctgaatttgaagaaggaaagaagaacaagaggctcagagataaagaagataagaagatattggaaatggcgatggaaaggaaggaagcaaaaaatgcatttatcaacaaagggcaacttgaccctgaagtaactctagatgtagaagagactgatgaggagaatgatttggactttgatttagcagaaattttgatgaatcatcttaagactccaagatcagggaagaaaaaggggagaaaaggaaatcttaaaatttgcaagggaacccccaagattaatagagacttgggaaggaggaaaacaagaaaataa

SEQ ID NO: 54115 - DNA, 329 bp, Oryza sativa
  unsure (1)..(329): unsure at all n locations
  Clone ID: PAT_MRT4530_5624C.1
cgccgtcgatcggcgccgcgtcgccggcagccnccaccatcaagagggagtacttaatggttaactaaacgtcaatggactcgatcgatggcccgcttgcatgcatggtgtctactgtgggtaaagtacgtgttgtgcttgtgcctggcttggcgtaattaggaagcttaattacccagttaaacaagtgtgtaagacacaccccggttgtgctcagttgtaacttgtaatggagttactcatactgtactccctccctctgtcttaaaattaaattaacattttgggaccgagagagtaacttgtacgagaaaaaaaaaaaaaaaaaa

SEQ ID NO: 54116 - DNA, 211 bp, Oryza sativa
  Clone ID: PAT_MRT4530_56250C.1
cgtgcctacctgggcctccggacgtcgcgcagcacgttcctgcggtggctagggaggtcctcccacaaggcttccgttgtagagaccaacgggctgtctgacgacttaaaatggagagaccacggcgctcacgctcctcttaagaaccagggatcgcgctggacgtactgaactatcatggcgccggcagcgactgacggcgctaactaca

SEQ ID NO: 54117 - DNA, 194 bp, Oryza sativa
  Clone ID: PAT_MRT4530_56251C.1
ccaccgcacgcgcatcacactcggctacacggtacactacgctggtacgaaccgggctgcctaacgctcacgtctaggggctcgccgcctgctcggtgatcaccgcgccgaggtcactagcgcgagacagtaggtccgctgagcttgacacaccagcagtccgatgaccttgaacagtcctccagtgcagacct

SEQ ID NO: 54118 - DNA, 265 bp, Oryza sativa
  unsure (1)..(265): unsure at all n locations
  Clone ID: PAT_MRT4530_56252C.1
ccgcaatctgtttggggcccccagatttggtcncctcccctttttaggtngcataacatggngaatgttattntttntntttttncntttatncattgncttntattcangaaccatnagtgtnttgaaatgtaacncttctgnnatgatgannccttccgcatntgggttgnngtgaaaatnttttccnaaaaaaaaaaaanaaaaaaananaanaaaaanaaaaaaaaaaaaaaaaaaaaaaaaaaaaaaaaaaaaaaaaaaa

SEQ ID NO: 54119 - DNA, 1157 bp, Oryza sativa
  Clone ID: PAT_MRT4530_56253C.1
cgttcgatcgatcgatcgatcctcgtgttgctgcttaattgctgtgcttctccatcgccatggccaccgaccgtgtcgaggtcgacacggcacgccctttccggtccgtcagggaggccgtcgccgtcttcggcgagcgcatcctcgtcggcgacggctactcccggcgacccagcaacggcaatgctgctgctgctgccgttgttgacatcgccattgccaagcatgaagctagcggcgatagtgatgatgctactgtttcttctccggatgccatggaagctgagcctgaggtggaggaggatgcagcgccggccgtcgtgccgatgatgtactcggcaccgtcctcgccgcagtcgtcgccgccgccgccgaacgacggcggcgacgccgacgacgagcgcgacggcggcgtggtcgacgagggggtgacggtggcgatgatgcggtcagtcaagaagctggaggcggaggtggcggagacgaggcaggaggtggcgcagctgaagaagcgggggagcgagatggagatggccgtggcgtcgctcaacgcgcagctccaccgcggcctctcgaagctggcggagatggaggccggcgacacggcagcggcggcgcggcgcagcgttggcggcgagaccgacgtgtcgtcgacggtggcgacgttcaggagcgaacggtgggccggcgtcgacgccgtcggcgcggccgtgtcgcgcgcgacgtcgtgcgagtacctgccgtcgttcagccacgcgttgagcctcggcgaggtggacgacggcgagctggtcgggaggaggaggaaggcgaggaaggtgaagcccatcgtgcctctcatcggcgacatcatcttctccaagaggaagagcaccaaggacaagggcggcgatggcttctacggcaacaatggcgatctttacagcgttctgggctgacgtcatctcactctctctgcgagtgtgatctcatcaacctgctcatgtgttgtggctgctttgtgtgcaatttggatgagcaaatttgtttttggtttttagttttggatctgtatttctttctgcttctggtttggtgtggattgtgcaggggagtttgtgtaaatgttgagcactcatcagttgattagctttatatgtttgcatcttcagcagttc

SEQ ID NO: 54120 - DNA, 434 bp, Oryza sativa
  Clone ID: PAT_MRT4530_56254C.1
gatgtgaccatgcaaactattaatacaaccgttgctcatatcaagatcatttgaccaagttttagattctaattcagccacctgctaccgtgttgattttaaacggctgccaagtgtacatacgtgctccattttgggtctatgagtatttgatagaaacatcttggaattctctttccaacagatctggcctcatcaccaaatttcatcccagtcatccacaatcacagaaacaatgtattgcatcaccaagaatgggtctatgggcttgtaacttcatctgggaccaggcccaagtgggactcatgtgggggataaggttgatctgcaccggcaagatcaacaacccacggagaggtgtatcaatcgttaaggcacaacacaacaacgtctcgtatgggtgtagtcaggtcgtcaacatttctcccaaatcg

SEQ ID NO: 54121 - DNA, 327 bp, Oryza sativa
  Clone ID: PAT_MRT4530_56255C.1
atggagcacatgtgggagagccaccgccacagcaccagcaccagcaccactggagttggagaggagctgggagaaggaagagctttgttattacctgccctccaggcgtccgcacgcaagaagaaggcgttggagccgcaggcacggaggtggcggacggcggagggcgccgacgagccgcaacaggccaaggcacgaggcagtggccggaaggcaatggcgtcgagcaagcgagggaagggccagcggagcgtcggggcagacgcgcagagaccgggggagcggagctgcagggcggcggcggcggcggcggcggcggcggcgtga

SEQ ID NO: 54122 - DNA, 450 bp, Oryza sativa
  Clone ID: PAT_MRT4530_56256C.1
gtagagctagaccacacaagggatgagcttatcacgcacttaactaattcaatcttcggacatgtcggacaagccacggcaactgcgtactgttctgacaagagccagcgcctgaagaatggtcccagctatggcgttgtgatagcgtgcagccgagaagagccactcagaggaggtcgaccacggcgaggacaacggcggctgtaagtgcggtaccagctgctcctgcacctactgcaagtgcggcaggtgacgtcacgagacatcctgacactcgccgagcggcgagtacctaccttaagttagccacaactaaaaccacccatatgagtgtgggttgtgtgtgtgctcatcatagctgaatgaaacccgtgtgttatggactgatccatcaggtggccgcttcggcgactatgcactgatcaacgtatgaatctgagtgatgcgatg

SEQ ID NO: 54123 - DNA, 468 bp, Oryza sativa
  Clone ID: PAT_MRT4530_56257C.1
ttcagccacctgctaccgtgttgattttaaacggctgccaagtgtacatacgtgctccattttgggtctatgagtatttgatagaaacatcttggaattctctttccaacagatctggcctcatcaccaaatttcatcccagtcatccacaatcacagaaacaatgtattgcatcaccaagaatgggtctatgggcttgtaacttcatctgggaccaggcccaagtgggactcatgtggggtgcgccccaaccaggcggagcacgaccctaaagaccccttggtcgtcctcccacctccttaaatagatagggataaggttgatctgcaccggcaagatcaacaacccacggagaggtgtattaatcgtttaggcacaacacaacaacgtctctcttcaattcaccgaaagatcaggccaatcatagccgtgagtgtctcgagtggagctcagggtttatcaaacatg

SEQ ID NO: 54124 - DNA, 533 bp, Oryza sativa
  Clone ID: PAT_MRT4530_56258C.1
gagccatggcacgccatctagctggcgcctgcgaccgtggccgtgctgatgctggcgcatgatatcgtgcgaaggtgttgaacggagtgcatctcaactctgtgatgatcctgagtgtaacttatgcctgatcaatgtcaaatatttccaaatgaacttgcatagttcatattaaaaataagatgaaatttcaattgacgtgcctacagccaaacaaagttgataaggcattgattgtataattgcacgatcttactgcatttgcataagcaagctagcataaacctacgttgttggccatgacggcatcacatgaaagtgctgatgtagaattctatgctcatagacatgcagcctgttcaatgcactgaagcttcttttaatctactatccttttaaatctgtctattctgaccattatcttgttgatgctactattactgcttgcatgcaaatcccatttaaggatgatatcctaaaatattaccactcttaattcaatgaagataagacctattgacatgtggaatcca

SEQ ID NO: 54125 - DNA, 4288 bp, Oryza sativa
  Clone ID: PAT_MRT4530_56259C.1
caccgagtgtgagcggcaacggcggtcagggagcaggcgtggctcgtcggcgagcggctacgggcaacggcgccttggcgtcaggcatccgccgtcactcacctcaagcttgcgggctctgcgaccaccctctcatagtcataggccacagaagcacatttgccttgtgcgtgctgttcgtctgttccactcgtgaacatcagacgcgaagattatagattcacccctgttcacagattcaggtctgtcacgaggcgtatgatcatcaactctgccacaaaatccattcaaaaatagaacagagcaatggaggcgacggcgctgagtgtgggcaaatccgtgctgaatggagcgcttggctacgcaaaatctgcatttgctgaggaggtggccttgcagcttggtatccagaaagaccacacatttgttgcagatgagcttgagatgatgaggtctttcatgatggaggcgcacgaggagcaagataacagcaaggtggtcaagacttgggtgaagcaagtccgtgacactgcctatgatgttgaggacagcctccaggatttcgctgttcatcttaagaggccatcctggtggcgatttcctcgtacgctgctcgagcggcaccgtgtggccaagcagatgaaggagcttaggaacaaggtcgaggatgtcagccagaggaatgtgcggtaccacctcatcaagggctctgccaaggccaccatcaattccactgagcaatctagcgttattgctacagccatattcggcattgacgatgcaaggcgtgccgcaaagcaggacaatcagagagtggatcttgtccaactaatcaacagtgaggatcaggacctaaaagtgatcgcggtctggggaacaagtggtgatatgggccaaacaacaataatcaggatggcttatgagaacccagatgtccaaatcagattcccatgccgtgcatgggtaagggtgatgcatcctttcagtccaagagactttgtccagagcttggtgaatcagcttcatgcaacccaaggggttgaagctctgttggagaaagagaagacagaacaagatttagctaagaaattcaatggatgtgtgaatgataggaagtgtctaattgtgcttaatgacctatccaccattgaagagtgggaccagattaagaaatgcttccaaaaatgcaggaaaggaagccgaatcatagtgtcaagcactcaagttgaagttgcaagcttatgtgctgggcaagaaagccaagcctcagagctaaagcaattgtctgctgatcagaccctttacgcattctacgacaagggttcccaaattatagaggattcagtgaagccagtgtctatctcggatgtggccatcacaagtacaaacaatcatacagtggcccatggtgagattatagatgatcaatcaatggatgctgatgagaagaaggtggctagaaagagtcttactcgcattaggacaagtgttggtgcttcggaggaatcacaacttattgggcgagagaaagaaatatctgaaataacacacttaattttaaacaatgatagccagcaggttcaggtgatctctgtgtggggaatgggtggccttggaaaaaccaccctagtaagcggtgtttatcaaagcccaaggctgagtgataagtttgacaagtatgtttttgtcacaatcatgcgtcctttcattcttgtagagctccttaggagtttggctgagcaactacataaaggatcttctaagaaggaagaactgttagaaaatagagtcagcagtaagaaatcactagcatcgatggaggataccgagttgactgggcagttgaaaaggcttttagaaaagaaaagttgcttgattgttctagatgatttctcagatacctcagaatgggaccagataaaaccaacgttattccccctgttggaaaagacaagccgaataattgtgactacaagaaaagagaatattgccaaccattgctcagggaaaaatggaaatgtgcacaaccttaaagttcttaaacataatgatgcattgtgcctcttgagtgagaaggtatttgaggaggctacatatttggatgatcagaacaatccagagttggttaaagaagcaaaacaaatcctaaagaagtgcgatggactgccccttgcaatagttgtcataggtggattcttggcaaaccgaccaaagaccccagaagagtggagaaaattgaacgagaatatcaatgctgagttggaaatgaatccagagcttggaatgataagaaccgtccttgaaaaaagctatgatggtttaccataccatctcaagtcatgttttttatatctgtccattttccctgaagaccagatcattagtcgaaggcgtttggtgcatcgttgggcagcagaaggttactcaactgcagcacatgggaaatctgccattgaaatagctaacggctacttcatggaactcaagaatagaagcatgattttaccattccagcaatcaggtagcagcaggaaatcaattgactcttgcaaagtccatgatctcatgcgtgacatcgccatctcaaagtcaacggaggaaaaccttgtttttagggtggaggaaggctgcagcgcgtacatacatggtgcaattcgtcatcttgctataagtagcaactggaagggagataagagtgaattcgagggcatagtggacctgtcccgaatacgatcgttatctctgtttggggattggaagccattttttgtttatggcaagatgaggtttatacgagtgcttgactttgaagggactagaggtctagaatatcatcaccttgatcagatttggaagcttaatcacctaaaattcctttctctacgaggatgctatcgtattgatctactgccagatttactgggcaacctgaggcaactccagatgctagacatcagaggtacatatgtaaaggctttgccaaaaaccatcatcaagcttcagaagctacagtacattcatgctgggcgcaaaacagactatgtatgggaggaaaagcatagtttaatgcagaggtgtcgtaaggtgggatgtatatgtgcaacatgttgcctccctcttctttgcgaaatgtatggccctctccataaggccctagcccggcgtgatgcgtggactttcgcttgctgcgtgaaattcccatctatcatgacgggagtacatgaagaggaaggcgctatggtgccaagtgggattagaaaactgaaagacttgcacacactaaggaacataaatgtcggaaggggaaatgccatcctacgagatatcggaatgctcacaggattacacaagttaggagtggctggcatcaacaagaagaatggacgagcgtttcgcttggccatttccaacctcaacaagctggaatcactgtctgtgagttcagcagggatgccgggcttgtgtggttgcttggatgatatatcctcgcctccggaaaacctacagagcctcaagctgtacggcagtttgaaaacgttgccggaatggatcaaggagctccagcatctcgtgaagttaaaactagtgagtactaggctattggagcacgacgttgctatggaattccttggggaactaccgaaggtggaaattctagttatttcaccgtttaagagtgaagaaattcatttcaagcctccgcagactgggactgcttttgtaagcctcagggtgctcaagcttgcaggattatggggcatcaaatcagtgaagtttgaggaaggaacaatgcccaaacttgagaggctgcaggtccaagggcgaatagaaaatgaaattggcttttctgggttagagtttctccaaaacatcaacgaagtccagctcagtgtttggtttcccacggatcatgataggataagagccgcgcgcgccgcgggcgctgattatgagactgcctgggaggaagaggtacaggaagcaaggcgcaagggaggtgaactgaagaggaaaatccgagaacagcttgctcggaatccaaaccaacccatcattacctgagctcctttggagttactttgccgtgctccatactatcctacaagtgagatcctctgcagtactgcatgctcactgacatgtggacccgaggggctgtggggcccacatgtcagtgagcagtactgtgcagtactgcagaggacctgcatccactatcctatattataatggattgtactatcgatccaactattcagattaactctatactagtgaacttattttt

SEQ ID NO: 54126 - DNA, 338 bp, Oryza sativa
  unsure (1)..(338): unsure at all n locations
  Clone ID: PAT_MRT4530_5625C.1
caatttcacacaggaaacagctatgnccatgattacccaaacgcgnaattaacccctaactaaagggaacaaaagctggagctcccaaccggtggcggccgcggctcggcactggaggcgatggcggctgggaggagttgcttgagtttttcntctttttttttgacaggggatgttgctctaatttgtgatttggatctgcttgattttgggatgattgcagcttgctatttgtcttctagttttgtaaagaaaaagtgtcaaaattatgcctaaantctttcagtttttgtctaaattttatcaaatttgtggcaaaaaaaaaaaaaaaaaaaaaa

SEQ ID NO: 54127 - DNA, 359 bp, Oryza sativa
  Clone ID: PAT_MRT4530_56260C.1
gcttggcgcgatccactgcgttcgtccacgcagacgcgcttacagaacctatctggaagcatgccgctcgccccccccacttaccgatgccaataggcagagaggaacctgatgcagcggtgctcagtcacacggtgccagcaggacaaattggatatgctcttgtccccatgattgtttggggagtgatgttgggtgctgaccagcctggattctatattgtttgacattccaccagctactgaatctcttaatgaccttaagacggagctgcctgatgctgcatttcctcttttgaagggaattgtcgcaacaactgatgttgtggaggcctgcactgtggtgaatgttgcgcatat

SEQ ID NO: 54128 - DNA, 3435 bp, Oryza sativa
  Clone ID: PAT_MRT4530_56261C.1
atgagggagctggccggcaaccctgggacgtggaacggcctctcctgcaggtgggccagccccgtcttctccgccgcgtccatgtgcgcgacggccttcccccttggcttcgccgcctacactgatgtaactggagatggaatttttgcagcaattggtcttgccaccgccgtcgcacgcgctgcccccaccaagtctcccccgaggccggccgcacgaatcacgctatgccgcattgccacgggctgccgccggcaatccatgtgcgctgatgtgcagacagaggtgcaggaggaggggaaagcgcggcggggagaagttgtcgtatatgatggtggtgggtcccacctgctgactcagcaagtcaacagggtcaaagatgccaccaacagaacaatggaggcaacaacgctgagtgtgggcaaatccgtgctgaatggagcgcttggctacgcaaaatctgcatttgccgaggaggtggccttgcagcttggtatccaaaaagaccacacctttgttgcagatgagcttgagatgatgaggtctttcatgatggaggcgcacgaggagcaagataacagcaaagtggtcaagacttgggtgaagcaagtccgtgacactgcctatgacgttgaggacagcctccaggattttgctgttcatctgaagaagccatcctggtggcgattccctcgcacgctgctcgagcggcgccgtgtggccaagcagatgaaggagctcaggaacaaggtcgaggatgtcagccagagaaatgcgcggtaccacctcatcaagggctccggctccaaggccaccatcacctcagctgagcaatctagcgttattgctgcagccatattcggcattgatgatgcaaggcgtgccgcaaaacaggacaatcagagagtggatctcgtccagctaatcaacaaggaggatcatgaccttaaagtgatagcggtctggggaacaagtggtgatatgggccaaacaacaataatcaggacagcttacgagaacccagctgttcaaatcagattcccatgccatgcatgggtaagggtgatgcatcctttcagtcacgagagccaaaaaggtgaagccagaaaggtgaatccaccgagacagtcgcacaaccatgagaggaaagagtgttcattgagcggcttacaaggttcccaaaatggagaggattcaatgaagccagtgtctatctcggatgtggccaccacaagtacaaacgatcatacagtggcccatggtgatattatagatgatcaatctatggatgctgatgagaagaaggtggttagaaagagtcttactcgcattaggacgagtgttggtgcttcggaggaatcgcaacttattgggcgagagaaagaaatgtctgaaataatagacttaattttaaaagacaatagccagcaggttcaggtgatctctgtgtggggaatgggtggccttggaaaaaccaccctagttggaggtgtttatcaaagcccaaagctgagcgacaagtttgacaagtatgtttttgtcacaatcatgcgtcctttcaatcttgtagagctccttaggagcttggctgggcgactacatgaaggatcttctaagaaagaagaactggtagaaaatagagtcagcagtaagaaatcactagcatcgatggagcttgaccagttgactaagcaattggaaaggcttttagaaaagaaaagaagcttgattgttctggatgatttctcagatacctcagaatgggaccagataaaaccaatgttattccccctgttggaaaagacaagcctaatcattgtgactacaagaaaagaaaatattgccaatcattgctcagggaaaaatggaactgtgcacaaccttctagttcttaaacctaatgatgcactgtgcctcttgagtgagaagagcacaataaagcttaaattgtatcaatgtcaggtatttgagaaggctacatatttagatgagcagaagaatcctgagttggttaaagaagcaaaacaaatcctaaagaagtgtgatggactcccccttgcgatagttgtcataggtggattcttggcaaaccgaccaaagaccccagaagagtggagaaaattgaacgagaatatcagtgctgagttggaaatgaatccagagcttggaatgataagaaccgtccttgaaaaaagctatgatggtttaccctaccatctcaagtcatgttttttatatctgtccatttttcctgaagaccagatcattagtcgaaggcgtttggtgcatcgtgttcgacatgttggtgaagatgaagtagatgttgacgaacaattttttgggcaacctgaggcaactccagatgctagacatcagagaagctacagtacatccatgttgggctcaaaagagactgtaacggggataaaggatgatttaatggagaggcgttgtaaagtggggtatctatgtgcaacatgttgccttcctcttcttcgggacattgatggccctctccataaggcccttaccaggcgtgatgcatgcactttcgcttgctgcgtgaaattcccatctctcatgaggggagtatatgaagaaaatggcactatggtgccaaaggggatcagaaatctgaaagacttgtacacactaagggacgtgaatatcggaaggggaaatgccatcctacgagacatcggaatgctcacaggattacacaagttaggagtggctggcatcaacaagaagaatggacgagcgtttaggttggccatttccaacctcggcaagctggaatcactgtctgtgagttcagcagggatgtcgggtttgtgtggttgcttggatgatatatcctcgcctccggaaaacctgcagagcctcaagctatacggcaatctgaaaacgttgccggaatggatcaaggagctccagcatctcgtgaagctaaaactagtgggcgctaggctattggagcacgatgttgctatggaattccttgggaaactaccgaagctggaaattctagtgatttcaccgtttcagggtgaagaatttcatttcaagcctccacagactggaactgcttttggaagcctcaaggtgctcaagcttgcagatttatggggcaccaaatcagtgaagtttgaggaaggaacaatgctcaaacttgagcggctgcaggtcgaagggctaataaaaaatgaaattgggttttctgggctagagtttctcctaaacatcaacgaagtccagctcagatttgagtttcacttcgatgagaaaaggataagagcagcgcgcgcggcgggcgctgattatgagactgcccgggcggaagaggaacaggaagcaaggcgcaaggaaggtgaactgaagaagaaaatccgggaacagcttgctcggaatccaaaccaacctattttattttaa

SEQ ID NO: 54129 - DNA, 142 bp, Oryza sativa
  Clone ID: PAT_MRT4530_56262C.1
gtcccgcccaacgccgttgccgctacgcccttccagttgatctatccactcaagatcgatccaagccaagcttgcccgcccctatctatgtgcctcgccgcctcggccacacctttgctgctgtcgtcaagaggaggagctg

SEQ ID NO: 54130 - DNA, 993 bp, Oryza sativa
  Clone ID: PAT_MRT4530_56263C.1
atgagcttggcttatccgctcctccgcctcccatgccgctgctcgctggcggcggcggcggtgccggcgccgccgagggcgtcgcctgggcctactatatcggtgtctatgtccgtggatgggggtgagggggagctgacggggagggagaggcggaagcagcggggggagaggcgggagctgcgggcgcgggactggaaggaggaggtgcaggagcggctcatccacgagccggcgcggcggcggaagaagccacccaagaggacgtggagggagaacctcaacctcgacttcctcgccgagcacggcccgcagtggtggctcgtgcgcgtctccatggcgcccggcaccgactacgtcgacctcctcaccaaggcgatctcacgacggtacccggagctctcgttcaagatttataatccatccatccaagtcaagaagagactgaaaaatggttcaatcagtaccaaatcaaagcctttgcatcccgggttggtctttctgtattgcaccttgaacaaggaagttcatgacttcattagggacactgaaggttgttatggttttattggagctacagttggctctatcaaaaggcagattaaaaagcctaaacctattccagttgaagaagttgaatcgattattagggaagaaaaggaggagcaagagagagttgacagagagtttgaagaaatggaaaatggaggaattgtcgagtctttcaacaaacccgttgaagattctgaactcatgctaatgaataagatcaagagacagtttaagaaaccaatctcaaaaggtggcagcaaccacaatgcttttacgcctggtgctagtgttcatgttctatctgggccttttgaaggcttcactggttcactcctggaagtgaatcgcaaaaataagaaggccactcttcagttgacactttttgggaaggagagctttgtggatctagattttgatcaaattgaggcagttgatacttga

SEQ ID NO: 54131 - DNA, 682 bp, Oryza sativa
  Clone ID: PAT_MRT4530_56264C.1
atggacctcgcggggctcctgctcgccgccgggaacggcctcccggatccgtgccggacggaggccgccacttcacctccagatccccaccagagcaggtcgacatggtgggccgactgcatcacctccaagcctcaaattgctggtgccctatgctcatccccaacctccgtgcatggggtgggtcactatcaggctgttggcgctgactccgcagcttccagcaccaccgccgtcatttggccgcgtccccgtccgattgcctcgatttgtgtccccgccgacttctactccgccaacctcagcgccgcctccagcttctcaccacgcgtctccattagccggcctccctgctggtcctcgcttccaacgtctgaggttgtgtcggccctgtcgtctatcggtctccaccaactggcctgacatcccgctcgttggaacaaaacccaacgtgcatgacaagggccccctcctccataggagagaacccaagcttgaattcttctggagagaggatgagaggaagatgatggagttttggatggctaagaatggaatggattgggagggcgccgcgtcggagtccaaccttgtcgagtccctcaagttcgggctgtccctgttgtccaggtcactccttgtccctgttgtccaggtcactccttctgcctccggtgcctag

SEQ ID NO: 54132 - DNA, 342 bp, Oryza sativa
  Clone ID: PAT_MRT4530_56265C.1
ttagtgagagagaggggatggaaatggcggatgagctgttgcactagctggtgttcggtttcctcttcaacctgggcggatacatggtggctcctgcgatgaccgacgtgaccatggacgccctttggcccggccaggacgagtgctgcatcggcatctacctaaccggcctatagcaagccgtacaatagcaagctataagccagttataaccatatatcgtgaagaaaaaagacgagagagaagaaaatgggctgcagatttatagccggctgcaacacgacttcaagactttacgtgtgtatgagagattacagggttgtgtgcttatgtggcaacttc

SEQ ID NO: 54133 - DNA, 597 bp, Oryza sativa
  unsure (1)..(597): unsure at all n locations
  Clone ID: PAT_MRT4530_56266C.1
tttttttttttttnttttnnnttcagtcaaagattcaataattatttattttcagaaaaactcttgagttttagggcaattgcatcccagtctctgaactcgtagtaatctccaatttaccaagcttgtgggactcaagtgcaaaagcaccaaacatgttagactttacaaaacttctattgattgggaaattagtaaatatagctttagattatcccaccgaaccagctttgttgaggtggcagcaagcccttatccaaccggcatgcgagctggtgagtcacttagctttcattaaaaattcacacatatattagcctcggtttggtcgtgcagatcaacacaggcagcaagcagttgcagtagtagtagcaacagcaagagcacagccatggcgcagaagcctcagccgcaacagcagtagcagcaagcagttcgtccggaaaaccacctcaaaagagagaaatggcagagcagtagctagtagtccggcaccacagtcacaccatatctcaatagtagcagccatagaaaaacaaccaggctgaagaaggagcaagtggtgttccagcagtccagctcaagaagaagaagaaa

SEQ ID NO: 54134 - DNA, 1335 bp, Oryza sativa
  Clone ID: PAT_MRT4530_56267C.1
atggccatgaagtgcctcttcctcttcttcgccttcctcgtcgccttcttccccggcgccgccgtcggcgccgggctgaaggtcgggttctacaacaagacgtgcccgtcggcggagcgcctggtgcagcaggcggtggccgccgcgttcaagaacaacagcggcgtcgcccccggcctcatccgcctgcacttccatgactgctttgtcagaggctgcgacgcctcggttttgatcgacgggaacgacaccgagaagaccgcgccaccaaacaaccccagcctccgcggattcgaggtgatcgacgccgccaaggccgccgtcgaggcggcgtgcccgcgtgtcgtctcctgcgccgacatcctcgccttcgccgcccgcgacagcgtcgccctcaccggcaacgtcacttacaaggtccccgccggccgccgcgacggcaacgtctccatcgcccaggacgcgctcgacaacctgccccctcccaccttcaacgccacggagctcgtcggccgcttcgccaacaagtcgctcaccgcggaggacatggtggtgctctccggcgcccacaccatcggcgtctcccactgcgactccttcaccagccgcctctacaacttcaccggcgtcggcgacgccgacccggcgatcagcgccgcctacgcgttcctcctccgcgccgtgtgcccctccaacagcagccagttcttccccaacaccacggtggacatggacgtgatcaccccggcggcgctcgacaacaagtactacgtcggggtcgccaacaacctgggcctcttcacgtcggaccacgcgctgctcaccaacgccacgctcagggcgtcggtggacgagttcgtcaagagcgagacgcggtggaagagcaagttcgtgaaggccatggtgaagatgggcggcatcgaggtgaagaccgggacgacgcagggcgaggtcaggctcaactgcagggtcgtcaacaagaggagcgccaacgctgagctcgagctcgagctcgccgccgccatggatgatggggatgaagtggcagcgagctaattaattaaggtggtagtagctgatctgatgtcgcgtgttcttcagaggtttcagcaataagtttgtgatcggtgttgttacttgttagatgtatgctgctgctgtttttaacgagaataagagttgctggagaagaagtttttttcttcttgttgttttttaatttgttttctgttttggcttgtgtttgggtgagtgctttggtgtgaacctgtcatgaaatcaaggaagaaatttggcgaaatgttgccgaaacggttctcgcattcagtttccatt

SEQ ID NO: 54135 - DNA, 717 bp, Oryza sativa
  Clone ID: PAT_MRT4530_56268C.1
atggagcagcagcaggagcggccgcgggaggtgtacagggagtgcatgcgcaaccacgcggcgaagctggggacctacgcgaacgacggctgctgcgagtacacccccgacgacggccacccggcgggcctgctctgcgcggcgtgcggctgccaccgcaacttccaccggaaggacttcctcgacggccgcgccaccgccgccgccggaggggcgggaggcgccggcgtcggcgtcgcgccaatgctgccggcccccggtggaggcgggccgccgggatacatgcacatggcggcgatgggaggagcggtgggcggcggcggcggcgtcgacggcggcggcggctccggggggaggcggcggacgcggaccaagttcacggaggagcagaaggcgcggatgctgcggttcgcggagcggctcgggtggcggatgccgaagcgggagcccggccgcgcgcccggggacgacgaggtggcgcgcttctgccgggagatcggcgtcaaccggcaggtcttcaaggtgtggatgcacaaccacaaggccggcggcggcggcggcggcggcggcagcggcggccccggcgccggtggaggcgcccagacgtcgtcgtcgacgaccaggggcggcggcgacgtcggggtgggcttgtcgccggcgatgggcggcgacggcgaggacgacgaggaggtgagggggagcgagatgtgcatgtag

SEQ ID NO: 54136 - DNA, 1182 bp, Oryza sativa
  Clone ID: PAT_MRT4530_56269C.1
gaaagcgaaacccgcaccaaacggcgacgcgcacggcggcggcgccctcgagcccaacgccgacgagcccccatggcgggcgtgcagaagccggccaagcggctggggggaatggcggaggcgctctccatagccgccgacctcggcttccccgcccctcccccgcgcaggaggatcagggcagctcagacaaaagcgatgatctagtgagggttttgagggaactgactgttgtacagaggaacattgccaatttgcaagtggaactacagggcagaaaggatgataaaaatattgctcatctgactcacgttagtgaaatggagaagaagtgtgaatctttggccagaatcaccactattttgaaagatgtaattcaaaacaaggatcgcattattgctcgactgcaacaaccttactccctcgattgcattcctgttgaagctgaataccagaaacaattttcagagctacttctgaaagcagcaagtgactatggggcattgacagcatctgtaggtgatttccagtggagccaaaacttcagagagtcacctgctgtatggggggaaatgcttcgaccgatacctgctgcgcttgcttcttgcacgcgcttctttgaggccatgtctgcaatgagggaatccttctctacacttcagaaattacgtgtaggtcattcttctctgtcgatgaccccgggtggatccagtgacgattcaaagttcttgacgccgcctcagtggagagagggctcaatgctcgatagctggaagcaagtggacgagacaatccctgagagtgatggactcgatgccatcaaccagaggaggttgtcatggccatcctccatcaagagggagcagtaggccaaggttcacccaacagatactccatatgtttgtgtgctgtataaataggattctggggtttcttttcttctgtgtggttactgttcagccatttgcaaaagctcccgttggcaggtgatactgacaggataaatgattacccatgacactgaatgatgttagttccttgtaacaaactatcactgggcgttaagacttaagaggcaatacatgtcccaatatttccagttgtcacgagatgattatcaatgaaaagaacagagcatttctgaacatggtttccttcaaaaaaaaaaaaaaaaaaaaaaaa

SEQ ID NO: 54137 - DNA, 150 bp, Oryza sativa
  Clone ID: PAT_MRT4530_5626C.1
atggctgtagctcttgccaagaaccggccacttgaaatgcctcctagagaaggagagggaatcatggggaagcaggcttttgtagtgaaggagtggctggaatgcaggctgcggcggtgggacaaggctagagagatttatggcagataa

SEQ ID NO: 54138 - DNA, 933 bp, Oryza sativa
  Clone ID: PAT_MRT4530_56270C.1
atggcggaagagagagaattccccttcgatcaatagggcatctctgtgaaggaatcaactctgaaggatatggtgaaggaaggcgtgatcccagcgaaggaaattatcgggtggtgcccagccttcggctatgagttcccaacattgaacactggcaaaatcgtggtatttactcctttcttctacaacggttttggtcttcccacttctaaattcttccgaggtcttctggatttttatgggatttagatttatcatctgaacttaactccatcttgcaccttgccatcatcattcatctttgtgaagctttccatggaatacgacctcatttcaatttactttgtcgaatgctttatcttaaagcccaactgactaaagaaaatccttgtgccatcagcaactctggtttctagctgtacggagctctccgcaaggattatttttcacttcctttaaaatcttcaaataaaagttggcactcagattggttttacatctcgaatctagctcctagccttcccgactttatcggtcttgcacccatccaccagtctcactggaattcctcgcctgaggaccaagagctgactaaggtcaatatcttgttataaaaaatcctcgatttgaataaaaccggtttgctaggtgaacaagtcactcggcatttcctcaaatgctgactgcctcctataaaagagatgtccaagccaacctttgagtatgaagaccaaactgatcccaatcgtgaagatcccaggtcgttagattacaaaatcatgtgctcgaggttgttcaaggtcttctcttctaggatagttatcgattactcccacaagttgccagttactccatacaatctgcatggaccacacttgcagcaagtagatctaagctctgctgattccttttttgcatggatttacaaacctt

SEQ ID NO: 54139 - DNA, 216 bp, Oryza sativa
  Clone ID: PAT_MRT4530_56271C.1
atgcaaatacaaacgagtaaaaatcatacaatgagcccccaagaaacagagtgctcatgggatgctggatctgggacagggacattgatcctgtcgtttaactgttctgactccaagaaaccaagggttattttgcatcatttcatggactgtaatccgttgatcaatatcaaaagaccaaatggaaaggaaaacgtgctgttaactgtttcatga

SEQ ID NO: 54140 - DNA, 1186 bp, Oryza sativa
  Clone ID: PAT_MRT4530_56272C.1
cgaggccggcccacgaaccagccggcaggggcccaagcctttcgagtcgtcttctccccttcttctcctcctcctcctcgattcggagctccacccgcagccatggctaagaactaccccgtcgtgagcgccgagtaccaggaggccgtcgagaaggccaggcagaagctgcgcgccctcatcgccgagaagagctgcgcccctctcatgctccgcctcgcgtggcactcggcggggacgttcgacgtgtcgtcgaagaccgggggcccgttcgggacgatgaagaccccggcggagctgtcgcacgccgccaacgcggggctggacatcgcggtgcggatgctcgagcccatcaaggaggagatacccaccatctcctacgccgatttctaccagcttgccggagttgtggccgtcgaggtgtccggtggacctgccgtccccttccacccaggaagggaggacaaacctgcacccccacctgagggccgtcttcctgatgctaccaagggttctgaccacctaaggcaggtcttcggtgcgcagatgggcttgagtgatcaggacattgttgccctctctggcggtcacaccctgggaaggtgccacaaggaaagatctggttttgagggaccttggacaagaaaccctctgcagtttgacaactcttacttcacggagcttctgagtggtgacaaggagggccttcttcagcttcctagtgacaaagccctgctgagtgaccctgccttccgcccactcgtcgagaaatatgctgcagatgagaaggctttctttgaagactacaaggaggcccacctcaagctctccgaactggggttcgctgatgcttaagaggtttctagtctactactgctagtacattgcccgtggtactcttgttttgcatctaggctagggccagtgtgaaccagcagactaccactgtgagtcgcctctgtaataaaatttgttcggcctatggccatcctcagtacgttgtcaatgtctcggtgggctgttatgctcaactgcaatgctgcatccactgaaacctctttctagatgtgttggtatgaaatgcggtattgcgttcccgatttcaaaaaaaaaaaaaaaaaaaaaaaagtggtacaatccttgttcgctgcacttcagaattaaaaaaaaaaaaaaaaaaaaaaaa

SEQ ID NO: 54141 - DNA, 3252 bp, Oryza sativa
  Clone ID: PAT_MRT4530_56273C.1
attcggaagtagggacacgcgaacgagcaacacgtcaacgcgcaacagacgaaaaagacggggtgacgtaaaaaacgcacaagaaacgagcggaacagaaagcaaggcgaatcgcccgcacacaaggatttgtgactgcttccagcactgctttgaaatatctatgtattgtatctggactatggatcgcgtgctcatgggttgcagtagctcgagctcaggctcagaagccggcaggagcaacaactgatccagtcgaaggtatgtaaaaaaattgattggattcgtgtgcaaatgtcaacgcagtggcggcgctgaacacgattctggggcgatggggaacgaagccgcccaaaacgtggaacatcaccggcggcgacccctgcaccggcaccgccgtcgacgacaccgacatcgacaacaaccccatcgtcaaccccggcatcaagtgcgactgcacattcaacaacaacaccgtctgccgcatcgtcaagctgagggtgtacgcgctgaatgttgtcggtcagatacctgcagagctggagaaactcacccatctagctaacttaaacctgatgcaaaattacttgactggtcctgtgccatcattctttggcaaatttcccatgcagtacttgagcttagcaatcaatccattatctggaccacttccaaaggaacttgggaacctcacaaatctcatctcattaggtatcagcctgaacaattttactggaaaccttcctgaagaattgggcaacttgaccaaactcgagcaaatgtatattgatagttctggcttctctggtccattcccttcgacaatttcaaaacttaagaagctgaagatcctgtggatatcagataatgatttcacagggaaaatacctgattttattgggagcttgactaacttggaggatttgaggttgcaaggaaattcttttcaaggtccgatcccagcaagtttttctaagttaaccaagttgacaagcttacggattggtgatattgtaaatgggagctcttcattggcctttattagcaacctgacgtccttaaatgtccttattgtttctcatagtttcatgtgaagtgtttactcaagtaatattgctaaacatatggcacagggacttgagttttaacaatatcacgggcgaagttcctcagtccatccttaatctgaacagccttcgatatttgtttcttgggaacaatagccttacaggaagcctgccagatgtgaagagctcctcactaaataatttagatttttcgtacaaccaactcatgggaaactttccttcatgggctaccaataataatttacaactgaatttggtggcaaacaaatttaatattcgaagcaacaacgataggtacctatcaggactaaactgcctacagcaagacactccttgtttcctcggttctccggaatactattcctttgcagtagactctggtagtaatagatctgtgagaggtttggataatactgtgtacgaagctgatgctacaagtctcggagctgcatcatactatgttacggggcaaacacgatggggtatcagcaatgtaggaaaattcaatgaggccccaaatggaagttacctaatgtacagctcgcaacaatttcaaaatgcgttggattcagaattgttccagactgccagaatgtcaccatcgtccctgagatactatggcctagggcttgagaatggaaattacactgttcttcttcaatttgcagagtttgcttatccagacacaaagacttggcaaagcatcggaaggagagtttttgacatatatgtccagggtgatctgaaagaaaagaacttcgatgtaaggaaaacagctggcggaaaatcttttattgcagttaacaaaagatacaacgcaactgtgtcaaaaaacttccttgagatacatctgttctgggctggcaaaggcacttgttgcattcctactcaaggttactatggacccatgatctctgcactaagtatcactccaaattttactcctactgtgagaaatggagttccaaaaaagaaaagtaaagctggcgtaattgctggcatagtgattggtgcgtcagttataggatcagcagccttacttgggatctttgttttggtaaagaagagaagaaaagcggcaaggcagcaagaagaactatacaacctggttggaaggcctaatatcttcagtagcgcagaactgaaattagctacagacaatttcagttctcaaaatgtgattggagaaggcggatatgggccagtatataagggtaagctacctgatggaagaattatagctgtcaaacaactttctcaatcatctcatcaggggaaaagtgaattcgtgacagaagttgcaacaatttcagccgtgcagcacaagaaccttgtgaaattgtatggctgttgcattgacagcagcacacccttgttggtttatgagtacctcgaaaacggaagcctagaccaagcactctttggacatggtagcttgaacctagattggccaacacgcttcgagatcattttaggtattgcaagaggcataacttatcttcatgaggagtccagcattcggattgtgcatagggatatcaaagctagcaacgtcttgcttgacactgatctgagcccccaaatctccgattttggacttgccaagctctatgatgaaaaggagacccatatcagcacgaaaatcgctggcacattcggctatctggcacccgagtatgcaatgagaggccatctgactgaaaaggctgatgttttcgcatttggagttgttgctctagaaacagttgctggccgatcaaacaccgacaattcccttgataatgacaagatctatctctttgaatgggcttgggggctatatgaaagagagcaaggaatcaaaatcgtagacccaaaactcgatgagtttgacagtgaggaagccttcagagtcatctatgccgcacttttgtgcactcaagggtcaccacaccagcgaccaccaatgtctagggtcctggcaattcttactggagacattgagatgactgagatggtgacgaagccgagctacatcactgagtggcaactcagaggagggaacaccagctatataagcagcaactatagctctggatctactactggtgaatttagagagcagagggagacttccccactcaccccttctccaacgataaccggagtcacatatgatggaagg

SEQ ID NO: 54142 - DNA, 1078 bp, Oryza sativa
  Clone ID: PAT_MRT4530_56274C.1
aatgatccaaagccaaatttgatacttccaagtcgcgcgtcggccgggagctgttagttgtcacacctactcatcagccaaccaattcgccatcaatagcaaaccaagcggattgatcatctcatctcatctcatcgaccgagcattctagcgagcgagcggccaagccagcaagatcgactcctcactctctcaccgatctagcagcagcagtggtagtagctagcagcgtcagcgtagcaaggggttgcgagaatggcctcgccgtcagcgccggggccgaagctgcagaaggcgatggtggcggtggacgagagcgagttcagccaccacgcgctggagtgggcgctgcgcaacctcgcgccgaccatcgcgccgccgctgctcgtgctcaccgtgcagccgctcctccccctcggctacgtctccgccgcctccttcggctcccctctgggcacccccgttgtagccccggagctgatcaaggcgatgcaggagcagcagcagcagctctcgcaggcgctcctcgacaaggccaagcagatctgcgcgcagcatggggtggctgtagagacaatgatcaaagtaggagatcctaaggagatgatatgtcaagcagctgaggaatcaaaggttgatttactgatcgttgggagtcacagccgtggacctgtacaaaggttgtttcttggaagtgtcagcaattactgtatgcatcattcgaagtgcccagttcttgttgtgaagaagcaggagtaaataagctttccgaatctcaataaaaatctttgtgtattgtcgatgtgttatcctcaacaatgcaataaacaaagccgtattagatgatattcagataactgaataatgtattgtgtaaatagtcaagattatcttgcaaataaatatccgcttcttgttgctgtaaagtaagggcgtttcctttaggagtatcatccatgtagctggcatctgttgcagaaccgaagacgatgaacacccaacttgtgtatatatgtgatatgtgtgtatgttttgttacttattcaaaaaaaaaaaaaaaaaaaaaaaaaaaaaaaaa

SEQ ID NO: 54143 - DNA, 389 bp, Oryza sativa
  unsure (1)..(389): unsure at all n locations
  Clone ID: PAT_MRT4530_56275C.1
tgtttttttttttttttgaaggtaaaagattatgattcatattattcccacgcgtccgcactcttacagantaacacttcccaagtttagcagaggtatccacaacaacaaaaggtttcttcacaaggaaaaaaacaacacggagcagatcaacaaaaggctttacaaacaaaaatgcaacactccctgttggttctcacaaaatttgcaactggctggctaaccatgaggtgctccaacataaactgacacctttaagttaacgaagtcgacataaaatgatatgtacaaatggaaatcttatatatagctttatacagctgctgctactatcaaaattagtagaccattcccaactacaaagtggaggcatgaaagtatagtaacag

SEQ ID NO: 54144 - DNA, 623 bp, Oryza sativa
  Clone ID: PAT_MRT4530_56276C.1
ctgcaggttgggatttgctgcaaagcagcagctaagatagctaagctaagctaagctagcctcactccatgctcaccgctgtctcggctttctcccaggagggtagaggagtagcagctactagcggtggtggtggtcctttcaccgggtggtgctcctcccggcggcggcggccggaggcgccggcagccatggatcggtacaacggcggcggcggcggcggcgaggagggggatgagcagctggacctcaacctgtcgctgcagccgtcgcaggcgaacgagccgccggggtacttcacctgcacctactgcgacaagaagttctactcgtcgcaggcgctgggcggccaccagaacgcccacaagttcgagcgcagcgtcgccaagcgcacccgggagctcgccgcggcgcgccgccagcaggccgccgacgaggaggcgcggcgaggggcagggaccaccaccaccagggagcccacgggcaatgcctcgtcgtcgtaccagagggcgtcgccgccggcggaggctcgccgccgggacctcctcaccgacgacatcgacctgtccctgaagctatgatcgatgattagttaattttctcggcgccggctccggctgtgt

SEQ ID NO: 54145 - DNA, 492 bp, Oryza sativa
  unsure (1)..(492): unsure at all n locations
  Clone ID: PAT_MRT4530_56277C.1
acctggccctaataagatttccgatttccaaaatcgggggtcgacattgacagggccaagtaagctggcaggtggaccgcccacatgtcactgggagangcccaacgtcattagaaagatttcgagangccggcaagggccgnacacgagtagtcgcgaggttgnagaaggttgactccatcggagaagtggggctcggcgagctcgagcaccggtgtggcgacggaccgngcgcgtggaacaaagatcatgatatcttcttctagcatgcaccaacattagctccaaactaagagagatattcgaagatatgcccaagatattccaacaattctgagcaaaaggacacatgaaataaagatggagcaaagttttagttgagatagacaaacatagcacatagtttaagtcacaattcggatgtgcatagtgcttatgatcaacatgtattttgtgttcaatctaaaaaaaaaaaaaaaaaaaaaaaaaaaa

SEQ ID NO: 54146 - DNA, 726 bp, Oryza sativa
  unsure (1)..(726): unsure at all n locations
  Clone ID: PAT_MRT4530_56278C.1
ggattcggcacgagaaaattccngacgccgcgagatatcttcttctcccttcaagaactcggacgcgtgggctcgtggcctcctgcgagcgagccgcgacgacgacgacgacctcgcgagtccgcaagaacgccgcggcgactgacctgctctgctcggctgctcgccattgattttctctgtctgctcggctgctcgcttgcttgcgctgtccagtttagctctgtctagctaggtagactgcggccatggcggcggcggtggcgtcgtcttgctgcgcctcgaccagcgctcgcccactggttcgccgcgccgggagcaggaacgggaagctgtggtgggcgggtggtgtcaggaaggcgcggctgctgtccatctccgccacggccgcggcgccgtcgggcgtggactacgcggcgggcaccggcgccgccgccgacgacgacgccgtggctgcgctcaaagtcaagcttctgagcgcggtgtccgggctgaaccgcggcctcgcggcgagccaggaggatcttgaccgcgccgacgcggcggcgcgggagctcgaggcggcggcgggcggcgcccccgtcgacctggagagggacgtggacaagctgcaggggcggtggatgctggtgtacagcagcgcgttctcgtcgcggacgctcggcggcagctcgcccggcccgcccaccggccgtcttctccccatcacccttgggcaggtgtttc

SEQ ID NO: 54147 - DNA, 422 bp, Oryza sativa
  unsure (1)..(422): unsure at all n locations
  Clone ID: PAT_MRT4530_56279C.1
ttggagggtctcatccttccttccccctccattgcatgcatgcncgtcgggttacaattaattaaaaccgcaagcgcatgcatcttaatcgcccccatgcatctccgcctaanttaaatcgatccatccatcgcctcgcgcaattaacgatccatcgatcgantcgaagctcgctagatttcgagagatcaatacatacatctcatcaatttgggttgcatttgagagagaggaagaggaagaggaagagaggaggagnagagcaaggtagctagggtagcttgggcatggccggccgccggttncttggtggcacggcggttggttgcggcggcggcggccggttggtcnggcggcggcgttggagggatcaacgttacgacggtggcgtcgangaggggtacacgccgcttttcggttgg

SEQ ID NO: 54148 - DNA, 348 bp, Oryza sativa
  Clone ID: PAT_MRT4530_5627C.1
gggttgggtttttattaaaattttttttttttaaacacaatcaggtccattggacttttttcatcaaccaaccagataacattgttttacacaatttgaacgaaccaaccaaatttttgggtccccagaaagagaagaacgtcccgcgttttaccgaactctttttaaaagcaatggacctaaccgccattttttccctgaaatccacacttacttgccgggaacaaaattggtggcgtaggcccatgccttttttttgacggggccaccaaggttgttacccaggttttccagcgtcctcttgcccgttacgatttccttaacaaaaaacccgaacatggaaaacat

SEQ ID NO: 54149 - DNA, 2793 bp, Oryza sativa
  Clone ID: PAT_MRT4530_56280C.1
atggcggcggcggcgctgcggacgccggcgactcgccgcccgctcctcgcccccttgagcatcctacgtacgcccacgcctcgccacctctcctctagctccccaccctctcaacccccgagctcccccgccggcgagctgctccgcctcctctccgccgcccccacctggacccccgacctcgcccgcgccgtctcctccaccttctccgcctcccccaccgccgacgtcgtcatctccgtcctccgctccatcaggaacccatccctcgccgccccgttcttcctcctcgcctcctcctcctccgcctcggccccgcaccccctccccgccgacgcctaccacgccgtcctcccgttcctccaccacgacctcgccgccctcgagaaggtcctcgaggagatggccgtcctcgggtacggcctccccaaccaggcctgcgcccacctcgccgccgcgctcgtccgcgcccgccgcctcgacgacgccgtcctcgccgtcgccgtcatgcggcggctcaagttccgcccggcgttctcggcgtacacggtgctgatcggcgcgctggccgaggcgcggcggcccgagcgcgcgctggagctgctgagacagatgcaggaggtcgggtacgaggtcggggtgcatctgttcaccacgctggtgcgggcgctggcgcgggagggccaagtcgccgacgctcttgcgctggtggatgaggtgaaggggagctgcctggagccggacattgtcttgtacaacgtgtgcatcgactgtttcgggaaggccggcaatgtggacatggcatggaagttcttccatgagctgaaggcgcagggtctgaagccggatgatgtgtcgtacacgagcatgatttgggtgctctgcaaggcgggaaggttaggtgaggcggaggagctgtttgcgcagatggaggccgaaagatctgtgccttgcgcatacgcgtataacactatgatcatgggatatggatctgctgggcggtttgaggatgcatataagttgcttgaaaggttgagggagagaggttgtattccatctgttgtgtcatttaattcgattctcacttgccttggtaagaagaggaaggttgatgaggctctaagcttgtttgaggtcatgaagaaggatgcagagccgaattcctcaacatataacatcatcatagatatgctttgcttgggtgggagggttgaggaggcgtataggatacttgatgagatggagcatgctagtttgtttccgaacttgttgactgtgaatataatggtggataggctgtgcaaggcaaggaagcttgaggaggcctataagatatttgaaagcgcaagccagagaggttgcaatcctgattgtgtgacatactgttcacttattgatggtttaggaaagaaagggcaggttgacgaggcctataggctatttgagaaaatgctggatgcagggcacaatgctaatcctgttgtatacacctccttgattaggaatttcttcattcatggaaggaaagaagatgggcacaaaatcttcaaagagttgatccgtcgagggtgcaagcctgatctaacccttctcaatacttatatggattgtgttttcaaggcaggtgaggttgaaaagggaagaatgatttttgaggacatcaggagttatgggtttcttcctgatgtccgaagttattccattctgattcatggtctcacaaaagctggccaggctagagaaacatcaaacatttttcatgccatgaagcagcaaggttttgctcttgatgctcgtgcttataatgctgttgtcgatgggttttgcaaatctgggaaggtgcacaaagcctatgaaattcttgaggagatgaaggaaaaatgtgtacaacctacagttgctacatatggagcaattgttgatggtcttgcaaagattgataggttggacgaggcttacatgctttttgaggaagcaaagtcgaaaggtatagaattgaatgttgttctgtacagctctctcatagatggctttgggaaggttggtaggatagatgaagcttatttaattttagaagaaatgatgaagaagggtttgactccaaatgtgtacacatggaatagcctcttggatgctttagtgaaagctgaagaaataaatgaggcgcttgtctgtttccagtcaatgaaggaaatgaaatgcccaccaaacacttatacatacagcattcttataaacggcctttgccgtgtacagaagtacaataaagcttttgtgttctggcaagatatgcagaaacagggcttggtccctaatgtggtcacttacacaaccatgatctcggggcttgcaaaggtaggaaacataacggatgcttacagcctctttgagaggtttaaggccaatggtggaattcctgacgctgcaagtttcaatgctcttatagagggaatgagcaatgcaaatagagcgatggaggcatatcaggccacctgtggatctttcaatggaattaaaatggtagcctggctacgcatggtaaaccagagctcctgctcgagttctcccctgtttggtcgatttggatcaaatttgtccttcaataggttccttttaagagatttcccttccacaagggcgttcgagagcgggcgtcccatcttccgtggccaaccgtaccacacctgtttgggagatcgcgatcacactgaaggggctctccaacatgggggagagtttatcccttctagagcatgggagaatgtgatggagtacaagatccccaacctttag

SEQ ID NO: 54150 - DNA, 123 bp, Oryza sativa
  Clone ID: PAT_MRT4530_56281C.1
gagcggtgtgaccagcggcgattggacaacgtcaagatcttcttcgatttgaggaccacctatacacctgtggttagaccgccacactcccgccagtcagactgccgccttgccagcggttag

SEQ ID NO: 54151 - DNA, 213 bp, Oryza sativa
  Clone ID: PAT_MRT4530_56282C.1
cgccacccagctcaaccagctgcacctgcacgaatcttgatatccaactcaccacctcagtgcaaacttcgaaatgggccggaagcattctcccgtcagattcggcccaagagcgctagagatagaaggcccagactagcattcggccctaatagaagtggagcccaactacagataaaagctagctgtgctgtcggcccaaatacaagtgta

SEQ ID NO: 54152 - DNA, 153 bp, Oryza sativa
  Clone ID: PAT_MRT4530_56283C.1
atggggaacatgtataatgacatcaaggactactggactactaatcgatcgatcaggttggttgagtttgctgatccatgcctccaagcgcctagaacaccagaagtccagaacacatccgcgacaatcccaaacagagatgataaaatatga

SEQ ID NO: 54153 - DNA, 1067 bp, Oryza sativa
  Clone ID: PAT_MRT4530_56284C.1
atgagaagcacggcgaggcaagcggcgaccgcggcggcgttcgcgctcattgtcttcctcgtgctgctctcgccgtcccctactgccgccgccacagccacaacgagaaggttcaagtagggcctgaagataccatcgacgcccggcggagccagcatctggacctcggcggatcactggtcggcccggagagcgtcgcgttcgacggcaaaggccgcggcccgtacagcggcgtctccgacggccgcgtcatgaggtggaacggcgaggccgctggctggagcacctacacgtacagccccagctacacgaaaaacaagtgcgcggcatcgactctccccacggtccagaccgagagcaaatgcggccgcccgttgggcctacggtttcacttcaaaaccggcaacctgtacatcgccgacgcctacatgggattgatgcgagttgggccaggaggcggggaggcaaccgtgctagccacgaaggctgatggcgtgccacttcgcttcaccaatggggtggacattgatcaggttaccggagatgtgtatttcaccgacagcagcatgaactaccaacgatctcagcacgagcaagtcacggcgaccaaggattcgaccggacggctcatgaagtatgacccacgaactaaccaagtcaccgttcttcaatccaacataacctacccgaacggtgtcgccatgagcgctgaccgaacacatctgatcgttgcgttgaccggcccatgtaagttgatgaggcattggatccgaggcccgaaggctggcaagtccgaaccatttgtcgacctgccaggctatcctgataatgtgaggcctgatgggaaaggtggttactgggtagcgctccatcgcgagaagtatgagcttccctttggtccggatagtcacttggttgctatgagggttagtgctggtgggaagctggttcaacagatgagaggaccaaagagcttgaggccaaccgaagtgatggagaggaaggatggcaaaatatacatgggaaatgttgaattgccgtatgtcggagtcgtcaaaagcagctag

SEQ ID NO: 54154 - DNA, 990 bp, Oryza sativa
  Clone ID: PAT_MRT4530_56285C.1
atgaggaccacggcgaggccaacggcggcggcgacggcgctcgcgctcatcgtcgtcctggtgttctcgccgtcccccgccaccgccgccacagcgagaatgttcaagaccattgacgcccgacggagccagcatctggacctcaccggatcactcgtcgggccggagagcgtcgcgttcgacggcaagggacacggcccatacagcggcgtctccgacggccgcgtcatgaggtggaacggcgaggcggctggctggagcacctacacgtacagccccagctacacgaacaacaagtgcgcggcatcgactctccccacggttcagaccgagagcaaatgcggccgtccgttaggcctccggtttcacttcaaaaccggcaacctgtacatcgccgacgcctacatgggattgatgcgagttgggccaggaggaggggaggcaaccgtcttagccacgaaagctgatggcgtgccacttcgcttcaccaatggggtggacattgatcaggttaccggagatgtttatttcaccgatagcagcatgaactaccaacgatctcagcacgagcaagtcacggcgaccaaggactcgacgggacggcttatgaagtatgatccacgaaccaaccaagtcaccgtgcttcaatccaacataacctacccgaacggtgtcgccattggtgttgaccgaacacatctgattgttgcactgacggggccatgtaagttgatgaggtattggattcaaggctcaaaggctggtaagtccgaaccatttgccgagttgccaggctatcctgataatgtgaggcctgatgggaaaggtggttattgggtagccctccatcgtgagaagtatgagctcccctttggtccggacaatcacttggttgctatgagggttagtgctggtgggaagctggtgcaacagatgagaggaccaaagagcctgagaccaactgaagtgatgggagaggaaggatggtaa

SEQ ID NO: 54155 - DNA, 551 bp, Oryza sativa
  Clone ID: PAT_MRT4530_56286C.1
gacaaagagggggaacatgaatctttcaggtatcagcacaaaccagggggacaaactattcatcaccagcaactatgccgcttgaagtaggtatcttagagacacagggagcaccagagctaccaaaccaaaaaacaagtgaggatcacaagctgacagacaagatcactaacgcccatgaacaggaaaccttcatattacagcgatatccaataagaataaatgtccaaaaccgatgaccaccatccaaaccggcacagacatgttggatagatcatgcttgaaaacaccctcaatgcttaccatattgagggataactgccactagaccgagagcaaattcaagatctttctgctcacgtggcagaatatccgcttgctgacaatcacgaaagctaccctgacattggtcgaggccagaccagacgaatccatgaagaacagccctacagcctcatcaagtgccgcgtcttcctctaccggggctttacggatattattcatacacacttggtggccaaaagataccgctacaggcgcctcgaatgcgt

SEQ ID NO: 54156 - DNA, 398 bp, Oryza sativa
  Clone ID: PAT_MRT4530_56287C.1
tcggtgctcctctggacagaccagttggtgagttcacattgagggaggcaacaagggaagggcgctgcccgccccccacgcggatctgactgcgacgctgccgtcctgcgagcctgatacatctacacaacgctaactgactaagatgggtgccagccgcatggatgacggcaatggagctggaggagcaacagaagctgctcggtcggaccaggcacgaagcggccgttcaccggtcaccgacggacaacccggcgacaacgctggggcagatcaagtaggccataccgactcactgtttgcaggactagctgatcaagaacttgtgctacctgactcataacctcccgatcgaacacgggactgtctacttctggctggacatgaaccccatgctg

SEQ ID NO: 54157 - DNA, 1740 bp, Oryza sativa
  Clone ID: PAT_MRT4530_56288C.1
acgcacgcgcgcatggcggcggtcgcgctgctctcgccagcggcggctgcggcggtggtgacagagggtgaggagaagccgccgctggaggaggtggaggtggaggtggaggtggtggtgcgggcgatcgtggccgacggcgacgggagggaggcgaatgcggcggcgccgggggcgaattggtgcggggaggaggaggtgccggcgcatgcagcggaggggggcacggtcgccgcgatggtggacgagaatgcggcggcgcctgcagcggagggggacacggtggccgcggcgaagggggaggcgcctgcagcggagggggacatggtggtcgccgcgaagggggcggcgcatgcagcggcggagggggacacggtggcggcggcggcggtagcgggcgagaacgaggcggcgcatgcaccagcagcgggggggaacacggtggccgcggctgcggatgtcaagggcgaggcgcttcaagcgattccggtggccgacgaggcggcggccgtggcggagggggttaacgcgatcgccgcggcggagcgggaggaggacgacgagggggtgaagtggctgaagcactactcctccctccagagcatactcaccgtcggggacggggacttctccttctcgctggcgctcgccaccgcgttcggctccggcgacaacctcgtcgccacctcgctggacaccattgaggacctgaggggcaaatacagcaaagcagaatcaaatataatggagctgaaaaggatgggggccactgttttgcatggcatcgatgcaaaaaggatgaaggatcacaccaacctgaagctgagacggtttgatcgaattatcttcaattttcctcatgctggattcaaaggaaaagaggatgatttgcatatgatcaatttgcacagggagttggtatggggtttttttcagaatgcaagacacctgcttcgaccctatggtgaaattcatgttagccacaagataggattgccatatgacaggtggtgtatcgagcatctagcatatgagtcttctcttacaatgattgctaaagttgatttcagaaaagaggactacccaggttacaaccaaaagagaggagacagtgcaaagtgtgatcaaccttttgaactaggtgcttgctgcactttcatgttcatgagagatttgacgaggctgaaaagggcacgtcggaacaggatcaatgcatcttcactgggaatccaagcccaacatgacatgccatttcacccacgtccgcttgttccagcatatcctcagccacatttcccttcacaagtcaatgcagctcacaggcaagttcctccagagcattaccccctcggaattgctcatgggcaagagccaggttttctagataactttggtggcatagagaggtatccttaccagcgtggcgctatcgggacagtgatcggcatgccaggcactccttcaccaatgcgcggaataaccagaagtagcttccctgcacctcaggagcagccttggcgtcaagagagatatattatggatccagaagtaagagatgatcactaccattttgcccgggaatacccgaggaatctgcaggagtatgaaatggagaggcaggtgatgccaggaggaaccaggttgaggtacgtcgatttcctggaaaatcgttacgaggaatctgttcggaggcaggagcacctgcgaaggctgattgcagagtatggtggatacgactga

SEQ ID NO: 54158 - DNA, 516 bp, Oryza sativa
  Clone ID: PAT_MRT4530_56289C.1
atgggggatgacgacggtgagcgcctaggcgtagatgatgaggaaggcgaagaggaggttggcggcgacgccgacggagacgacgaggaggtggtcgaggacaggccggttgcccaggaggcttgggtcgtcaggtgggaagccgaagtccgggtcgtcgtcggggaagccgacgtatccccgagcgggatggcacagagagtgtactcgacgggggcgaggcgaaaatgcgcgagggccggggtgaagccaacggagaactgggagacgtggatgccgtcggacgtggcggcgacgaagtgccccgacttgtggacgaggacgatggaggcgaggacggaggcggcggagtcgaccgactcgacgctagcgaggacgtcggacaaggggtcgccgccgcgtcgccggccgccaaacctctcgcgacgccatgtcgttgaaccgtcggctcctggagatggagatgggagaaagatgaagagaggggagatgtggagagaggaggggagtgaatga

SEQ ID NO: 54159 - DNA, 165 bp, Oryza sativa
  Clone ID: PAT_MRT4530_5628C.1
atggctgggcacctcttggttcgtcatgtcccttatacaacagggacttgcaatgaagatgttgatgaagaagtcaatgtagacaatagccggatgaacgtggctttagcaccttcggatgatggatctactattgatccagttgatatgatgacgagcccataa

SEQ ID NO: 54160 - DNA, 1272 bp, Oryza sativa
  Clone ID: PAT_MRT4530_56290C.1
ccacgcgtccgggagaattttttttctcttcttttccatcaaagttcgttgtcctctcaacatttcttcgcttcctcaagcttgttcctcgcatgcgtgtaaactgagaatttaccaagtttttgttcttctcacgatcgattgataatataattgcatgacgcgcatggaggagtcgagttcttgatcgatcgagcgagcgatcggtcaaaacattcggaagaaatcgttgacgaggcaaagcgatccaggagaagccattcgatcggatttgcgagagagatcatgcacaagcgatccaaatcctgcgagccgtccagcgagatggacgagcgccgccgccgcggcggcgtcggcggcaatggcgcgacgacctgcgacgactcggcgtgcggcgccagggcggcggcgtcgtcggcgtcgtcgtcgtcgtcctcggcgacgacgtcgcactgctccagcgtctccgtctaccgcgccaagatcaacggcgccccgcgccacgtgaccgccgtgtggcaccggaccctcatcaaccagtccttcaccatctccatcgacggcggcggcggcggcggcgccggagccggggacgacggggcgctcagccacaaggtggagctgaagccgtggccgttctggagcaagaggggcgccaagacgctcgacgtcgacggcgaccggctcgacatcgtctgggacctccggtcggccaagttcccggcgagcagcccggagcccgccgccggctactacgtggcgctggtgagccgcgacgaggtcgtcctcctcctcggcgacggcaagaaggacgcgttcaagcggaccaggtcccgcccgtcgctcgacgacgccgtgctcgtgtcgcgccgcgagagcgtctccggcaggcgcaccttcgccgcccgcgcgccgctcgccgccggcagaaaggaccacgagatcgtcgtggacagcgccatcgccgggccgagggagccggagatgcggatcacggtggacggcgtcgtgctggtgcacgtcaggagcctgcagtggaagttcaggggcaacgagacggtgatcgtcgaccagtcgccggtgcaggtgctctgggacgtccacgactggatcttcgccggcggcccggcggcgcaggccgtcttcgtcttcaagcccggcgcgccgccgccgggcggggacaggtgcggccgccgcggcggcgccggcgccggcggcatcggcgacgaaggtggctacagcttcttcctccaggcgtggaagacggagtga

SEQ ID NO: 54161 - DNA, 274 bp, Oryza sativa
  Clone ID: PAT_MRT4530_56291C.1
gtgccaaaccgacggacctactcagtagtcgcactaatccctataggctgtactacccagattccttgtcgctccacccttgtggtaccttggtatccgtgctctctgagcgcgtgtaccaaatatcccgcatacaccgttgattgtcgaaaacttgggaaatgggtttgtgaagccttgaaaacccgacatgtggtgtcggtgtgtttgaaaataaaatgaattgcgaaaactcgcgatgcgggagctgtgcctacgtggcgttgtcccgtat

SEQ ID NO: 54162 - DNA, 323 bp, Oryza sativa
  Clone ID: PAT_MRT4530_56292C.1
cggacgcgtgggattttaacttgctcaaatagctgtgggagctactagcctgtctattgagttcctgtctctgtgctcttctcttggctccggtctttagccgaggcgtagatgcatggcaaagccgacaaggggctgccaggcagtgcagatttgataggttacaagcatttgaacccctaagaaaggtgcgagcggaagctggggacacagactgctttggatgagagaaatgagcagcggctatgcgctggggagtttggcattcggcaggtgattgaaccacgaggacttgggggaccatagaactggacactgctgct

SEQ ID NO: 54163 - DNA, 327 bp, Oryza sativa
  Clone ID: PAT_MRT4530_56293C.1
ccggccgggatagcctatagcgcgctctggacgcgacgacaccgagtcaccgacgaacgagcgcgacgccgacgaacgagcgcgcgacgccatggacgagcggagagctgctgcttccttgctcgccgtgctggttctgagcctcgtggtgtccgcctcctccgccgccgccggcgtggcgcccgcggcgccgccggatgttctttcttccccagccgccgccgccggcgaaggtgaaggtgaagcggaggcgttgctggccgtcaaggcggcgctgcatgacacggccaacgtcctcgccgactggaacgccggctcaggcggcgt

SEQ ID NO: 54164 - DNA, 424 bp, Oryza sativa
  Clone ID: PAT_MRT4530_56294C.1
cctagcataatagcgtttgcgcctatgaccacagccgatcttggagctctcgggatgctacaccgcattcagagtgtccccctcgctctgtacgatgactttggcctgtttttcttcctctgagttagtctgtttcagctcacatttgcatcactgttcttgattcggttgattcgatcgggatgactttatgatcaatcttatatctctatgtgatacttgctgattcgtgctcgatgcacacggtcttatgggattatcacctggttactcccacaatgacattgtgatagcaacttccgcacagatcaacactgccgcctgactatttggcttcaataagatgtgtggtttcatgaacacctggtcctgagggggcgtcttcagcggcaacgtggttggcttagatagctgcttcaaaaac

SEQ ID NO: 54165 - DNA, 1525 bp, Oryza sativa
  Clone ID: PAT_MRT4530_56295C.1
gcacgagggagagagagaactagtctcgaacaggtagttttttttttttattttctaggattggaactgccattatttagttacacgttgcatataaagtgatataaacagttttacagttttgggatgaataatttacacaaccagccgaggacgcgacccaacgccctaatgctgtacataatgcaacacaatcacatgcattggagatgacgagaaggacgaagatgagagaattgggctatacacaactgtaaccagacgcatcagcaacgtttgaaagaattgactagctctacgattttggaccctacttgagctattatacacagggctggattccggactccatttccggcatccagttttggtccatgtacaggccaccagctatcagaattcctggcaggagatggggaatgcacagacacttgacagaagcagcgcaagagtggcttcgaaactctcacgccttcctgccccttccaacggagcagcttgacattcacattttatatggatcaggtaaccatggataaggagaacctttagaatgcaaaagatgacagtttgcaagaaaagaagcatgccgcccaattagcagttctgctgttcttagtcctgctgcagactataggatacctcacatttgtacttgttggcatccttatgtcagcccgacgtttgttccgaaatgttgtttggtgtgaattgtgcacgagcagggatcaagagctgttgctgagggcgtggagctcctgtttccacaaaagtggcagatgttagaaatattaataatatagggtgtgcgcgcaaaagtattctcaatccattcatcaaagattgacttcttgcctggaggatattgttgctgaactgttgacatgcgtacaacatttgcagcattctgattagatagcggcagaatgtgacctggtacatagccaggtgaatacggttgatcacctggcacaggttggccaaactgcccatatgggtaaactgctgggcctactgtcctgggaccgccatatactggaacatactgttgcccaacatatgaaccatatgcattctgaggatacatgtattctggcccataagttgatggtatgccccctggaaccgccacacctccattgtatgggatgaccggccttaaaggtgcgaaaggtatgtctggcccaggacggcctaggatggcaaggttacagtttgcgcggcgcccgtcgatcaccgggtacgggtccatgcacgccattctcgccgagtctgggtcccggaaggtcacgaatccgtagcccttggacctccccgtggcgcggtcggtgatgacgacggcctcgaggatctccccggacccctcgaagtgcgccctcagcccctcgctccgcgtctcccacgcgagccccccgacgaacaccttggtgtacgtcgtgtccccgtacggcccgctcaggtagtgcagcgccggcgtgccccctccccccgccgccgccgccgccggagaccgctgcggcgtcat

SEQ ID NO: 54166 - DNA, 220 bp, Oryza sativa
  Clone ID: PAT_MRT4530_56296C.1
acttcatcccttcaaccaaatagaaaatataatcagtcccatctcaaactcttggttgaccaacatggtctacagctcctgcctttctttacccttccgctttccttcaaccgttagaacaaggcttctcatctatagggagagctgcccattattcttctacaagaggaatccaagagaaaaaaaaaaaaaaaaacagagcggccgctcccctcgtgcc

SEQ ID NO: 54167 - DNA, 1170 bp, Oryza sativa
  unsure (1)..(1170): unsure at all n locations
  Clone ID: PAT_MRT4530_56297C.1
cgcgacccaacgccntaatgctgtacataatgcaacacaatcnacatgcatggagatgacgagaaggacgaagatgagagaattgggctatacacaactggtaaccagacgcatcagcaacgtttgaaagaattgactagctctacgattttggaccctacttgagctattatacacagggctggattccggactccatttccggcatccagttttggtccatgtacaggccaccagctatcagaattcctggcaggagatggggaatgcacagacacttgacagaagcagcgcaagagtggcttcgaaactctcacgccttcctgccccttccaacggagcagcttgacattcacattttatatggatcaggtaaccatggataaggagaacctttagaatgcaaaagatgacagtttgcaagaaaagaagcatgccgcccaattagcagttctgctgttcttagtcctgctgcagactataggatacctcaaatttgtacttgttggcatccttatgtcagcccgacgtttgttccgaaatgttgtttggtgtgaattgtgcacgagcagggatcaagagctgttgctgagggcgtggagctcctggaggatattgttgctgaactgttgacatgcgtacaacatttgcagcattctgattagatagcggcagaatgtgacctggtacatagccaggtgaatacggttgatcacctggcacaggttggcccggacgcccatatgggtaaactgctgggcctactgtcctgggaccgccatatactggaacatactgttgcccaacatatgaaccatatgcattctgaggatacatgtattctggcccataagttgatggtccataagaaggatatacaaatgcctgtggatagttgtaggggggttgctgatatgttgggctttgcacatacatgccccctggaaccgccacacctccattgtatgggatgaccggccttaaaggtgcgaaaggtatgtctggcncaggacggcctaggatggcaaggttacagtttgcgcggcgcccgtcgatcaccgggtacgggtccatgcacgccattctcgccgagtctgggtcccggaaggtcacgaatccgtagcccttggacctccccgtggcgcggtcggtgatgacgacggcctcgag

SEQ ID NO: 54168 - DNA, 539 bp, Oryza sativa
  Clone ID: PAT_MRT4530_56298C.1
acaagtaaaaactcaaaatcccttatattatggaacggagggagtagtattttctagtgaaaaatacgttgaaaagctagtgccatttatttacacagtagtatagaaggtggaaaacaaaggcgtttgcttgctactattctgcatctgtacatctacaaaaacactgtaaagcggggtcggatcagctctggcttagtgacttgtgtcctggccatcgctgctgacctccatcttccgggtctgagctttgaacaagctagcaacatcagtagccgtgctacaatcctctggactccgatctggacgagagcgtatgtacctcggcatcctcactgagatcccacgcgacggatggaccagaccaatagccgcatggtgaacaggggatagcgtgaggtctgcacctcggatttcccaaacctgttccgcagaaaaccacaactccggaagctcgtctgttttgtagtaaacaggtttcttgggcagtattctgtcgccagaatagaactccttcatctctttatagaactcatctg

SEQ ID NO: 54169 - DNA, 789 bp, Oryza sativa
  Clone ID: PAT_MRT4530_56299C.1
atggacgaggagatgttgacgaggcaccgccgggaggacgactccgctggcgcaggcaacctagctcagcacagcgcggcaggggcgaagccgattgcggcggatgccaggcagaacgacgaaaccaacctcttcaagacatctccaactgagaaaaacttcatctctggtgtgggggaaaagagcaagactgagtactatccactgtactcagcaagtcataccggaagaggaggcaacgggcagcccccctttcgtgccgcggtgaatccggaagccgatcaaccggacaccccggccgacccaactccatcacgcccaccctcgcctggcgacggcaaccggcggcgggaggcggcggcggacggcgcaaagacggcggcggcggccgaagcggcggcgcgagcggccctagcggcggcgctacgcggcgggctgcgcggcaaagggagagagaggaagagagggagaccgatcctcaccgaggggctcggccggcgcgagggaggagcgacggcgaacggcaacgacgagagacgggaggacgacggcgacgggctccgggttgccctaagagagggaaagagagagattagagggagagagggagtctacggcgagcggaaaccatggccgaaggcggcggcaatggtggaagctcaccggagtagggagaaacgggctcggacgacggatttggccgagcgaacggcggacgcgacggctcaagggatggcggacgcggcggcgccgatggcggggtgcggcggcgaccctagcggctgctag

SEQ ID NO: 54170 - DNA, 744 bp, Oryza sativa
  Clone ID: PAT_MRT4530_5629C.1
tggcggtggcggaggccgctggcactcccaggacttggtgaaggaggtcaaggtggacctacggtagacaaaagcctcaaactgactgctcagctgtatgttgtctcttggtatgtgattaagacaagtatccatgatgtagacgctgccacctccattactattgtcgtcgtggtcgtccttgtcatcggcactggggatgaagatggagtagggcaaacacttgggcttgtggagagagggcaaggtatccactttgcacgtatcggcatcgaagaggcaggcgcggccagattggtctgtgcagagcaccttgcgacctatctttaacgttgctgccgcttccttctcgttattgtcggcacccgcccatggggtggagtcttgtgggcgttctgattcagatattttcccattcagtatcagtgcagcaggtgttgtagtgttgaacaacttgtagcgcgcgagggtgaggtcgatgcagcgcagcgatttggctccagggatgcggttgtccacgatcaggttcagaaaccgacgagagaggcccatcgtcgattggattgggattggatataatggtcagcatagcagcagaagccggcgattctactcgatcccaagtcgactgaactctcctcgctttgtctttccttgcgatcgattcagctaacagccgcccggcagcgatgcctttaaagacggaaggaacggatggctgaggcgagctggagaatggagcga

SEQ ID NO: 54171 - DNA, 135 bp, Oryza sativa
  Clone ID: PAT_MRT4530_562C.1
atggcgtcatggcgatgtgccaatggcttatcagaacagtgctgtccaacttttgatccagagaaatcttggaggatgccgcaggataattggataagattgggagatgaagacgggtggggcatgaggccatga

SEQ ID NO: 54172 - DNA, 239 bp, Oryza sativa
  Clone ID: PAT_MRT4530_56300C.1
gtgtacttcgatcaggctcaagctcaagcccaagcctatgtgggccctaaactgtgcctcaatatcggtatttacccaagtacaacactgtctccctgtagcattcctaccgtcggtggtatctgtcccccccccatatatagtaccaggagagaaaaataaatcatgcatcatctgtgtgacaattgaaacatcgggtgatacaaatctgaataaaaatggtcatgcaaatttagaac

SEQ ID NO: 54173 - DNA, 711 bp, Oryza sativa
  Clone ID: PAT_MRT4530_56301C.1
cgggctgcaggcttctgtatgcaactatggcgagagtttcatatcatccatctcaatgggcaacattcaggcagttcagtttcacccagaaaagagcggagctactgggctttcaattttgaaaaattttctcagtccaaactcttcaggatcaaaggtcccatctcgtaggaaagcatcgaaccttgcaaagagagtcattgcatgtcttgatgttcggtcaaatgatagtggggatcttgtggtaacaaaaggtgaccagtatgatgtaagagaccatagtagtagcaaagaggtaagaaacctcgggaagccagtggatttagcaagccagtactacatagatggtgctgatgaggttagcttcttgaatataactggtttccgtgactttccgttgggagatttgccaatgctagaggtattacgttgtgcatctgagaaagtatttgtgccacttacagttggtggaggtataagagacttcacagatgcaaatgggagatactactcaagtttggaagtagcgtcagagtacttcaggtctggtgctgacaagatttcaattggtagtgatgccgtttttgctgctgaagcctatttgcagactggtgtaaagacaggaaaaagcagcttggagcaaatctctagagtatatggcaaccaggcagttgttgtaagtattgaccctcgaagagtatatgtcaagaa

SEQ ID NO: 54174 - DNA, 2814 bp, Oryza sativa
  Clone ID: PAT_MRT4530_56302C.1
attacgaaattgcatttccaatccatggcctatgaattaccatcttattcccaaaatagaacacacaactgttacaaagccctgatttattttcccaatagatcaaaggatttccatcctacactctgacctccacgccagcatctaccagatgctctttcactgctgaaatcggaacctctttccgatggaaaatgccagcagcaagggcagcagaagcatttgttttctcaaagacctcagaaaaatgttcgacagtaccagcaccactgcttgcaatgacagggatagtcacagcatctgacaccatttttaccagatctatgtcaaatccgcagccctggccatcacaatcaatgcaattaagaagtatttctccagcacccaattcttcaactgctttggctagttcatatgctcctataggacggctgtcacgcccaccacttactgtgcactggtaccatgcatattcttctcctaatggacctttattggacacctttacagttttgaattgcacctcttccggattcttgacatatactcttcgagggtcaatacttacaacaactgcctggttgccatatactctagagatttgctccaagctgctttttcctgtctttacaccagtctgcaaataggcttcagcagcaaaaacggcatcactaccaattgaaatcttgtcagcaccagacctgaagtactctgacgctacttccaaacttgagtagtatctcccatttgcatctgtgaagtctcttatacctccaccaactgtaagtggcacaaatactttctcagatgcacaacgtaatacctctagcattggcaaatctcccaacggaaagtcacggaaaccagttatattcaagaagctaacctcatcagcaccatctatgtagtactggcttgctaaatccactggcttcccgaggtttcttacatcatactggtcaccttttgttaccacaagatccccactatcatttgaccgaacatcaagacatgcaatgactctctttgcaaggttcgatgctttcctacgagatgggacctttgatcctgaagtgtttggactgagaaaatttttcaaaattgaaagcccagtagcttggtgatcaagaccagtcaagttatcagaactcaagaatctacatgtttcaatcctgtctccgctcttttctgggtgaaactgaactgcctgaatgttgcccattgagatggatgatatgaaactctcgccatagttgcacacagaagaaatccactctttgttttcatctgaattccataagtccactaacgaaagagcatctaaaaaagagctgttccttacaggcagagcatgataggagtgaacaaagtaacacatggtggccttcagctcccttgagcagctgcgtgtctttggtgatctcccaaagcattccagccaatgtgaggcacaatgagacccttcgaagagtcaaatcgcctgacaactcccaggtatcacaccaaggccgcttatcgggccattctcctcgctagagtcgaagagaagctggaggccgaggcagatgccgaggaaggggcggtccctgcggatgtactcgcggagcgcgtcggccatcccggagcgggtgaggacgtccatggctgagccgaaggcgccgacccccgggaagacgaggcggtcggcggcgaggatgtcctccgggctgcgcacgtcgcggatgccgaagccgaggtggcggatggcattgcgcacgctgcgcacgttgcccgcgccgtagtccagcagcgtcacggctgctgcgtcgcaccggtttatgcctgaccgccgagctccggagctgcccgcctcaccttctatccgcgacgccgccgaaaaccacttcggtcttaacgccgccgcctgtcctggagcaccgccgcgcacagggttcgacttcccactgtcgtcgcatccgggaccccgccggtaacgacccctcccagatttcagcttgaggaagatgcttgtcacgcccagaaatttagcccaaatttccagactattttgtgtattaaatcccttagggttcgcccccgtccccagcaggcaacgggcagcccccctttcgtgccgcggtgaatccggaagccgatcaaccggacaccccggccgacccaactccatcacgcccaccctcgcctggggctgacgtcagcaagaggtggggcggcgccgacatgcgggccccactggtcagcggcactaagagagggagagggggcggctggcaggcgggcccactgggcagcgtcacaaagggggggaaggcggcctggctcggctcggcttcaagccggccggccggttatggcgagggcggcggcgcgcgcacggaggcagcggcggacggcgcaaagacggcggcggcggccgaagcggtggcgcgagcggccctagcggcggcgctacgcggcgggcggcgcggcaaagggagagagaggaagagagggagaccgatcctcaccgaggggctcggccggcgcgagggaggagcgacggcgaacggcaacgacgagagacgggaggacgacggcgacgggctccgggttgccctaagagagggaaagagagagattagagggagagagggagtctacggcgagcggaaaccatggccgaaggcggcggcaatggtggaagctcaccggagtagggagaaacgggctcggacatcgtatttggccgagcgaacggcggacgcgacggctcaagggatggcggacgcggcggcgccgatggcggggtgcggcggcgaccctagcggctgctag

SEQ ID NO: 54175 - DNA, 1177 bp, Oryza sativa
  Clone ID: PAT_MRT4530_56303C.1
atggcttcagctccacttccacaggcagatcaattagggtataaaccaaatgtcttctccttctggatcatttttcttcaactgaggttgattaattattgcaagcggaggaaaaccagcggacgggctttactttggcgctgcgatgccgaagaaggcgacgacaatgtccagcaaccacgaagtcgacggcgaggctcggtcgaagcaaaggggaggggcggcgccggcaagcgggccccaccggtcagcggcacaaaggcgccggtccaccgtggaccgggaccaccgaggcggtccaccgccggtccacgggatccgacggcccggatcggcccaaagccgatcggacggccacgaggcggcgcggctggggcacgggcacggcatgaagccggctcggccgagacatggcgcggcggcggcaagggggaggcggcaagggggaggcggcaaccggctgcagcagccggcgacgtggaacggcggcgggtggccggaggacagcggcgcgcacggggacggcgacgcaccccaagaggcggcggtcggcaagaaaggggacgggaaaaaaggaagggaggagagatcctcaccggaagcggcggccgacgcggaggaagaggacggcgacgacgattgcccaatgggcggcttgcgaggacggagggcggacggggtcgcccttgaccttcagaaggagaagagggagttagggaggggaggaccgatgcggggtgactggaaacgaagcccgatggcgatgacaagaggcaacgggcagcccccctttcgtgccgcggtgaatccggaagccgatcaaccggacaccccggccgacccaactccatcacgcccaccctcgcctggggctgacgtcagcaaggggtggggcggcgccgacatgcgggccccactggtcagcggcactaagagagggagagggggcggctggcaggcgggacccaccgggcagcgtcacatgggggggaaagcggcgaggcgcccggtcggtccggctcggcttcaagccggccggccggttatggcgagggcggcggcggcgaagctaacaacggcggcggattggcttggcagcggctccagcggcggcgagcggcggccggaggagctggaaaaggcggcggcggcgggtatagcggcgcggaagcgatag

SEQ ID NO: 54176 - DNA, 319 bp, Oryza sativa
  Clone ID: PAT_MRT4530_56304C.1
ctcacacttgaagaaaaaaaaacacgacgaacacgttttaaaaaggtcttactgaagtggcagacccaaaccgcgaacaatgtgtggaggcgccatcctcgccgagttcatcccggccccggcgggcgccgctgcggtgaccaagcgggtgaccgccagccacctgtggccagactgcgttaagaacgccgtccgcggcaagagcaagagcaggaggctggataagagcttcgccaactgtgacgacttcgaggccgccttcgagcagatcgacgataactacgacttctacgacgcgaaggaagaacacctatgacac

SEQ ID NO: 54177 - DNA, 1281 bp, Oryza sativa
  Clone ID: PAT_MRT4530_56305C.1
atggtgagggaggaggcgtggccgctcgctgcaccgcagcagcagcagcagcagccatcagctcctccaccgcagccgcaggcgcagcagcagaatggccgtatcgatctccgcgaggtgaagcttcagctggagaagaggcttggtcctgacaggtcaacgaggtacttcagctacttgaagggctacctgtcgaataggctcagcaaggcggatttcgacaaggtgtgcctccaaacattggggagagagaacctccgagtgcataatcagctgatacgctcagttctctacaacgcctaccatgcgaagtgtccacctccaacaccagcaccagatgttgggaggtctgtgggagcaacagtgaagaaggtttgtcagcccggcgaagcattgaattcttgcaatggggacatcaggttattacagatgcaggggtcaaggcatatgagcacaatgcaagatcatcagtcaaaagatcggatgaaaagcacgggcctgagttgtagggtagatgcttctgccaatcacagccagattactcacggtggtgcggcagtaccagagaatggcaccctaagttcttctgacctcaagagatcagtgcattttcaacatgaatctgcagagccattggcaaagcaccaacgtgtggagcagtcaccaactggaaacataatcaagttgagaagaagcatgagcaatgtctcggatcattctgcagaagcatcgaatagccctgtacgggcaccacttggaattcctttttgttcagcgagtgtgggcggggcaaggaaattaccaccaccactaattagtgcaggtgaggatcactgtaccagctgttgtgagcatcgtgaattgttaaatacagaggcattgcatcggcggatggagaaaacagcagagtcactgggcctagctggtgtcacattggattgtgctgaccttctgaataacggtttggacaagtacttgaagaacctgattaggtcatcagttgagttaataggagctaatgttcaaagtgatgcaagaaaaggggaattgtacaagcagcatgcatatggaaaacatatgaatggtgtttggttgccaaatcatgttcagatgcaatcaggcagtggaccatccggagcaacgaatgatatcagaaatcaccacttgatctcccttgatgatttcaaggtagctatgcagctaaatcctcaacagctcggggaggactggccagtcctccttgaaaagatatgcttatgttcaccagaagaaaatgactga

SEQ ID NO: 54178 - DNA, 220 bp, Oryza sativa
  Clone ID: PAT_MRT4530_56306C.1
atatcaaaacacaaaaggttataatttgagtgaatttattacacgaggcctttccactcacatcacccatcttacatcaaaaaattttattaacacttcacaccttactatttacatttcttcatattttctgtatatacaactccttcgtataataaaacaaacttattgagaaacaattctttttaatgaacatacactgatacattccccctgttca

SEQ ID NO: 54179 - DNA, 391 bp, Oryza sativa
  Clone ID: PAT_MRT4530_56307C.1
gttaccccacattttttatgacaggttaattgggctttataaataagtttgtgcggttttcagacgagggatgaaaataggttttggaatgcatgtgcgaaaaccccttgcaacatgcgatgagacactgaaaaattatctttcacgcgagctaaacacacccacaattcacagggagagatagggaatgaaatgagatcacagcatcttcctgactaaaaagctggagaagacataacaaaaaacataaaggaatttgctccctttatgtaataaggcaagatcggcctgttatgttcaaccgatacacagcgtgtggcaatgaatacatcaatatgggcatgtgaatttacaaatgtaaaatttaagtttctcaaaaatggagatgatg

SEQ ID NO: 54180 - DNA, 215 bp, Oryza sativa
  Clone ID: PAT_MRT4530_56308C.1
gtcggctcctacctccccgagtccctgcaaacccgacaccccgacctcaactacgaccataacaatagcatacatgctggcaggagaggagaaaaaacatatcggtcactagtgggtgcggctatatatgcgaaggtggagagaaggaacgatgtcctaaccggttcaaaccggctccatgcgctgacgtggcattgccacggtggcacctacgt

SEQ ID NO: 54181 - DNA, 1187 bp, Oryza sativa
  Clone ID: PAT_MRT4530_56309C.1
agaattcagaactgccatttgctaccttacataccatacctagctgaattgctgtcagttaatctcttgatcagatcgatcaccctgcagcttcttgttgtttctagcatttctggtgaagaaaccaaatcttcagcagcttaaggtaggagatcatcaatggggaggcagccgtgctgcgacaaggtggggctgaagaaggggccatggacggcggaggaggaccagaagctcatcaccttcctcctcaccaacggccagtgctgctggcgcgccgtccccaagctcgccgggcttctccggtgcgggaagagctgcaggctacggtggacgaactacctccggccggatctcaagagggggctgctctccgacgccgaggagaagatcgtcgtcgacctacatgcccaattgggcaataggtggtctaagattgcgtctcatttgcctgggaggacggacaacgagatcaagaaccactggaacactcacatcaagaagaagctcaagaaaatggggatcgatcccctcacccacaggcccctccagccgccgccgtcgccgtcgccagagaagaagcacgcagagagaaagaacacggcggcggcggcggcggtggccgagcagcatcagcacgacgaactctgggaggaggagtccccgggattctgcaccgacgaggtgccgatgatccacccggacgagatcatggtgccattgcgcgaccacccgccgccggtttgcacggccgccggtgcctcgacgccgacgacatcgtcgtcgtcgtcgtcctcgtcggtggcctcctcgacgacgagctgcgacgaggtcgacgccgcggcgctgctcccggtcctggagtggcccgacgacgccatgtgcctgatggagctcgacgagctgatcgccgcggcggcgccgccgtccctgctgtgggacgacgactaccgcctcccgctgccgccgccgccgctatcgccgccggcgatgtacgaggagctagacgcctttcagtgctacgaccagcagaggagcgcgtttgagcaggaggcagcagcttcagcgtggaacaagcttgagctcttctaatcaatcaaaattaaactctgtaaattatgtttacagtgtttattataatcaataattaccgaactaaaacagaacagtgttgtttcattgttctaaaa

SEQ ID NO: 54182 - DNA, 1667 bp, Oryza sativa
  Clone ID: PAT_MRT4530_5630C.1
ttttttttttttttttttttttttttttaaatttcatgacagtactcaaagaacaatttgtctcttacataccaaagtgccaaaattattcagacgataatgatgggtaagataatacaccaaagtaagttattattcagaacaataccttaatgttaccatcggtgccataagacatgtggcattttgagttgtgcttgatcataagacatgtggcattttgagttgtgcttgatcattcggagttccatgtcattgcaagaggcattgccagtcccattgccgtcatggacaacacattgcaccacatctgtaccggtcaacacagtaaaaaaaagctcacctaaatcagaaccaaataagcccgccgtgggtgtccaactgtggtagaaccttgcgacacagaatctgccagaccccaggttgacaagatgaggatgctgcatctctgtccactcttggggtgcctccagctccttccaagatcctactagctgtggctgagagtccatggtggagagaatggtggagaggtcagcggcaccaaattgcttccagtcattggcacaaatgccaaaccacagcttcagctccggtacatactcaaccttgccgatgaagggtagtgtccactccccaatttggatccaagtgtgtttcaccgtgtccaagcagtaggtgccagcaccatccaccgatatgcagatgtgggagccgccgtcgaccactgcgtatgaagtgatcttgtgggggctggcatgcttgtacttggggtcacagacgaatggcggtggcgggaggcgctggcactgccaggacttggtgaaggaggtcaaggtggacctacggtagacaaaagcctcaaactgactgctcagctgtatgttgtctcttggtatgtgattaagacaagtatccatgatgtagacgctgccacctccattactattgtcgtcgtggtcgtccttgtcatcggcactggggatgaagatggagtagggcaaacacttgggcttgtggagagagggcaaggtatccactttgcacgtatcggcatcgaagaggcaggcgcggccagattggtctgtgcagagcaccttgcgacctgcaagcggaatacagttgatataccaatccaaagcagggaacatgtgtatccgttcgcctggtgctcccaagttgaagattgggctgggaagacaaatcttctccatccttttcttcaatccgtttccgttcccattcagtgtcagtgcagcaggtgttgtagtgttgaacaacttgtagcgcgcgagggtgaggtcgatgcagcgcagcgatttggctccagggatgcggttgtccacgatcaggttcagaaaccgacgagagaggcccatgcggttgtccacgatcaggttcagaaaccgacgagagaggcccatcgtcgattggattgggattggatataatggtcagctggagaagtaaacgacattcaaggaaggaagagtaccgcaatagcagcagaagccggcgattctactcgatcccaagtcgactgaactctcctcctttgtctttccttgcgatcgattcagctaacagccgcccggcagcgatgcctttaaagacggaaggaagggatggctgaggcgagctggagaatggagggggcagctcgtgcc

SEQ ID NO: 54183 - DNA, 534 bp, Oryza sativa
  Clone ID: PAT_MRT4530_56310C.1
atggatgaacaattggcggtgcgcctactactgcccggactcctcatcggactcgccgtcgtcgcgctcatcctcccggtcctcctgctgctgctgatggtgttggtgatggtggtgcgggtgcggcagttgaccggtggcaccggcgccgccgacctggtggtagaactggctgagcgactcgccgacaccggtatggtccccgtccccgtggcggcgacgattgccggctccgcctgctggagcagccactggacggtatcgccgtcagacttgtggctgagctcccgcgtcagctggaagatccgggcggcgcacagtgccggcattcggatccgccgtccctggccgtccaccttgccgtcgtcgtcaactggccggtctagccgctcgccgcacgtggtggccgatggtcgcgcctccaccaacttcttcagcaccatcttctgctcggtgccattccattccccaagaccttcttctgttgaaggagcttggagtttgcggtgtcgtgaactgaacaaatcctactag

SEQ ID NO: 54184 - DNA, 943 bp, Oryza sativa
  Clone ID: PAT_MRT4530_56311C.1
ctagccgcctcgccgccaccggagcccgccgttggaaaccgcaaggccggatggaaaggtggcggcggggagaacaagctgatggcaaagctcttcctcggcgtgggaggcaacggccgaggcggtcaacggggcagggcgacggagctggtcatgctggagacggatccggtccccccccatcaacgcggatctggtggaggcgggcggaggtggcggaagcccgcggcgatggtagccggcataggcgcgatggttgtggccgatggcggaggtggccgcccccgaggatagtggttggctagtgggaggtgcggcagcgactaggcggcgcggccggctctgcgcagcgcgaggtgaggccagagtggcagagctcacggcgacgatggctggccgtcggaaggcgcggcagcgactgggcggcatggtcagcgacggcggaggcacgaatggtcaaacatttatgtcgagactggtaaagaagaacacaattgaaacaaaagaggaactgaaagagggtatggctgagagaaaagaggaactgaaagagactaaggctgaacttgccgatacaaaaagggtagcatatgtggctattcttaaagagcaaggaaacaaaaaggagagtttttcatatagggaattaaaatccttccaaggaaataagatgcgaagaggagggctatggaagccgagagaaccaaagctaaagaagcaaaggataaggaatatgcgaaaaacagaatcaagttgtcctggatgtcagcaagtcaaagagttggcccaggctaagcttgcagaattaagatggaaaaaagaggaggagaacaaagccatagagatgtctcaaactcaagcagttggtaatgatgatgggggacagaaagaagtgtatgatgaggaagaggtgaataacacaaatgatgactctcctaattaa

SEQ ID NO: 54185 - DNA, 485 bp, Oryza sativa
  Clone ID: PAT_MRT4530_56312C.1
agagcacggccaggggaggcgccggaggtgcgtgaggtgtggggaccgtcggaggatgcggcgggtgcacgccgcgagggagaggatccgctgtcagtagcagtagatgcaggtggtagcggtggcggtggaggagaggaggatctgacgcgggagctcagccacaagtctgacggcgataccgtccagtggctgctccagcaggcggagccggcaatcgtcgccgccacggggacggggaccataccggtgtcggcgctgacatccgtcgcaccatgccagggctagagctaggactctcataggacggccacatcggcgtgctcgccgcacagtcgctcagccagttctaccaccaggtcggcggcgccggtgccaccggtcaactgccgcacccgcaccaccatcaccaacaccatcagcagcagcaggaggaccgggaggatgagcgcgacgacggcgagtccgatgaggagtccgggcag

SEQ ID NO: 54186 - DNA, 1363 bp, Oryza sativa
  Clone ID: PAT_MRT4530_56313C.1
cccacgcgtccgcccacgcgtccgggagtaggagagaaggccatggcgtcgaaggaggaggtggccgtggagacggtggagggcggagcggcggcggcgaaggcgccgtactgggacccgccgccggcgccgctgctggacacgagcgagctgggtaagtggtcgctgtaccgtgccctcatcgcggagttcatggcgacgctcatcttcctctacgtgagcatcgccaccgtgatcgggtacaagaaccagagggccaccgtcgacgcgtgcaccggcgtcggctacctcggcgtggcgtggtcgttcggtgccaccatattcgtcctcgtctactgcaccggcggcgtctccggcgggcacatcaacccggcggtgacgctgggcctcttcttcgggcggaagctgtcgctcgtccgcaccgtgctgtacgtcgtggcgcagtgcctcggcgccatcgccggcgccggcatcgtcaaggggatcatgaagcgcccctacgacgcgctcggcggcggcgccaacaccgtcagcgacggctactccgccgccggcgccctcggcgccgagatcgtcggcacgttcatcctcgtctacaccgtcttctccgccaccgaccccaagcgcaccgcccgcgactccttcatccccgtactcgtgccgctgccgatcgggttcgcggtgttcgtcgtgcacctggcgacgattccgatcaccggcacgggcatcaacccggcgaggagcctcggcgccgccgtgctgtacaaccagcacgcagcttggaaagaccactggatcttctgggtggggccggtgatcggggcgttcttggcggcggcgtaccacaagctggtgctgcgcggcgaggccgccaaggcgctcagctcgttcaggagcaccagcgtgacggcgtgaggaagacgacgatgttcatttgatacgagagatcgatcagctgcttgattaattgttcttgatttcgttgttcaatttacaatctacgactatggacgatcatgcatatgatatgatcgatgcatgcgtctgttgtcagttttatttgggactttcagtgtgagagtgtgaatggttgtaaaataagtggagtgcctgtatgtatctgtatgcatgcacggcacggtacgcgtgtttatggatgatgctttgttacgtagcaggcttaattatgtcaatatgtgtgcgtatgttgtcgtggtaattattatactgggtatatatatatattgtgcagcttaattatctagccatgtacaaattttcgtatgcggaataatataatgcatgcgatcgccattcaaaaaaaaaaaaaaaaaaaaaaaaaaaaactcgaaccctcgtgccg

SEQ ID NO: 54187 - DNA, 960 bp, Oryza sativa
  Clone ID: PAT_MRT4530_56314C.1
atggtgaatcattacggttgtggcactccgaattttcagaaaggaaggagaaatgttaaactagaagaccttccagaggatgtgttatgttcaattttatcaaagctgcctccaaaagagtcacggaccaagaacctagcttttgatttagtgcctgatatattgacgggttcacatgatcgttacatgtttccgtttcacctcttggatgagaagagcgtatctggtctgcaatctattcaacttagttacatttctttcaaaccaccattagggtttaaaggcttcccaagcctaagaaaactcgatctaaatcttgtccatgtcaacagagagagtctcgaagttatgttgcacagttgccataatcttcaatggctgagcttagtcagatgctatcttgatggaaaactacacttggttttatcccacctacgatacataaaaattttccagtgcaagacgaccatggctgctttccaggatgctgttgcaacacttctcaaagggattccaatcgtgcggaatctgacattgcatgtttgtttccaacaaatagaggcacgatggctgttggataaccgacacagcttttccaatcttaggcatctgcagttgttaatgaacttaaaaactgaagatgccaacaagatacattacgcggtttccttaattagggcagctccattcattgaaaagttggaggtccattttggttgccctcatcatgtatggttttcggataagggttatgttgcaccccatctcgagcaacatgaatatagttatctgaagaacatgcacatcactgggtataaaggggagagagggcagcttgaatttcttaaagatgttgtggaaaatgtccctgcgctggagtctgttactatagagacaactcaaatctacatatgtgaaagcagcaagctctctccaatgaggatgagccacgtcacctaa

SEQ ID NO: 54188 - DNA, 378 bp, Oryza sativa
  Clone ID: PAT_MRT4530_56315C.1
atgaagcggccagcggaggcggcgaggagagaagccggcggcgcgcgtcgtcgctcgtcgtggccagcagcagagggatgcggcagcgcgcggacgtcgtcgtggagggagccggcggcgcggacgtggcagatgagggagccggcggcgtgcggatctggagcggagggagccgttggcggcatcgcgacggaccacgtaaggtgcgcctacgaaaatctattttcgcaggcgtcgcttaagtggtccgcctgcgaaaacaggcggacagcgaacttcatgccgatttatattttttttaggcggtcatttggttcccagaatcatgtgtatatttgcgacatctctacctccacctctataactcctcatctctag

SEQ ID NO: 54189 - DNA, 537 bp, Oryza sativa
  Clone ID: PAT_MRT4530_56316C.1
atggccgccggtgcccacctctcccccatcccctccacctccccgcgcgccgccgtgcacgccaaccactggcccgccatccgaagcttcctctccgccgcgccccctccacgccgaccgccggcccaccatccgaagcttcctctccgccgcgccccctccgagccgctcccgcagccgcctggagctccctcccatccgcgccctccgccgctcgccgccgaccggttcccctccgccgctgtccgcctgctctgcctccgccgctcgctaccgactggttcccctccgccacttgccgcccggggagctctgccgccggccgcccgctctacctccgcctctgccacccgccgctcgaggagctccacctcggccgcccgccgcccgaggagctccgcctccgccgccggtcgccccctccaccttcgtctcagccggcagagggaggatgaggtggaggctgacatgtgggggcagtgccacgtgtgcggccacgtaggattaaaaccgctctggattgagccgggggggtaa

SEQ ID NO: 54190 - DNA, 404 bp, Oryza sativa
  Clone ID: PAT_MRT4530_56317C.1
ctgagttactggattatcagcgtagttgacatgacagggagcgccttcacaatttggtccaacattctgtctgtatgggacatcgcgatagtactctgcgtgctgcgcatgaacatgcaccatgttggttgggatatcaaggctcacatattctgcaaggcaataaaaccgatccctccgagttctgtaactctggccagtttgatgggagccttcgaactaccttactgattaaattccctcaagtactggaactataccgtaccttcttctgctctctgagacgagcttgaacaccgcgtgctcgaggaaggctattgccataaactaaagggaaggcactcgaatagatccaagaatagctcacatgacagctcgaggaggatttgtatgtagaacgctcg

SEQ ID NO: 54191 - DNA, 473 bp, Oryza sativa
  Clone ID: PAT_MRT4530_56318C.1
ttttggagataatcggataggggacaacgagacaggaaggcagcatggacgccgcactcaagtccatgagtaaagcatggggcagcagctggcaagatttgtttcacctgactggaacctactctctccgttttgttcagatttattgtactaagtaatatctcaacttatcttaggttggtttattttaagacggacggagtaaacgtcaacacagacatcgaggatcttgactcggatttgtcactgaacaattgtgtgggtgtgaaaattccatgaattcattgtctttgcattaaagcaccaacagtaagaaaatgatttcgatcttaaaccttgatgactgaactacaactctatactatgcagtatttcgtgctttcagaactgtattactaatagcttattaatctttttagctctatatggcactcataaataaacttgttaatcttgatcagggagatatatgc

SEQ ID NO: 54192 - DNA, 571 bp, Oryza sativa
  Clone ID: PAT_MRT4530_56319C.1
tattctcttcttcaaggggattgctgatcagcaaggtactctctcttcgatccccttcccctctctctctctctctctctctctctctctctctctccgcgcgcggcctgtcgcggctgttgggctctgcctcgcgtgccgctcgccgtgctccgtgattacttctgtgctcgtcaggcttccttcgccgtcgtcatcctcgcgctcgcgcgacagaatatctcatgatcgatccgcggtgacgttccgacacgcggtcggtgggtcgttcccccgtttccccaccgtggggtgtgcgttggcacggcttttgcgcttggggacttttagcgtttgtgcccggccaccgtagcgatgcgggggaagttgtcggcgatctgctgatgcggctctgatcactgcatatctgatcagttgcgtgtccgatccgttccatccctggttggcggtgaaattggcgtgcgtattcgcgtaactacatatctacatgtgctgtttgatcaatctcacatttcggttatgtgcggtgatgaactgatgatgtagcttatctgaattctcatagcaatgg

SEQ ID NO: 54193 - DNA, 764 bp, Oryza sativa
  Clone ID: PAT_MRT4530_5631C.1
atggtggcggcgccgggaatcaaggagaggagggaggctgacggcggaacgcaactgcgcacggcggcggcgaaaaaggcgggtggcgagggagcgagaggaaggggagacggccatggcggcgcggcgcgggagaaggggagcggagctcaccgggaaggaaggaacgcgccggcggcagggatgtcctcggcgggttcgacgctgaggcggggcggatggcgttgtccgctcgtggcgggacggtcgccgcgacgggagcggcacggcgccaagacggcgcggccggggaagaagaggggggacgcgaggatggggcggtcggcaccacggagtgcctcggcttctcgcgcttgtcggcagaaggagcggcgacggcggcgagcagccgggcggcaacgatggcgcggcagcggtggagagtgaagcgggagggatttgagagggggctcggctttatagtggaggcgatgtcggtttgggaggcgtgggcgagttggttggtgctcggctggcgatcatgggcgacgcgagaacagcggacgacgaggatgcgttgggcggcgaaggcagtggatcggacggcgaaaatcgaatcccgggtacggaaggagctgcgcggcatggtcaaagtggaaaagaaggggaaaagggagctctgctccttgccgatttgggcgagcaaaagggaggagagagggcacgtgagagaggcgctctgcctctcggttttggaagcacgcggcgtggtgcgacagcggtag

SEQ ID NO: 54194 - DNA, 337 bp, Oryza sativa
  Clone ID: PAT_MRT4530_56320C.1
atcgcgtggggctcccttcgctttcttgcggggtatggtggagttccggagggagtccacagtgaagaacccttatagtcagtctgtcgctgctgtaggaaaagcagccggtgattgggagaaatccttgactcccgcgcacaaggctccctagtccatatggccaacatgctctggccgctacaacagggccattgctgactacagcaaggtcgagatccctgttggcatggagcgctaactttgggaataatgagccctcttggaccaatttaacttggggtggttgacagacactctttaagatgacaccacccgctgggagaagcatgaatac

SEQ ID NO: 54195 - DNA, 351 bp, Oryza sativa
  Clone ID: PAT_MRT4530_56321C.1
atggacctccacccggcgggcgactcgcatggctctccgccacgtttgctgggtggccataccgcaccgcacacgcagtcacgcgccctgcgcatgcacacgccacgctggctcttcgctcgggccaccgccggctgcggctcgcaaggcgacgaccagaagaaaacgccggagatcgaagtggtcggccccaccttgataacgtacggcgtgcgattgagatctgggaggagagacgagggaaaaggagggtggaataatagcagcagcggatgggaaggaatcgtggtttgggtggagagggtgggaggtggtacgacggagctccacgcggcgtccgggggctttggc

SEQ ID NO: 54196 - DNA, 150 bp, Oryza sativa
  Clone ID: PAT_MRT4530_56322C.1
attggttaattttttttattttgggacacttaatgtaaattagcttgattccaacctgatttggtgtacaagaggacggttgcccccggtttacccctgaaagtaatccccagactaaaagtgtaaagcggggtagattcaccgcgctgt

SEQ ID NO: 54197 - DNA, 743 bp, Oryza sativa
  Clone ID: PAT_MRT4530_56323C.1
ccaaaacaacaccaggaaacttcttttcaatcgatcactccactggtgagtagtgagtggctagtgactggtcagttcatcacttgtgaaggttttgcaatcaggaaaagttcagaagatcatgggcaagctctggacaatcctcactcacgttcattcccttgcagggcctaccgtcatgctcctgtaccccttgtatgcgtcggtgcaggccatggagagcccatcgaagcttgacgacgagcagtggctggcctactggatgctcgcccacgcgttcgccctcgtggagatgcttctcgagtccctcatctactggataccgatctggtacgagctgaagctgctgttcatcgcgtggctggcgctgcccaacttcaggggagccgcgttcatctacaacaggttcgtcagggagcagctcaggaagcatggcctcgccggcgccggcgccggcgccgcctccagcgtcggcaagaaggacaagtcgtcgccgtcgtcgtcacccaaggacaaggagaagaccaagagcaagttcctctccttcgtcactcccaagaaggatcatgaagcttactgagccaagaagtgctgatcagtcggatccctgaagatagttttttagtgtgtgtactgttccatttgtgtttgtccctcttcctctccttcagaagaggcagctagctagcttcatgtttggctggtctttttggccatctgtgcatgtctgtaaactttattgg

SEQ ID NO: 54198 - DNA, 2160 bp, Oryza sativa
  Clone ID: PAT_MRT4530_56324C.1
cgcgctcccggtacccgcccgtcggccgctcgggagcccgcccaaggtggacggcgcccgctggcgggcctggaagtggcgagtgccaatgcccttttatgcccaatttctggctgtggtgctcatctagattgcctggagaactttgaggaccactatcgcacccgtcatactgcttcatgctctgtatgttggagagtgtatccaacttcaaggctgctgagtattcatatttctgaggcacatgattccttttttcaagcaaaagttgcccgtggttttccaatgtatgagtgtttggtgggcacattgccaaggctgagcacgagctacaaaagtcggcagcagcatcttcttgataagcaccagtttcccaagtcatttctgttcttcaaaaaagcacgcccttcgctagaaacgccatggtattctgtcgagaaacatttgggagtaccccatatgtactatatctgaaatctgaacatggatgttgatgggaagaagagctcaaggtacatgaattccagatatcggccaaagcaacatgatggaaaagagtcaaaagaaaatgagcatagtagctgtaaggaggccaagaacaacgaaatggaggttgacaagcaggttgatgagcttgcttcggccgtatcaagactgagcacagcggattcaactccttctagcataagctttggtcatcgtcgctctcgcggtcttgcttttgtccctagcgctggtgtctcctgtagcctatgtggctgcatgctgttcctcccaatgctctacttcccgcggcaccttttgacacggcagatggtggaggccacgctggaggagcttgtcatctactatcccttctccgccatgtgcctgccgctctggctggtgttgccaagcgcctcgctgcgggggctcgtgccgagggtggacttcgacatgtcctcggtggcgtctagcgggtggatccggattcgaactatccaagtttttcccgcaagcctcaggttggatgagcgagcgattgggaaatatcgccccattttcacccctaggcctcacgatggcacgcgccctagcggggagggggggcaagtagacgggctttgtgggctcggcccgttggatccaacggcaagcgccgcgtgcaggagggggccgccgcagctgcagccggccacggacgcgacgtgtgcggatctgcacgcgcgcggcggccgacctgacgcgctctctttaacgcatgatgatggattgcagggttgcagcacactcggaggaggaaaagttcagaagatcatgggcaagctctggacaatcctcactcacgttcattcccttgcagggcctaccgtcatgctcctgtaccccttgtatgcgtcggtgcaggccatggagagcccatcgaagcttgacgacgagcagtggctggcctactggatcctctactccttcatcaccctcgtggagatgcttctcgagtccctcatctactggataccgatctggtacgagctgaagctgctgttcatcgcgtggctggcgctgcccaacttcaggggagccgcgttcatctacaacaggttcgtcagggagcagctcaggaagcatggcctcgccggcgccggcgccggcgccgccgccagcgtcggcaagaaggacaagtcgtcgccgtcgtcgtcacccaaggacaaggagaagaccaagagcaagttcctctccttcgtcactcccaagaaggatcatgaagcttactgagctcgaattcgccttatagtgagtggtattacaattcactggccgtcgttttacaacgtcgtgactgggaaaaccctggcgttacccaaattaatcgccttgcagcacatccccctttcgccagctggcaagaagtgctgatcagtcggatccctgaagatagttttttagtgtgtgtactgttccatttgtgtttgtccctcttcctctccttcagaagaggcagcaagctagcttcatgtttggctggtctttttggccatctgtgcatgtctgtaaactttattggagtgaggggaaaaaagagcataattagttgctccatgttgagttgttagagtggtttcttgtaaatgtaattcaggatctcagatgagcagacaataaaaacccactgttccaggg

SEQ ID NO: 54199 - DNA, 394 bp, Oryza sativa
  Clone ID: PAT_MRT4530_56325C.1
ggggggagttaggctggccatgttcttgaatcggctcttcggggagcacaaccgtgacgtcgcatcaccagcctgaactgatagctgcttcagaattcagaaaattcagaagttaaccacacgtgtaatctaacggccgcatccatttcattttatttttacgtgatacgtgactctatttttacgatgaatagttgatgccaacaatgctgattaattaaccacatagtaatacaagtaagcaacgcttgaaatcaacaggacatagcaaaccaattccattcttttctgatcataaagagatgtacatccacatgtatgattaattgtatctagacaagattcaatgacttataaaaaaaaaaaaaaaaaaaaaaaaaaaaaaaaataaaaa

SEQ ID NO: 54200 - DNA, 1533 bp, Oryza sativa
  Clone ID: PAT_MRT4530_56326C.1
atggatcgatcagatgctttcatctacgtcatcatcatgagcgtcgtcgtcgtcctcctgccgccgccgtgttcagccgacgaccggcttgtccccggtaagccgctaacctctgatgccaccgtcgtctccgacggcggcgccttcgccatgggcttcttctccccctccaactccaccccggccaagctctacctcggtatatggtacaacgacatcccccggcgcacggtggtgtgggtcgccgaccgagaaactccggtcacaaatggcacaacgctgtccctgaccgaatcctccaacctcgtcgtgtccgacgctgacggccgcgtccgctggacgaccaacatcaccggtggcgccgccggcaacggcaacacgaccgcggtgctgatgaacaccggcaacctcgtcgtccggacgcgcgcctccgaccggctggtgtcgtggaggggccccggcgacccgtcgccggggagcttctcgtacggcggcgacacggacacgttcctccaggtgatcatgtggaacgggacgcggccgttgatgcgggacgggccgtggacaggctacatggtggatagccagtaccagacgaacaccagcgccattgtctacgtcgcgatcatcgacaccgacgaggagatatacatcacgttcagcgtcgctgacgacgccccgcacaccaggttcgtgctgacctacgccggcaagtaccagcttcagaggtggagcagcggatcgtcggcgtgggtggtgctccaggagtggccggccgggtgcgacccctacgacttctgcggcccgaacgggtactgcgacagcacggcggcggaggcgcctctcccggcgtgcaggtgcctcgacggcttcgagccggcgagcgcggcggagtggagcagcggccggttctcgcggggttgccggcggaaggaggcggtgcggtgcggcgacggcttcttggccgtgcaggggatgcagtgccccgacaagttcgtgcacgtcccgaacaggacgctggaggcgtgcgccgcggagtgcagcagcaactgctcgtgcgtggcgtacgcgtacgccaacctgagcaacagcaggtccaggggcgacacgacgaggtgcttggtgtggtcaggggagctgattgacatggcaaaagttggtgcacaagggctgggcagcgatacgctctacctcaggcttgcaggccttcagcttcatgcgggtggaaggacgaagagcaatgcagtcaagattgtgcttccagtgttagcaagtagtattctggtaattctatgcatttcttttgcatggttaaaaatgaaagcatgcaagaaaagaaatcgagaaaagcacagaaagcaaattttgtttggcatgagtgcagctgaagaggttggggaaggaaatcctgtccaagatcttgaattcccatttgtaacatttgaggatattgctctagcaactaacaacttttcggaagcatacaaaattggtcagggaggttttggaaaagtctacaaggttattcaataa

SEQ ID NO: 54201 - DNA, 2517 bp, Oryza sativa
  Clone ID: PAT_MRT4530_56327C.1
atggatcgatcagatgctttcatctacgtcatcatcatgagcgtcgtcgtcgtcctcctgccgccgccgtgttcagccgacgaccggcttgtccccggtaagccgctaacctctgatgccaccgtcgtctccgacggcggcgccttcgccatgggcttcttctccccctccaactccaccccggccaagctctacctcggtatatggtacaacgacatcccccggcgcacggtggtgtgggtcgccgaccgagaaactccggtcacaaatggcacaacgctgtccctgaccgaatcctccaacctcgtcgtgtccgacgctgacggccgcgtccgctggacgaccaacatcaccggtggcgccgccggcaacggcaacacgaccgcggtgctgatgaacaccggcaacctcgtcgtccggtcaccgaacggcaccatcttttggcagagcttcgagcagccgaccgactcgttcctgcccgggatgaagctgcggatgatgtacaggacgcgcgcctccgaccggctggtgtcgtggaggggccccggcgacccgtcgccggggagcttctcgtacggcggcgacacggacacgttcctccaggtgatcatgtggaacgggacgcggccgttgatgcgggacgggccgtggacaggctacatggtggatagccagtaccagacgaacaccagcgccattgtctacgtcgcgatcatcgacaccgacgaggagatatacatcacgttcagcgtcgctgacgacgccccgcacaccaggttcgtgctgacctacgccggcaagtaccagcttcagaggtggagcagcggatcgtcggcgtgggtggtgctccaggagtggccggccgggtgcgacccctacgacttctgcggcccgaacgggtactgcgacagcacggcggcggaggcgcctctcccggcgtgcaggtgcctcgacggcttcgagccggcgagcgcggcggagtggagcagcggccggttctcgcggggttgccggcggaaggaggcggtgcggtgcggcgacggcttcttggccgtgcaggggatgcagtgccccgacaagttcgtgcacgtcccgaacaggacgctggaggcgtgcgccgcggagtgcagcagcaactgctcgtgcgtggcgtacgcgtacgccaacctgagcaacagcaggtccaggggcgacacgacgaggtgcttggtgtggtcaggggagctgattgacatggcaaaagttggtgcacaagggctgggcagcgatacgctctacctcaggcttgcaggccttcagcttcatgcgggtggaaggacgaagagcaatgcagtcaagattgtgcttccagtgttagcaagtagtattctggtaattctatgcatttcttttgcatggttaaaaatgaaagcatgcaagaaaagaaatcgagaaaagcacagaaagcaaattttgtttggcatgagtgcagctgaagaggttggggaaggaaatcctgtccaagatcttgaattcccatttgtaacatttgaggatattgctctagcaactaacaacttttcggaagcatacaaaattggtcagggaggttttggaaaagtctacaagggaatgctagggggtcaggaagtcgctattaaaaggttaagcaggaattctcaacaaggaacgaaggaattcaggaacgaagttattcttattgcgaaattacaacatagaaatttggttcgcatacttggtttttgtgttgagggagatgaaaagctactaatttatgagtatttgcctaacaaaagcttagatgcaacacttttcaatggttcaagaaaattgttgctagattggacaacacggtttaatataatcaaaggagtggcaaggggacttctttatctacatcaagactcaagattaaccataattcacagagatctcaaagccggtaatattttgctagatgcagagatgaaacctaagatagcagattttggcatggcaaggatctttggtgataatcaacagaatgcaaatacccaacgtgttgttggaacatatggttatatggctcctgagtatgcaatggaaggtatcttttctactaaatcagatgtctacagctttggtgtgttattgttggaagttataaccggtatgaggagaaattccgttagcaacatcatgggctttccaaacctaatagtctatgcatggaatatgtggaaggaagggaagaccgaggatttggcagactcatcaattatggatagttgcttacaagatgaagttttactttgcatccatttagctttattgtgtgttcaagaaaacccagatgacaggccacttatgccatttgttgtgttcatcctagagaatggaagtagtactgcactgccaaccccaagtcgccctacctactttgcgcagaggagtgataaaatggaaatggatcaattgagacataatattgaaaattcaatgtatactctcacgttaacagatgtagaggggcggtag

SEQ ID NO: 54202 - DNA, 633 bp, Oryza sativa
  Clone ID: PAT_MRT4530_56328C.1
cccacgcgtccggaaaaaaaaagtgaccgccggtcttctcccccgcctcgccgccgcgcgcacgcagccgccggcgaactggccccggaggcgcctcttccttcccaaccccgccctagcccttctcccctgctcggcctcctcgcgcgcacggccggtcgctgggtttggagccagccaggggggccgatgctgccgcctgccgcctcctcgttcgcatcgattccaagcttgtaggtagcacttctaaacagtaaggagattttgagcttcccataggaagggcattttataaactgggcagcagacatgtcaggcatcgatggtaacaaaccaccttcagaggttttgattgatgagaatgatgactgggtgatagtcaagaagcagcgaatcaccatcctgatccctccaccatcacctgcagctgcaagtcttcaggatgatatgcaaaaaataagttctgaacaagcttgtatagccaaaaagagcatggaaaactgtgatgctgcaagaaagaagcatccaaagcagatgacaacccacaaagctcaggagccacttctagagggcatcaaagtttctgccaacatcaagagagctcaagagattgctacattttctcaccatcct

SEQ ID NO: 54203 - DNA, 225 bp, Oryza sativa
  Clone ID: PAT_MRT4530_56329C.1
atggggagccggccagccggggattcgactagtcgatccccgtcgccgtcgcgtggatatttgacgccgaccggccgcggccgggacgcctggacgctgcgccgtctaggcggatttgaatatagcgctgtcgccatgtgccgcgcggtgcaccgggcacctaccctcgtcgaggattaccgcggggaccgtgcctacgccgccgctctctacaatagcagatga

SEQ ID NO: 54204 - DNA, 909 bp, Oryza sativa
  Clone ID: PAT_MRT4530_5632C.1
ttttttgaaaaattaaagttgtttttgccttttgttttcacaagaattccagagattgtcggagaatccatccccatgaaagcaacatttttcatcacatatgtaatggttgatggctgggctggtgttgccgctgaggttcttaggttgaagccattggtcatgttccatataaagaatactttcttggtcagaaccgagcgagatcgagagcaggccatggaccctgggagcctggattttggcaccacagaaccaaggatacaactgtactttctgcttgggcttgtatatgctgtcgtgacaccaattcttctacctttcatcatagtgttctttagccttgcctatctagtattcaaacaccagatcattaatgtctacaatcagcaatatgagagtggcgcgcaattctggccagatgtccaaagacgactggttatagcattgatagtatcacaaatcctcctgttgggactgctgagcacgcaggaagcagagaaatccactgttgctcttcttcctcttcctgtactgtccatatggttccactatgtttgcaagggccgctttgagccagcgtttataaagttccccctgcaggatgcaatggtaaaggatacactggaacgggcaaatgacccaaccctgaatttgagagagtacctgaaggatgcatatgtgcacccagtgttccaaaaaaatgacatatatgagtttgctggcatcgacgaggaagagaagaaccccatggttgcaacgaagcgccaatcgcgaatgaacacaccagtagatagcaagttcaattccagttctggcactaatgaaggagagttcattgattgtgagaagattggcggtgtcaaactaaattcataaggcttttaattaaacaaattgcatagtcaa

SEQ ID NO: 54205 - DNA, 1110 bp, Oryza sativa
  Clone ID: PAT_MRT4530_56330C.1
cggaattcccgggtcgacccacgcgtccgcgccgcctcctcctcctccgcctcgcttcccccccttcccccttcccttcccttcctcggcgtcccctccgcaccggcttgtgggggaggagtaggaggaggagatggccgcagcggctgtcgcgtgcaggcgcgggctgctcctgcagcagctgcagcagcagctgtggcaggcgcaccggtgggttggccccgcgcggagcatctcgcagctcgtcaagaccaacggccgccgcgccttcctcgtcgacaccctcgccctggtgaggaagctggagtcgcagggcgtgcccacgaagcaggcggaggcgatcacctccgcgatcacggaggtcctcaacgacagcctcgagagcatctccgagtccttcgtctccaaggccgagatgcagaaggctgagatgctgcaggagtccaatatctccaagttcaagtcgcaagtgcagagctcgcaggaaaaccatttctctttgttgcagcgtgagactgagaaactccgtggagatattgataagatgaggagtgaactgaagtatgagattgacaaggtcactgcaggtcagcggctggatctaaaccttgaaagagggcgcatccgtgatgaactcgccaagcagaatgaggaaactacagaactcaccacaaagctagacaaggaaattcactcactgaaagcccagctcgaggcagcaaagtatgatgtcatcaagtactgcataggtaccattgtttcgatatcagctgttggactcgccgtgctccgcattgtgatgtgaagcacagatacgttctttcctttacccattcatccatggaaactgcaagaaagaggataggttgtgattctgttcctagtttttttggaggggacaaaacgtggtcaggggaaatgttgtaccatcatcctattagggaggagaaaagaggtggttcctcaaaacttgtaaaaatagatcgacccgcaggagaaatgcagcaaccaaaaatgattttttaaaaaaaaaaaaagttggagcttttgatatttggtcaacatatgcttcctttgtttgtgagacagtgggagcccccttgtcccctt

SEQ ID NO: 54206 - DNA, 270 bp, Oryza sativa
  Clone ID: PAT_MRT4530_56331C.1
atgggttggaagcttgacaaggaggacagggagaagatcggtctcagctatactgaggtagccacaatgtggatgcagctgagtggtcctcgccgcctaccacatttggctcaggggagatggggaagacctaacaccgaccttttcttgactccaggcattggtgcgagacgccgccactaccgagcgggtgtaggtaggcgagcccccgcggccgtggccactgcgcccatcagggaaagtgatgtagatccgacaatggagaggtag

SEQ ID NO: 54207 - DNA, 272 bp, Oryza sativa
  Clone ID: PAT_MRT4530_56332C.1
ttttgttttttgatttttttctttttttttttttttttttttttttttttttttcttttcttttctttttttttttcggggcgccgatttatgggggggttaaatttgggggcccggaagcatcaaattttgccctttaagggggggtttggaagcttttggggatctttgacccctggaaaggggggtaaaaaagtgttaagggtgaaaacgtaaaggaggatacgatcgggaggccccaaaatgcccgggtgggcttactagggggcccc

SEQ ID NO: 54208 - DNA, 598 bp, Oryza sativa
  Clone ID: PAT_MRT4530_56333C.1
ttttttttttttttttttttttcataatataatacatatattatctctcaaggaaaagtagttgtctgacaaattaaggtactacattatgtcctggaaaatacaataaatacacaaccatagagtcatttaactcgaattacagatcacatagttatttcctcgtgcatcaacctattcatactaacaaggaatacatatgacttatcttggaccgtttcaaaaaatatgacttatcttggttcaggctctgttattgtcacctcatttagtgacattgccgtcgagtgcttggccatggagtcggttacggggtatggttgggaatacgtgcttgaaccaatattaatattgcccatgatttctgtgaaaaatgctggtctcgatggagctttagctgaaattgtattggccgtcaagcataacattgatcattgacatagttggcctatccatatggtcttcttggacacatacaagtccaacatgaagtgcacctcaaaatatcatctagagaggaagaatcacttctcaaatatgggtcaacatctccgggatagttttcattggccaatgtcccataccaggtcagaagatc

SEQ ID NO: 54209 - DNA, 1759 bp, Oryza sativa
  unsure (1)..(1759): unsure at all n locations
  Clone ID: PAT_MRT4530_56334C.1
agagagaactagtctcgagttttttttttttttttttttttttttcagacaagtcggtcctctgtgagtttcttttatacgtcttcataatataatacagatattatctctcaagacaagtagtttgtcttacaattaagtactacatatgtcctgaaaatacaataaatacacaaccatggagtcatctaactcgaattacagatcacatagttatttcctcgtgcatcaacatattcatacaaacaaggaatgcatatgacttatcttggttcaggctctgttactgtcacatcatttagtgacatggccgtcgagtgcttggccgtggagtcggttacagggtatggttgggaatacatgcttgaaccaatattaatattgcccaacatttctgtgaaaaatgcaggtctcgatggagctttagctgaaactgtattgccgtcaagcatgatattgatcattgacagagttggcctatccatagggtcctcttggacacatacaagtccaacatgaatgcacctcaaaatctcatctagagaggaagaatcactcctcaaatatgggtcaaccatctccgtgatagttttcattgcccaatgttcccatacgaggctcagaagatcaacagcttgttcagagttgtaggagtcactgttttttcttcctgtgatgatctccaaaagcaacacaccgaagctgtatacgtcagactttattgaatattgcccacgtaaagcgtattctggtgccatgtatccataagttccaacaacgcggttagttgtttcttgtgactgatcatctccaaaaagccttgccaagccaaagtctgaaatcttagggttcatatttgcgtccagtagaacgttgcttgcttttagatcacggtgaattatcttcaattgagaatcttcatgcagatattgcaatcctccagtgattccttttattatcatgaacctctttgcccaatcgatttgtttgcgtttctcagggtcaaaaagaaatgtgtctagacttttgttaggcatgtattcatagacaagtagcttctcttcttgttccaaacaaactccaacgagcctcacgagattcttgtgctggagcttggcaattaaaaccagttcatttttaagctctcctatgccttgtccagaactctgagagagccttttcacagctatggtttggccaccgggaaaggatcccttgtaaacttcaccaaatcctccttcacctagtttgttgttttcagcaaagttatctgtggcaatccgtagtgtcggtagatccataataagagattcgatgttttgaatgtcctcagaacgagaagaatatgatagtgacagcttagtagcttttgttctcctcctccagcaacaaaagcagatcatagcgctagcaagtagagctgccactatcggtagtacaattgcaagaatcttaccagttttactctttttccctgaaaacaaacacaatatttcaaataatggaatttctagcaaaataatactattagtttgaactaaaaaagaattcaaaataacggtcctaactaatacacnaagtttgaattgaactaatacaaatgtttaagacatgtgtattgtgtttatctctaaaatagaaaacaactaaactatgctcttctaatatattagcgtgcattatttttcgcgttcgcgaataaaatagaaaacaagatttccaagccataataaagtaggagtgcaacctgcagcccggg

SEQ ID NO: 54210 - DNA, 376 bp, Oryza sativa
  Clone ID: PAT_MRT4530_56335C.1
ttcttgaaccagatcctttttatttcgatcactacaggtgcaaaatgcatgatctcttgaggtatcttgctcaacatttatcaagagaagagtgctattttgatcaactacctttagagcctactacttggtctaaactgagacgtatttcgattgtcaacaaaacagatatgttatcaagtgtggttgaaaaaggtcactgcagagtaaggactttgatgttttgcatgtcaccaaacatagatagtgatgtcttcatgaggtttccacatcttcgagttttggacttgactggctcaattgtacaaagaattccagatagcatcaacagcttgatccatctacgtttgcttgatcttgatgctaccgatatatc

SEQ ID NO: 54211 - DNA, 129 bp, Oryza sativa
  Clone ID: PAT_MRT4530_56336C.1
atggccgatgtagctgatgctgcctttgcagtatctgatacgaaaatgagaggacaattgtggaacatatccaagtcatccaactgcctgcctgttggctactactccagtagatccaccgacaagtaa

SEQ ID NO: 54212 - DNA, 443 bp, Oryza sativa
  Clone ID: PAT_MRT4530_56337C.1
taatgatattttccattctgatattataaattgttcacatttggtcctttccttcgtcacatcacaccaacttttctttattaacccattaccgcgtatgatcttcctgattgtttattcagatgaaaattgttcatagtcatactgagtttcaagtttcccttgtacttgcagctatctcatcatctgatatacccgagaagttagcacaggcagacacagacccatcatgtgctggatttgggtgttaactgggttgtaagtgttgtgttgtattgaatgtttgtcgggtggtgttggatgctaattgggctgtaacttttgtgctatatgggttttattgtgtttgattgttgggtttatatgggcttagctcacttgttatttgatactaatgtaaatgaatataatatgattgggctgaaaaaaaaaaaaaaaaaaaa

SEQ ID NO: 54213 - DNA, 189 bp, Oryza sativa
  Clone ID: PAT_MRT4530_56338C.1
atgcgggcactggtggtggtgtccccttgcgatgtttttgcaaaaaagatctccgagtttccagttaattatgctccggtatccgctaccccaccgtccgatctcgtgctgcggttgatctggccgtacacgtgtcccgccatggtggccctttcacacccgtgggatcgttggatcgcgaacgcatga

SEQ ID NO: 54214 - DNA, 861 bp, Oryza sativa
  Clone ID: PAT_MRT4530_56339C.1
atggtgtacctttgggcactaggtttgtcgaaagtatatgtatgtagttgcaaaaatgctaccttaaatcgttctaatgattattattcaaaacagattgataattttgttgctaaagatcaaaacagacaagcaactacactgcctcaatactatgttgctggattggcaagctcatactatagaaggctcttccccaaaaatagtgttcatctgttccactcctcgtatgctctgcactggcgatctaagatgttcgaaatgaaaaatataaaggagcccctgaacgaaggcaatatttacatctccaagactacacccatatcaacagtcaagttatatcaggagttatttgagaaggatttctcaaatttcctcgagttgcgctcaaacgaacttatatctagtggtcagatgctactcactttccttggaaggaagaacgaagatgtatctgatggagatcaatgtactcttcatggtctgatggagaagaaaaagcttaacaacttcaacatgccggtctacatgccgtcaacgcatgaagtgaaaacaatcatcatgcggagcaagctgttcatcatcaaccagatccaactctctgaatcaaactgggatccttacgacgatgacttagaaggagaggttgtgctctacccggcgcaaagcgggttgaatgtcgcgaggtctttgaggccagtgttgaggcggttgttcactacctattttggggaatcggttcaagatgttctcttcttaaggattgccagtaatgtaagcaaataccttgacaaaaggaagggaaagcacaatgtcattgcactgtcattggcaagaacatatggagatggagtgctatag

SEQ ID NO: 54215 - DNA, 3632 bp, Oryza sativa
  Clone ID: PAT_MRT4530_5633C.1
gcacgagggccgcgtctcacgcgcgcgaacaattcaattctcggaatagaatataataacctccctttaattgcttggctttagcccctaatctcgctgtgcagagccacgcaactccgattaaactcgccccccagtccagccatctctactcctcttccgcctcccgtcaccttgacgaggatggagcggcgaccaagctggggcactggtccggatcgcatggacgcggcctcttcttggatgaatcactccggttgaggtctcctctccggtggccggcggcggcggaggagaggatggggcagcgaccaagctgcagaaggtgtaccggagctaccggacccggcgcaagctcgccgactccgccgtcgtcgtcgaggagctctggtggcaagcgttggatttcgcgcggctgagccacagcaccgtctccttcttcgacgacccgaaaccggagaccgtagcgtcgcgatggaaccgcgtcagcctcaatgcctccaaggtgggtcagggtttatccagagacggcaaggctctgaagctggcattccagcactggatcgaggctctttcctcagtgcctaaaaatgcagctgaagaagcaatgcataaaatatcttggtccgcaagagcgtgagcaatatgaatacatcattacaaaaggaaagattatccataagtactctgaagaaccccttgatacaagccaagggtcaaagtggatttttgttatgagcacaacgaagagactttatgctggcaagaaagagaaaggtgtgttccagcactcgagctttttagcaggaggtgctaccatagctgctgggaggtttacagcagaaaatggagttatcaagtccatctgggcctatagtggtcactacaaaccaagtgcagagaacctcagcaacttcatgaacttcctagaggagaatggagttgatctcaacaacgtgagccctatcactgccatcattgaatccaatcctccacaattgattctcccacaaaacatggtactagaaaacaaggcatctgggtcatcttcacaagttgaaggtgccgaaggcgacaatgctgccacagagcaagcaaagccaacctaccaaagaaccttatcaggtgggctacaaagccctagagccaccatcgacgtcccgcggaaagcgattcttgagagggtgaaatccaagagggaatcaagatcctatcagcttggccacaagttgtccctgaaatggagcactggggctggtccaaggattggatgtgtgaaggactatccaatgcagctcaggatgcaggcactggagatgatcgagaccgtagtggctgccgtcgctgtcttccctcacccgccatcgcagagagccgccgcggccgccggcgcatcgagggttccggccatcgcatcgagcccccgcggccgccgtcgcatttggtccacaggattgggattgtatgaaggactgaccccattggagctcagaatgcaagcatcgtggcagatggtaaacctggtcacccaaagggcgtccgtactccgtcacgtccgtcgttggcaggctgcccacgcatggccctccgcaccctaacagcccaagcttgactcactcatactaccttctatggaccacatcccaggacttcactgccccacgcccaagttaggaattagcatactgagtgatgtaactcagtaatgatgcagcagcgagacaccattgactagaattgcagttgaagctcttggtagtagaatgcatgtggccagagtcagagtgctagaggttaatgcctgctgcttttcaaaggttatgtggatctatttgtgctatgaatgaatcaataagattagtgctagagagagaggttttagtgtaaggaaggattactgcaggcgtgatcgttttagtgggataataattcatcgtagattcacatgctcaagggaaggatttagaaaggagttatatatggatgtttccaacagaagtagggagccacaggcactaactcgttgtggttgcaaagctcagtttgagattaaactatatcagaaagaaggtaactggtatgtcgttaggtttgtgtcgaagcataaccatccgttgtgtaaaggtgatcaagtgccatttctccgctcacatcgtagaataactcctgcagaacaggctaagatggtagaattgagagatgtaggtttgcatcagcatcaagtgatggatataatggagagagaccatggtggttatgagggtactggttttacttctagggatatgtacaatttttttgtgaagctgaaaaagaaacggattaaaggtggagatgctgaccatgttcttaagtacatgcaagcacggcagaaggatgatatggagttctattatgattacgagatagaccaagcaggatgcttgaagaggctattttggtcggacccgcaatcaaggatagattatgatgcatttggtgatgttgttgtgtttgatagcacatatcgtgtaaacaaatacaatctccccttcattccttttgttggggtcaatcaccatgggtcaactgtgatatttgcatgtgctgtagtttcagatgaaagggttgagacatatgaatgggtcctacgccagtttttaacttgtatgtgtcagaaacatcccaagtctgtgatcactgatggagacaatgcaatgcgtcgggcaatcctacatgtgtttcccaattctgaccataggttgtgcacctggcatattgagcaaaatatggcacggaaccttagtccagccatgctttcagattttagaacacttgtgcatagtgagtttgatgaagatgagtttgaaagaaagtgggtagagtttaagattaagcataaggtatcggacgacaataagtggttgaagaggatgtataatttaaggaaaaagtgggcagcaacatacactaaagggagggtttttctcagcatgaagagcaatcaacgcagtgaaagcttgaactcaaaacttcataggttgttggatcgtaagatgagcctagttattttggtggagcattatgaacattgtttgtcgcgtatccatcaccaagaggcagagttggatgcaaaggcttcacaatcagttttgagttatttacagttagaggccataccaagcttctgcatagcacgacggtggacaatgcaagcaaaatctgcatttccttcagataggtatggtgaagtttacacatggtcagaccagatggaacgctatcgtcaactacgaacagtggctagtgaagcttttttccgatgttccatgacagaagaaagtacactgaaggtgatgaaaatgctagataatttgatgcttgaagatgactgtagtgcaaattgtgacaactttgagattcagtttggtcatgtggttcgtcaaagtatgcgcactgacattgaaagtagtgagaaagtgcttgatccagaactagttgtccctaaaggagctcctacaaagagaatgagaggtttcttggagaaacgcaagaggaaattactttcagtccacgaagacataagacgtcttgagtctgaacatggcaaactacatgaagcgtctacatctcaagttaccaataggatttag

SEQ ID NO: 54216 - DNA, 311 bp, Oryza sativa
  Clone ID: PAT_MRT4530_56340C.1
cataaaaagaacaacggatgctttactattgaatggatttttttttgcagtcaaaaatggccagaaaatgctttttacgactgcatatttttacataggtcccaaaaatcaccatcaaggctatctaggctggatctgtcgttctgccaaaattagattctattaaaacaaattttagggcctaacaacatgtaattttgtgaagatcccatatcaaagccgctttccacatggctgttcacaggggtggaatcgagcatttctgaccgttaggctttggaattccctcaataaaggctgtcccttcgtta

SEQ ID NO: 54217 - DNA, 477 bp, Oryza sativa
  Clone ID: PAT_MRT4530_56341C.1
atggcgcccgccgatccaacccatcccgtttcgcctcgcccgagtccagccgtcgccatcgccgtgagccagctgggaggcttgctgtcaccgcgcgaggccgtcgggctcgccgcgagtggggaggggaccgggcggccgccgcgcaaggccgggggcgtcgaggccctaccctgccgccgcgaccgggggaccgggaaagctaccaacaatcaccacgactgcctggactggctcggcggcctccaaccgcaaccaccaccgcacgagggcaggcctggtggccgaccgctgctcgcgccggcagggccaccgcggcgatctcgacgctcgcgcgcggcggccccaccggagtcccgcggcgacaacccccttccgagcggtggcaccggcccccttccaagtggcggcggtggtggttctgggggattcgcgagcagcgtgctccggcaggaaacggagcaatgcggggtgtga

SEQ ID NO: 54218 - DNA, 162 bp, Oryza sativa
  Clone ID: PAT_MRT4530_56342C.1
cagctccttcagcgcctggggattgacgtcggactggagtcggctcaacatgaaatcaagcatggtatgatagtcttcttcacggagctcctctccattcttcagagtaatatcacacaatgtgtccagaatctgggcgtgacaggcgcaggctttttgtag

SEQ ID NO: 54219 - DNA, 233 bp, Oryza sativa
  Clone ID: PAT_MRT4530_56343C.1
actggcgattggttttggctggcacaagatgacaagcggcccgtgcacgactgactccgatattttctgatgatgaccagtatttgggaagacccacaccggatgttggcataaattcccgtgttaaaactgagtcaagccccgcactcatgtaggatgcacgttaaaagtaatcagtaaaaagagtatacccgtcgttattcggggaaaatgaggaatagtacccgtcaccg

SEQ ID NO: 54220 - DNA, 2392 bp, Oryza sativa
  Clone ID: PAT_MRT4530_56344C.1
ccggccgggatattctgaacagccaggcagcattctcgcatagctagcctcttcagactttcagagagcggtagagaggagagctgccgccatggggaggccgtcgtcgacggagaggctggtgtgcgtcgtcctggcggtgctcgccgtgctctcgccgctgtacatcgaccggcggcggccggcggcgtgggacagcgacgacgacgaggagggcggcggcgtgtcggcgctgctgctgccggcgctgctgatcgtgctgatcctggccatcaacgttacgtgcttcgtggaccggagggtggtcaggttcgacccctactggatacaccgcgtcgggggctcatcctgcggcctcatggccacgctgctgctgctcggcttcgtgctcaagtgtccagttcaagcttttcccgtaatctgcgcaactgagctctttgtgctaccgttgccattttcacaacagatctgggccgccacccgacccgacgccctcctccaaagtccaatctccatcccggtgcttcctccacctgacccgagcggctgcctcctctgccctgcacgaccgggcgccgctcctcatctaacccggtgcgcctcttccgcctccgcctctgcctccggcaccgcccatcccccaacccgccttcatcatctcatgacgatttgccccgtttcgtaccgtacacccacgctggtgaatccatacgccgctggccccggcgccgcctcccgacgctctggctctcccgactgggtcatgctggataaaacagcgtacatctccgaccgccggaacgcgtccacggctgaatcccagacgagcgagggccagatcgtccagccctccgttctcgccgcggaaggatccctcgttctcttccgcgtcaatttgtccccgcgtcccaggaggtctggcacctacatgagcccgtgcaactacttcgtctacaccgctggccccgggcgtccatggctcgacctgcttcctgaccccaatgccatgcccttcaactcccagcaatttggcctcttcccttgccgcagcggcgtcagtgagcactatgatgtggccttcctcaattctgaatgggtggcctctgatgaggcttgccagttcgagctatgcaccttctcatccaagaccggaaggtggagcagcaaaccagtcttgctggacttgtccccgtctgagattcacaaggtagcgatcgagcatgagaccgacaagctgatcaccattggacacgattcgttgggtttggtcgatctctggcgtggtattattctgctcgaaaagctgttcgacgactacccggttatgagatatatgacattccctaagccagtggtgtacaccatagatgcgtacggtgcaactgtatgcggtgaaatagccccagagtgtgctcgggatgtcgcctgctgcgatggtttgatcaagtttgtggacatagaatactgctacagtgacgacgtcaatggtaatggttggaaagccacgatatggaataggatgctttcttggaaagattggcgcaagcgtttctcagttgacaaatttgacatcttggttgatcccagttactccactgttttgcccgatctatgggacgataataccaaaatgatgcaattgaagaaactgatttgtactatccccactctgagcatgtatgacgacgattttgtttacatgatgtccacgatgactgaagaagacaaaaatgcctggatcatctctgttgacatgaaacagaacactctgcaagctgtggccccaatttctgctgaaaggttctccgttctctgttcagattgtcgtccctgtgcattctccaagtacctcaagattacctcaggggttgtcattcccaatcctgtgggcgagtacaccaagagaaatcatcttcaggaccgtgttctggaagcgctacggactcaagactcgttgaatgaacttgacgattgctcagaatttgagaggtcaaacttcgaggagtacaggtcactcgttcagtccagtccagtatcatctctgcattccaatattcagaatgttgctggatattatgcttctaatgatattgagaaagcggcctccaaagctgtgaatatttgcttacgaactttagctcagcttgtgagtggcaatgtctttctatctcttagagcttcggaagacctgaatcaggtattacaagagtcaaccagttatccgtcagcacatgctgaagccatcaggagcaaaatcaatgttgtccttagagccataggcagcctcgtgcaaactgtgccagtgcaaccaagaatgacgacggttgctgattcccacggcgtttcgaagatttatagcgaagaagagaaaaacaactctcacgaaccataa

SEQ ID NO: 54221 - DNA, 302 bp, Oryza sativa
  unsure (1)..(302): unsure at all n locations
  Clone ID: PAT_MRT4530_56345C.1
ttggttttttatttttttggggtaaaaaatttctaacattcatcctgcnatgctttgcacttccatttgctacaacataatggattcttcaaaccaaaattcccatacttcaatttccaactacatgaaaagataaaataagtaatctaccacgtcaatcgcacaatcttttctcatgcctaccaccatttctgtttcttatcaaggctgaatcagctcttgtcatctcacaaacacatcatccaccaaagcatccccttttacctcaactatcacatcttcgtaaattggatagcacagga

SEQ ID NO: 54222 - DNA, 462 bp, Oryza sativa
  Clone ID: PAT_MRT4530_56346C.1
catgatgaacaaactgaaaaaccaataaaaaagctaagaaatcaatgtcacacaataaggaaaaaattggtatcacccaagcatgattaaactaccttagcacgggaagtggaggcctagggtctcccacggcggcacaccctgcagatcaatcaggcgacgcaagaaggtcctaggggaagccaatgcacaaccggacggtgaagaaatccctgggaaagaagagaaacataagaatccactggattagatttgcacaggaagaaaggggagaaagcaagaacgggtactgtgcggcgacctcaccgaaaaaactgaagaggagagaatggcgaaaggaggcgtctacggaccagcagagaggagttttcatcaagggacctccactaccgtgtacggcggcagggacgccggccaatccggcgagcaccgtacgtagtgagcgcccaaatcgatgcggcg

SEQ ID NO: 54223 - DNA, 369 bp, Oryza sativa
  Clone ID: PAT_MRT4530_56347C.1
atggtggtgcgcccgcgggccagcgacgcggcagccttggcggcggcgcggaggcggatcatgttccgtcgtcgggagcgcgcggttgggggtcgccgttgtccatcctccgtcgccagctacgtccagcaaaggagctccccatcctctgcctcctgcccccgtcgtcgtctgctacatggatccgtcgtcaagctcatcctccacgccgactaccgcccctttttccttgccaccgagttcgtcctatgcgtcgactgtcgcgccctctccgtcgaggtcatccggatcatcgagctcaccgctccgctgggccaccacggccagccctggccctatgcagccgaggcgaccgccgggggcctatga

SEQ ID NO: 54224 - DNA, 485 bp, Oryza sativa
  unsure (1)..(485): unsure at all n locations
  Clone ID: PAT_MRT4530_56348C.1
acgaaatttgcaggtggcccccttgccgccctccgctagggcgattttatactgtgcggggggccgcctgcaaatgggcggcgagggggggcatggaattttgcaggcggaccccttgccgccctccgctagggcgattttctactgtggggggccgcctgcaaatgggcggcgagggggcatggaatttggcaggcgggccccttgccgccctgggggagggcgattttgtactgtgctctatattttttttatataaatatcaatagggggggggctttttatattgaaaactatacaagattaaaatntccaagactggtaaaatacaattttattattttttagggcatatttggattggtaccgtacaaatattttggtagtgccaaaatataagcaagttttggcactaccaaatatttggtaaggtaaaattgcatttgatcatatttggtttgcttgcaaaatgtaaaattgtagtg

SEQ ID NO: 54225 - DNA, 768 bp, Oryza sativa
  Clone ID: PAT_MRT4530_56349C.1
atggagccactcatctaccccgtggtgcaccagcctccgtgccaccgcgtgcgcctccactcaccccgtcggcctccgacgcggaatctggccaagggggccagatctggcgacgcctgtcccggccgccctgccgccaccgccacctccgctgctgcttcctcctttttcttcatcatgtcgcaatcctcgtctgaatccatccccatccccgatcaattcgtctcttgggtgaagtcgacggtttctgacaaggagctctccgaggaggtggcggaaggagtcctacctccatgcgagctcatcgattggcaggccgctgccagtgaagagttccctactccaaacacctttgaaggcccagcccgggaagaagaaccccactgtgaacggggtagtgggatccagatctggccggataggaaaaaggaattcttcgagctccccctgcagactaccaacaagggatggcgatccaaatggttccactgctccaatctgatccctagcttgcctcccttcaccggccagtcccccgtggtgaaagattgttggttctccttgccaaaccgcgatgagatggatcaggttgtccaatttcttgagtccgggatggcaatcaccaccgagaattgcctcaagccgctaagcatcaagtctgctcgtcatgaggatggaaaggtctctgccaagaagatagttaaatctgaagaaggcgatgccaagaccaagaaaattcctttgatccaactgatcactccaagatga

SEQ ID NO: 54226 - DNA, 286 bp, Oryza sativa
  unsure (1)..(286): unsure at all n locations
  Clone ID: PAT_MRT4530_5634C.1
ccggcgggacatcaccagcccaagtttccataacatcctcaatagctatggcgaccatagctctctctcggnaactatctacttttgtggtcttctcctaggcatggctctatggccagctatttggccgaacgtaaaccatgggacaccccccggcaggaggtttagtgagtggagatttgatagactacaaacatttgaaccacttcccgagagtgagggcagaagccggggttacagaatactttgatgagaagaatgaacaattccagtgcacagggacatt

SEQ ID NO: 54227 - DNA, 1548 bp, Oryza sativa
  Clone ID: PAT_MRT4530_56350C.1
atggcttcttttcttccatggctgccatggcttctcgccgctctcctctccgtctacctcctcgacctccttgcacactcccgccgcctcctcccgccgggaccccgcccgctgccgctcatcggcagcctgcacctgctcggcgaccagccacaccgctcgctcgccggcctcgccaagatgtacggcccgctcatgtcgctccgcctcggcgcggtcaccacggtggtcgtctcctcgccggacgttgcccgcgagttcctgcagaggcacaacgccgccttcgccagccggtccgtccccgacgccaccggtgaccacgccacgaactccgtcgcctggctgcccaactcgcctcggtggcgcgcgctccgcaggatcatggcggcggagctgttcgcgccgcaccggctcgacgcgctccggcgtctccggcgcgagaaggtgcaggagctcgtggaccacgtcgcccggctggcggagcgcgagggcggcgcggcggcggtggacgtcggccgtgtcgcgttcgcgacgagcctgaacctcctctcgagcacgatcttctcccgcaacctcaccagcctggacgaccacggcgagtccatggagttcaaggaggtggtcgtggagatcatggaggccggcggttgcccgaacgtgtcggacttcttcccggcgatcgccgcggcggacctgcagggatggcggcggcggatggccggcctgtttgcgcggctccaccgggtgttcgacgcggtggtggaggagaggctgagcgagcgcgacgccggcgaggccaggaagggtgacttcctcgacgtgcttctcgacgtcgcggcgcgggacaatgactcggccgggctggaccgtgacacgctccggtcactgttcacggcgcggccgtgcgagcggttggtgcgcacggcggcccgcgaggcgggcggtgggcggcggcacgtcgtcaggcgtgccaagcaagcgggggcgggcgcaacgaggaaggggactggtaggtgggctccagacaccggcgggtggcgtggaggaggtgccatggagggggcgtggctgggaggggaggcgagcgtggcgggcggtcgggagggtgctgcggcgggcacggctgacgcgagaacgacctctcgtccttcgcgtcctcttcctgatgccgcatctgctgtccgccatggaggcagatggctattcgtaattcttacaatcatagatagaatccgcaagcgcacggatataccgatgcactggcaacccgctgctcctagatgtcgctctactatgtacccggactgggaggacttaagtgatctcgagggctgtcaccacctctacacctacctcaacggcagttatgacggttgtgagaaggagaaatgtccgaactgcctcgcaaccgtcactgggagagcatctggagcgtccacaccaaaccccaggatcaacgatgttggtggtatagaatcggcatttaacagccgccaacaatgtggcaatgagaacatagtggtatccatgaatgcacttcaagaatga

SEQ ID NO: 54228 - DNA, 1010 bp, Oryza sativa
  Clone ID: PAT_MRT4530_56351C.1
gaattatgacgcaataaagaattatttttgaaaaggaaaagaggattattgcatcagcgggctcggctcacggaacgaacggccgagatctatcctatccacaacggacggccgggatctatcggcccacgaccggtccacgggacacagcgacgatgacgtcggcgatgacgtcaccaccggcggcgactcgggctcacatgctcgccggcgaacgacggcgcggcggctcaaacggaggacaccaacgggttgtgggcattgcggtgaactcaccggtgacctaaacgacggcggacgatgaccggacggcgacggcgtcgaggaagaagcggcggcgaccttcggcttgacgacaacagcggtgttccggtggtcttcggcaaaacggaggatgggacgaggatggcgatgacttggcgaacccgacggtggccttcccgagtgacgacgacgaccggagcggcggcggatcacggctagacaagcggcggcaacggcggcgcacgggctcacgaggctagggcgctacaggcggcggcgagctaaggcgagggtggcgacggatagaggaggtcccgggggtctttttatagtggctaggggcagcgatggaggcccaaggcaaccggcgacggaaaggaaaggttagggttcgagagagagagaggaatccgattcgagatcgaatccaccgctttccaaacgattttagccgacgattccaaaagagaaaagatagaggggatcccggggatcatttcccctctattgatttcaccggagaaggaaaggcgcggccgaatttggaaggagacggcggcgcggctcggctagggttcggccaggcgacggcgcaaggaagacgacggccttgacaggtgggccccacctgtcagcgggcggacgcgcacgcgcgagcggcggctcggctgcgggccgacttgggccggggaggagagagagagggttttgggccgactttcggcccaaatccaaaagagaatttt

SEQ ID NO: 54229 - DNA, 367 bp, Oryza sativa
  Clone ID: PAT_MRT4530_56352C.1
ttggccctttttcccccctcttcctcctggcgccggcgggtctcattccatggtgatggcttgctgcctctgacttcagtgatcccaaaccatgctttttggatggtggcttggtagaccaagtgatcactattgatgctttgattgtctgatgaccggtggttgcaagatggatctccaagagttgactctggaggcacaagtttgaatgccctggttcgatgtcattgcactccggtgatcaggtcacatgtttgatttccactttggtggcttgagagcatactctagttgtctgaatcaagttctctgaaagagagaccggagatgagagaggagggagattgattgaaaaaaaaaaaaaaaa

SEQ ID NO: 54230 - DNA, 198 bp, Oryza sativa
  Clone ID: PAT_MRT4530_56353C.1
atggcggcatcttctccagcctttggctccctcaacgacagtcctccgcttgccggcgtgtctgcaccgccgctccctccccgcgagccagcactgccgcagatcccttccaaccccagcgctgccaccgctccctccctctgtgagtcggcacaggcacgaatcccctccctccgcgtgccgccgctgccggtgtga

SEQ ID NO: 54231 - DNA, 1179 bp, Oryza sativa
  Clone ID: PAT_MRT4530_56354C.1
atggggagatcaccgtgttgtgagcaggacgccgacgtgaagaaagggccatggacgccggaggaagacaagcttctggtggagtacatcggcaagaacggccatggcagctggcggcgcctcccgaagctcgccggactcaaccgctgcggcaagagctgccgcctccggtggaccaactacctccgccctgacatcaagcgcggcggcttctccgacgacgaggagcgcctcatcatccacctccacgccaccctcggcaacaaatggtcgtccatcgcgacgaagctcaaggggaggacggacaacgagatcaagaactactggaacacgcacctccgcaagaagcttctcagccaggggatagaccccgtcacgcaccgcccgcgcaccgacctcctcgccggcctccccaacctcctggccgccgccaatctcggcggcgccgcccaccagctgcccttggacttgaacgccatcaagctccaggccgacgccgccaagttccagattctgcagggcctcctccgcgtgctcgcctccaccaccgccccgccgcccaccgccgctgtgctacctggcacagacctcatgacgtccatcctcggcgccaccctcgccgccaactccgccggcatactcggacagcagcagcagctcgccggcgttgacctcagccgcctcggccagtacaacggcaactacgacaacctgccgccgttgaccaacgacagctgcacgcagcagacgcagccggccatgtcgagcatgtcccccgacagcctactcaacagaatttccagcggtatttccggggacatgctgggctcgccggagctttgccacggcggggacgggcttagctcgccggagctcggccagggcggcccgagcgcaagcaacatgacgacctcaccgatggcgccgccgccgccaatggtagctgcagatgatcatcagtgcaatactaacacccccagcggcggcggcgacggcatgtcgtgtgagcagacgccggcgtcgagcacgttcgacgggctgaacctggacgacatcgacatggaaggttgttgcccgatgacgcacattttgcgtgccgactgatatatacttatctcacatgatactaatttgatgcaggcaatgcccatcatggttgatcagcagcaacaacgcaag

SEQ ID NO: 54232 - DNA, 501 bp, Oryza sativa
  Clone ID: PAT_MRT4530_56355C.1
atggcggtggggatggcgacggtggtggtggagctccgcgaatccaacgacgacgcggcgtttggcaatggtttagggcgcgctgctccaagcggcggtagtcgatggcggcagggagggtggcatttgggagcttccgctgtggatgctttggttgacaggggctccgagtttatcaatgctaggttttcaccggttttcctgaaattaactgtgccgttatctgccccgcaaggacgaggtcagcaaggaagaggcaagaccgtaggagtggccgacaccggcagtagcgacgaaagtggggccctcaatgacgggccgactatggctctagtggaagagcatctcgcggccatggcaatggacatggggcaggagctttctagaaaaataccaataattgaaatctccaacgtcagactttttgctctccacttatgtgggagtgcgcttgcttccaatccccagatgtatggagggagggccacaaagatcatgtga

SEQ ID NO: 54233 - DNA, 168 bp, Oryza sativa
  Clone ID: PAT_MRT4530_56356C.1
gtagagtttgatttgctgtggtgtatgtatattgtttagaataaagaaggactagatgtggaatgatgttaaggggattgataatggttaagttattatgttaaaggtataagatgttctgttgtttgagatataatcgttggaaatatttacttgtcgctcatattt

SEQ ID NO: 54234 - DNA, 446 bp, Oryza sativa
  Clone ID: PAT_MRT4530_56357C.1
ctttcttattcctttgtcctggccgatgaatagactagactagatgcggaaactctaacatgggaaccataggtatttttactcttgcgaaactttttcttgcggcggactgacacagcagagacaaagcatggaccctgtaagcataggttctgactgcaatgactcttgaatacagctctatttcttgctcagacttgtttatgctgtggggacaccattcttgctttctttcctattaatattctgtggaatatgataagtggtatgccgttaacacagattactagtgcacatccaataatatcagagtgcgacaacattttggccatgtgatcatggacgcatagcgtgaagattaactggatgacagatgatcatgcttggattactaagcacgaaaggtgctagtcagtgaacgaccgtgctccgtgctctccctgatg

SEQ ID NO: 54235 - DNA, 130 bp, Oryza sativa
  Clone ID: PAT_MRT4530_56358C.1
agctgacggtttggatggaagcagcactggcatcgttggcacggatcagatacccgaacacgccatgttcgaaggctagaagcactctgacaccgagtcgtgcccgctcgatcaacaaaatcaataacgg

SEQ ID NO: 54236 - DNA, 398 bp, Oryza sativa
  Clone ID: PAT_MRT4530_56359C.1
gctagacatgaccttcattatgaaataaaaattggaagtaatataaagtaccattttacacagtccgtaaacttaatttacttctgctgaattatggaaaacatcagctcctcgacctccatgaacttttctaggaaaaaaaattattcataagctagaacatctctaggctaatagccattctcactggattgtcatttcgaatacttcgcagcaaattcagcaatattcttgtcagaccttcctccttcatgcattgcctctttagctttcttcatcaaccttgcagcactcctcctatagtcctccttcctatccccatccatcacctcccgaatcccacgcgtccgcccacgcgttcgtccacgcgttcgcccacgcgttcgtccacgcgttcg

SEQ ID NO: 54237 - DNA, 1614 bp, Oryza sativa
  Clone ID: PAT_MRT4530_5635C.1
atgggggtggacgctgctccggatcgcatggacgcggcctcttcttggatgaatcctccggttgaggtctcctctccggtggccggcggcggcggaggagaggatggggcagcgaccaagctgcagaaggtgtaccggagctaccggacccggcgcaagctcgccgactccgccgtcgtcgtcgaggagctctggtggcaagcgttggatttcgcgcggctgagccacagcaccgtctccttcttcgacgacccgaaaccggagaccgtagcgtcgcgatggaaccgcgtcagcctcaatgcctccaaggtgggtcagggtttatccagagacggctgggctctgaagctggcattccagcactggatcgaggctattgacccacggcatagatatggtcacaatctgcatttctactatgatgtttggtgccaaagccaggccggccagccattcttctactggcttgatattggggaaggaaaagatgttgaccttcctgagtgtcccagagctcgcctgaagaagcaatgcataaaatatcttggtccgcaagagcgtgagctctatgaatacatagttacagaagggaagattatccataagcactctggagaaccacttgatacaagccagggtcctaaagggacaaaatggatttttgttatgagcacaacaaagaaactttatgctggcaagaaagagagaggtgtattccagcactcaagctttttagcaggaggtgctaccatagctgctgggaggtttacagcagaaaatggagttatcaagtccatctgggcctatagtggtcactataaaccaagtgcagagaacctcgccaacttcatgaacttccttgaagagaatggagttgatctgaaagaagttgaggtgcgctcatccaccaacgaagactattatgaagatccagtgcctaataaacagaaccctcttgctaccgtcatggaatccaatcctccacaattgattctccctcagaacatgatagaagaagataaggcatctgagccgttttcgcaagctgaaggtgccgaaagcgataacgttcctaaagtgcaaacaaagccaacctaccaaagaaccctctcaggtggtctgaaaagccctagagctgctgatgtcccgcgggaagcaattctcgagagggtgaaatcgaagggagagtcgaaatcctatcagctcgggcacaggctctccctgaaatggagcactggggttggtccaaggattggatgtgtgaaggactacccaatggagctcagaatgcaagcactggagatggtaaacctgtcaccaagggcgtcgactccatcgccgtcatggaggctgccagcatgcctctcacctacacccaacttaccatcatctcctcttggaccaatccagacttcactgccccagccaagttagaatagcatatgagtatgtaactagtatgtgcagcagcgagacaccattgcagaattgcagttaagctcttggtgtagaatgcattggccagagtcagatgctagaggttaatgcctgctgcttttcaaaggttatgtggatctatttgtgccatgaatgaatcaataagattagtaatat

SEQ ID NO: 54238 - DNA, 1197 bp, Oryza sativa
  Clone ID: PAT_MRT4530_56360C.1
caaggggggaaggaaggaaccgaggcattatatcaaggaataatttggagggttggaaatggtgataacatcaagatctggagacacaaatgggatgaccggcttataactctggaaaagagggtgaggaatagattaatgtatgttaaagatctaatggatgcaggctccagaagctggaatgagaacttgatccgccatgtaatgcacaaggaagatgctgacgaggttttaaagattaggctgtccaatcaacaacctgaagatttccctgcttggcatcttgaaaaaacagggttatttattgtgaagagtgcttacaggttggcctggaacctatctaaaaatgttgtggaggcatcttcaagcacagcaacatcaggggaaaggaaactatggttggctctgtggaagacaagggtacaggctaaaatcaagatttttgcctggaagttagcacttgacaggttaccaacttgggtaaacaagtgcaggagaaaaattgaaagacaaagtatctgccaaatttgcggatcagctgaggaggatggttttcatgcaacggttgaatgcacaaaagcaaaagcacttagagaggctatcagagaggtttggcgattacctcctgaaatcaagttgctagaactggaccggatcggctactgttgctcttggatggagctgatgaagttgagagagcgcacacgttatatatgctttggcgtgcatggcatcttcgaaatgagatggtacatggtgctgattccagtcctatagctgtctctatcaacttcttggttaactatgaagcatgtatgttgcctgtccgacaacagattgatgacaagaagggcaagcgaccaatctctgctaccctggctgaagctttggctttcctggagggcgttcggttggcgatgaactggatacatatgccaataatacttgaatctgacaatgccgatgtcgttgctggactgaatataacacaagcgtcaagagcagaatggggaggtataattgccgagataagagtggcaatgcaatgcttgctgcaggtgcaagtgcataaagtgaagagagattcaaataggatagctcatatgttagctcagatggttatgacctcaggagttgaagcggagtggaggttatgcgctccggctgaaattctagagctgttaaatcaggaatata

SEQ ID NO: 54239 - DNA, 1563 bp, Oryza sativa
  Clone ID: PAT_MRT4530_56361C.1
atgaaatgtttcaaccaagccttactagctcgtcaggcatggagattgattgctacgccagagagtctatgtgcaagggttttgaaagccaaatactttccaaatggatgcttgctcgacactgccttcccgttagtctcgtcgccgacctggaaaggcattgaacacggcttggaactagtaaagcaaagaataatttggagggttggaaatggtgataacatcaagatctggagacacaaatgggtggcacatgatgaccggcttataactctgaaaaagagggtgaggaatagattaatgtatgttaaagatctaatggatgcaggctccagaagctggaatgagaatttgatccgcaatgtaatgcacaaggaagatgctgacgaggttttaaagattaggctgtccaatcaacaacctgaaaatttccctgcttggcatctggaaaaaacagggttatttactgtaaagagtgcttacatgttggcctggaacctatctaaaaatgctgtggaggcatcttcaagcacagcaacatcaggggaaaggaaactatggttggctctgtggaagacaaaggtacaggctaaaatcaagatttttgcctggaagttagcacttgacaggttaccaacttgggtaaacaagtgcaggagaaaaattgaaagacaaagtatctgccaaatttgcggatcagctgaggaggatggttttcatgcaacggttgaatgcacaaaagcaaaagcacttagagaggctatcagagagattgatgacaagaagggcaagcgaccaatgtttgaggaactgacagaaaaagtgcatgccagtgctgtgcaaattgcatgcatgggaacctccaccggaaggaaggagacgggtgatgcttgtgctggaataattgtcagagattgcaggggcctggttcttcttgcagcttgtaagaagcttccaagatgcagctctgctacccaggctgaagctttggcttgcctggagggcgttcggttggcgattaactggatacatatgccaataatacttgaatctgacaatgccgatgtcgttgctggactgaatataacacaagcgtcaagagcagaatggggaggtataattgccgagataagagtggcaatgcaatgcttgctgcaggttaatttggagcgtcacgggttagtcccgctcggggctacttcggggcgttacaaggtgcaagtgcacaaagtgaagagagattcaaataggatagctcatatgttagctcagatggttatgacctcaggagttgaagcggagtggagtgtcgatgccacctgtttccgcagctccattgacgccacactcgctgcttcagcactctcgtggctgcatccgctgcttgtggcagacagttgtctccggtgccactcaccatcggtcgtcgccgttaccgtagacgtcgtggtcaccgctactattcctagggttttgggaagggcatccaacgtcgagacaaagtggtggcttgggtcaggtttagttgaaccagatccaactagatacatgtcactggcctga

SEQ ID NO: 54240 - DNA, 111 bp, Oryza sativa
  Clone ID: PAT_MRT4530_56362C.1
atgcccgatgaatgtgggcccccaaaagcagcagattttgccaaggcgtctgcttgctcgttctggcctctaggacttatcgacgtgacctgccaccaacttggagtcagg

SEQ ID NO: 54241 - DNA, 1166 bp, Oryza sativa
  Clone ID: PAT_MRT4530_56363C.1
atgtcgctccgacagctgcttctccaagcgcggcgcttcgcgtctcggccgccgccgccgctctcgaatatgctcgttctctgccgaggcatttctgaccgcggacacaaagccttgccttcggcgccgcctcgccactccaccgggcaaatccagatgccgcaaactttccattgctcaaatgccaacccccttggcaatcgcttccaaattgacgtggtcgactccgacctctggcccgcatccttcgacctgtccatggaccatgcaccgaaaactgggtgccctgatgattttcaagaacatgaggatggagaaatgcatgactctgaagatgagatagatgacatgaggcaccgtaagaagctgttttacaagttggacaggggttccaaggagtttgaggagaacaatgtgtccttgcgccacaggcggaagagagaaaaaggcaatgtaaagaatccaaaggaatccaagaaggtggatcctgatgaatccgcttctgtgaagctcccaaagctgaaaacgaagtatacagtgcgtgaggaggatgtggttgaggcaaagagggatcgggtgccaacatttaaccagatgacggatccttaccaccaccctttctgtctggacatacatgtcaccaaggggtccgttcgtgcttgctttgtgcaccgagtgagcagcagggttgtcacagtcgcgcactccatatcaaaggacatgaagtttgatgtcggttcaaggaaaggtatgaaggcgtgtgcagcggttggggcattgcttgcaaaacgtgcaatagaggatgatattcacaatgcgatttatacaccaaggaaaggagataggattgaagggaagattgaggttgtgctgcgtgcaattattgataatggggttgaagttaaggtgaaactcaagcaaaggaagccaacaaagatacatggcatagaatgcactggctatgcagcattctcaatctcactgatggctaaactattcatccgcatgactcctactagaaatgctcagaagtcatgagagtttctgttactacatggactggaagtctggaagagctggtgctactggagcaccaccctctgtgtgcaaactttgggtcaacacttttttgtcataagaagggagaaccagctctaccttatagc

SEQ ID NO: 54242 - DNA, 249 bp, Oryza sativa
  Clone ID: PAT_MRT4530_56364C.1
ccaaaagccatttggccttttaccaccaacagcagaaaggtccaacaccatttttttcctgcccccacacccggtcacaaatcaaatcaaactgtatgcatcgattggggacccaatttaattaaaatggccctagctacaacattcaccacgcccaatatttaaatgccctgtttcttaattgggtccactatctttatcaacttcctggctaaaaactagctatcactggtccagaaactgatccat

SEQ ID NO: 54243 - DNA, 1809 bp, Oryza sativa
  Clone ID: PAT_MRT4530_56365C.1
tagtggatccccgggctgcaggctcaaagtcgtcgtagaccccgcctccttcctcctcctcctcgcgcttcgatttggtttggtttgattcggtttgcgagatgaaggatggtggtggaggaggagggagggggcagcagcagcagtggccttgcgactactgcggggaggcggcggcggcgctgcactgcagggcggacgccgcgaggctgtgcgtcgcctgcgaccgccacgtgcacgccgccaacgcgctctcgcggaagcacgtccgcgccccgctctgcgccgcctgcgccgccaggccggccgccgcgcgcgtcgcctccgcctcggcgccggcgttcctgtgcgcggactgcgacaccgggtgcggcggcgacgacggcgcggccttgcgggtgcccgtcgaggggttctccgggtgccccgccgccgccgagctcgccgcgtcgtgggggctcgacctccccggcggctgcggcggcgaggaggaggaggccgacgacgcgttcttctcggcgctcgactactccatgctcgccgtcgaccccgtgctgcgcgacctctacgtgccatgcgacccgcccgaggtggtggtggccggcggcgggcggcgactcaagggggaggcgctcggccaccagctcgccgagatggcgcgccgggaggccgagacggcgcacccgcacacgcagccgcactcggatctgagcccccgcacgcctcgccggacctccgccgcggcgagcggccgcctgcaggaaaagcaagctcccccgccgttgcctcatgctgctgcgacggcggcgccgctgccgtacacttcactgctcatgatggcgccggccaactgcaccgagctcatggaaaacaaccgtgttggagacgaagatgaaaatgttctgtgggagagcaccgcgccatcagtgccaccaacccagatatgggattttaatttgggaaaatcaagggatcacaatgagaactctgcacttgaagttggatttggctcaaacaatggaggctttatgattaagagttataatgacatgctcaaggagatttcttctgggacaacgaaggatctggaagatatttatgactcaagatattttgcagctgccgaagatatcatgtcgactaatgtctgtcagctgtcatcgaaaaatccaagcaccaggagcaacaaacggaaggcgagctcatgcgcttcgacgatcgatggaccgacaacttccacaagccatgtacctgctgcttcaggggcattggggggctcttcgaacgacagaggatcggctctccccaaggagatttccttctgtgatcagaccgtcgtccctaccggagccgatcagaggccatgtaccatcaagatcgacagcgagacgctcgcgcagaacagggacagcgcgatgcagcggtatgagaagcacatcaggtacgagtcgaggaagctgagagcggacacgaggaagagggtgaaaggccggtttgtgaagtcgaacggagcacctgatgatgtcagcaatggcgggtgatctcatccctgcaatccctgatagctagctgcaatgtacgtagcctggctttttgacgttgcagagatcgatgtggccatatatatgctgagagctaagtctgaaatatgttgcgtatgttgttacaacctatgcacgctctgcttaagtctgtctgctgctgcatgtattgttcagctaaaattttgcgtccaagagtcgatcttgataattaagtacccctactacaaatctacactacatactgtaatagaccttagtttttttt

SEQ ID NO: 54244 - DNA, 1791 bp, Oryza sativa
  Clone ID: PAT_MRT4530_56366C.1
atgattgatgatgaggctgactttggcaacatcactgatgccacagaagggcaggcagctgcaaagttccgtccgaaggcacgggccaagccccgtaagacatctttgccatccagatccctggcacctcatcctactgtggaatcaacagatgaaaatgtggaaacattaaataaagatagcacctcacaagaacagtctgttgataaaaaagcagcatcattaggatgccatggtagtgagacagatggtaatgcttgtgcttctggcggtatacttgacacaccttctgaagatgtggtgacagtatccctggggcttgtgaataatcctgatgtggcattggattcttcaacagttttcgcttcttctgcacataaagtttcccaaaatgaagagaataatgatgatgtatctcatgtggctacacacaaagaaaacatggtggtttcagatacccaagcaccaccgacctgttgcagtgccaggacaattgatgatttggctgactttgaaggattgtgtgatgatactcatgttgaggaagaaagagttgcaaaattccagccgaagtttcgggtgaaaaccagcaaggccgcatcgaaatctcagaggactaaccaaaaggcaggagtctccactgtagatgtgctctcccaaaacaaagaagatggtaaagatcaggcaggatgcaatgacaagcagctgcactctcctactagacatcaagaaagtgtacagatctcatattctcaagcacacctgggaactcataacagtacaatcgatgacgttgctaactctgatagtattatggaagaaccagctcaagaggaaatggctgcaaaattccaacctagactgcgaccaaaggctggtggagcttcacctggggttgctgagactattgatgctgcttgtgtagctactccagagtttggggtttcctctgtagatgtggtttcccaagatacggaagaagatagccatagagaaggcctcagtgatgattcatgccaaaaatatatagatgaagaggctattacaacttcaggcactgggccaccacaggatttggatgatactgttgatttagactcgcatgctgaaatggtaaatccacatcctgatggtagtccgttgatcattgaagagctctcagatgatcaagaatgtaatgacccagagaatcaataccatgagggggagccatatgatcatgttattgaacaagagccagaaagggatgccagagaaacaggaacatcaatgaaattacgaaacaggagaaaattacaaaaagatgggatacctgagcataccgctgatgatatcatggatgaagactttggtgaacctccatctgacgaacaagataatgatagtggtgatgagtacaccgctagaggcaagcagaagggcaggagaaaatcaagggagaaaaatattaacaaagaaccttcgagaggtaccaagcgcacctcgggggattccactatagaggaatcacagaagcagaagcttcagaaaaataaaataatcaaaaagctcaacatcgaagatgtccagccagatatcaacaatacacatgaacaggagggtacatcaaatgaagaggaccctggaaataagaatataccgggtggattaattaatgaggaggaagaaaatggtttagattggtcagataaagagctggacatgcacagatctgaggtcgaagagaaggagcacgtttctacaaatgatgatgatgatgatgatcttggtgatgtttttgattggtactaa

SEQ ID NO: 54245 - DNA, 175 bp, Oryza sativa
  unsure (1)..(175): unsure at all n locations
  Clone ID: PAT_MRT4530_56367C.1
gtccggnatttcccgggttcgacccacgcgttccggggttcgtataggantgtagggtatattacgttgctttccgggcggcgattcgatcgatttggagcaagcgnggcggcggagnngcggaggcggagaaggatttgaggagggagaagaaggacggggnntggtgaaggag

SEQ ID NO: 54246 - DNA, 1579 bp, Oryza sativa
  Clone ID: PAT_MRT4530_56368C.1
atgattgatgatgaggctgactttggcaacatcactgatgccacagaagggcaggcagctgcaaagttccgtccgaaggcacgggccaagccccgtaagacatctttgccatccagatccctggcacctcatcctactgtggaatcaacagatgaaaatgtggaaacattaaataaagatagcacctcacaagaacagtctgttgataaaaaagcagcatcattaggatgccatggtagtgagacagatggtaatgcttgtgcttctggcggtatacttgacacaccttctgaagatgtggtgacagtatccctggggcttgtgaataatcctgatgtggcattggattcttcaacagttttcgcttcttctgcacataaagtttcccaaaatgaagagaataatgatgatgtatctcatgtggctacacacaaagaaaacatggtggtttcagatacccaagcaccaccgacctgttgcagtgccaggacaattgatgatttggctgactttgaaggattgtgtgatgatactcatgttgaggaagaaagagttgcaaaattccagccgaagtttcgggtgaaaaccagcaaggccgcatcgaaatctcagaggactaaccaaaaggcaggagtctccactgtagatgtgctctcccaaaacaaagaagatggtaaagatcaggcaggatgcaatgacaagcagctgcactctcctactagacatcaagaaagtgtacagatctcatattctcaagcacacctgggaactcataacagtacaatcgatgacgttgctaactctgatagtattatggaagaaccagctcaagaggaaatggctgcaaaattccaacctagactgcgaccaaaggctggtggagcttcacctggggttgctgagactattgatgctgcttgtgtagctactccagagtttggggtttcctctgtagatgtggtttcccaagatacggaagaagatagccatagagaaggcctcagtgatgattcatgccaaaaatatatagatgaagaggctattacaacttcaggcactgggccaccacaggatttggatgatactgttgatttagactcgcatgctgaaatggtaaatccacatcctgatggtagtccgttgatcattgaagagctctcagcgggaactactgttaaatttcaaccttatgttcgaaggaaaaaaggcaaaggaaaatcagtatcttttgttccaccaaatgtttctcatgcgcatgctcctacagacaccaattttgagacaagcaactctagccatttctgtaaagatatagcaactggtgaaagtttaagcaacttgccccagcaagcatctgaaaagatctgtattagtggcgaacatcatccagatgatcaagaatgtaatgacccagagaatcaataccatgagggggagccatatgatcatgttattgaacaagagccagaaagggatgccagagaaacaggaacatcaatgaaattacgaaacaggagaaaattacaaaaagatgggatacctgagcataccgctgatgatatcatggatgaagactttg

SEQ ID NO: 54247 - DNA, 726 bp, Oryza sativa
  unsure (1)..(726): unsure at all n locations
  Clone ID: PAT_MRT4530_56369C.1
ggatcggcacgagcggcgacaccatagtcttctcccgctcggcgtacggccccgacaagctgctcttcatcgactgcaagaagaacaacgcggcggcggcggcgcaacaatcgtcccggtacaanggggtggtgccncacccaaacnggangtggggggcgcaaatctaccaacggcacncncgggtgtggctcggganattcccccacaaaaaagcggcggcgcgggcctaccanatngcggcgctccngtnccgggggcgcgacacngccaccaacttcccccgggccgcggcgtctgncgcccaaactcccgttcctctccgcgcactccaaggncgaaatngtccacatgctccngaancacacctacccccacaaactccccaagggctccccccnggcgccgcatnggcgcccncccccanccacccgtcctgggcgcgcgaaccnctgttccaaaaaggcgtgacacccancnaatncgnaactcaacncctccttgtgccccagcacaccccaaaaaaantcccctcncccgcgggaantccaatccnctccnccncncacggnaaggggtttnctcacttcaaganggnaaggaagttnngatccgtcctatgaaacancaaatctttacaaggtgacatctagaagcccccgcaaagcacaacgncacacttagttcctatcgggatcacgaagggaaggaatcnnaagactttcc

SEQ ID NO: 54248 - DNA, 360 bp, Oryza sativa
  Clone ID: PAT_MRT4530_5636C.1
atgcctagccgagacgccgccgtcgcttgctcctcgcgtcaagccgctaccgcctggacaagagcccaccttcgtctcgtcccctcgtcgagccgccgtcgcctggcctgcctcgatacgcgcggccttctgctcgccaccataggttggattggggatggcaagaaggacggcattgtttggttatggctcaccaggggtacaaagatcgttcacctcatatccgacgaggactatcaccacctgtttgttggttgcgacttcacggcggcggagcgtaataatgcaagactttttcaacacgtgtccaagacaccggatcaacttgcggaggatattaaagaggaaattgctgtctag

SEQ ID NO: 54249 - DNA, 903 bp, Oryza sativa
  Clone ID: PAT_MRT4530_56370C.1
atgccgagttcatctgtatgtcctctccctatggctgccaagaccaacatcgagttgcaacacgattttgaagaatggggagtggaatctcgtcctcctggtgggttcgttaatcttatcaatgccccatcaaaccatatgcatcatgtcgccgaagggagtccatcacagcctatcaatgttgagaatggagatatctctaggactaagaaacgcttattatggacgaacgatgaagacttgagattgatcagcgcctggctgaacaactcaaatgattctatagaatcaaatttcaagaagaatgataaatattggggcgatgttgctgcagcttacaacagcactaccccaaaaagccgggttaggcaagttaagcaagttaaggatcgttttggtaaaattaagaagaagcatgctttctttggtgtcgctggttctaacaacgacatcaacgtgccgaatcagtcccctctattccttgaacaagttagaggggaggctcctcgggttcatttttctgttaacgggaatgagtataacaatgggtattaccttgctgatggtatatacccatattgggctagcttcataaaatctatatcacttccacaaacagagaagcataaattgtttgctaaacgtcaagaaggggcaaggaaagatgtggagcgggcttttggagtgttgcaagcccgtttcaacattgtgcgccgtccagcgaagaagtggaaacggaagagtgttgggaaaatcatgaacatgctctgctcagtatgtccaaatcatggtgctgcacttctcaaagacaccgatgttgggaaagatgaagggatcgttgaggaacttgatgtcgtcattgctggacaagacctgctcactggtgaggaggaatttgattga

SEQ ID NO: 54250 - DNA, 1155 bp, Oryza sativa
  Clone ID: PAT_MRT4530_56371C.1
atgtcagattcatcctcaaactcaaactcatcctcctactcaaatgacctagacccatccaaatttcttgacaagtacatttctgatcaaaatgtcctagactcctttgctactcgcatcaagtgcacagcagcgatccgtatgttagcatatggcactcctgctgatgctttagatgaatacttgctaattggcaaaagcacttccttagagtgcttggacacttttgcacgaggggtagttgaggtctttggtgggcaatacttgcgacggcccacaagtgaggatatagatcatatactacaagttaatgaatctcgtggctttccgggtatgttaggaagtattgattgcatgcactggaggtgggagagttgtccgagagcttggaggggacaattcacccgtggtgactataaagtcctaacaattatccttgaagcggttgcgtcatatgacctttggatttggcatgctttctttggtgtcgctggttctaacaacgatataaatgtgctgaatcagtcccctttattccttgaacaagtgagaggggaggctcctcgggttcatttttctgtaaatgggaatgagtacaacaatgggtactaccttgctgatggtatatacccagaatgggccagcttcatgaagacgatatcacttccacaaatagagaagcataaattgtttgctgaacgtcaagaaggtgcaaggaaagatgtggagcaggcttttggggtattgcaagcccgtttcaacattgtacgccgtccagcaaagaagtggaagcgaaagagtgttgggaaaatcatgctagcttgtgtgattctccataatatgattgttgaagacgagagagaggatgcaatatgtgacattgacctcaatagaattcctaggacatcaatagttctgcctcctgaagtaacttgtgatgataacccatgtttttctgatgtgctacgtaggagatctgctattcgtgctcgttcagtccatacccagctgaaaaatgatttaattgagcatatttggaatcggaagatgttctcttgtccaattcatggtgctgaacttcttacagcaaatgatggtagttcaggcaatggtcatatgatgcaatggttcaatgaagagtctctctttgattag

SEQ ID NO: 54251 - DNA, 752 bp, Oryza sativa
  Clone ID: PAT_MRT4530_56372C.1
aaattgtttgctgaacgtcaagaaggtgcaaggaaagatgtggagcaggcttttggggtattgcaagcccgtttcaacattgtacgccgtccagcaaagaagtggaagcgaaagagtgttgggaaaatcatgctagcttgtgtgattctccataatatgattgttgaagacgagagagaggatgcaatatgtgacattgacctcaatagaattcctaggacatcaatagttctgcctcctgaagtaacttgtgatgataacccatgtttttctgatgtgctacgtaggagatctgctattcgtgctcgttcagtccatacccagctgaaaaatgatttaattgagcatatttggaatcggtttggaaataggcagtcaacataaacatggaagatgttctcttgtccaattcatggtgctgaacttcttacagcaaatgatggtagttcaggcaatggtcatatgatgcaatggttcaatgaagagtctctctttgattagatgaagaaatcgttatctatctgttagataacatatttatgtattttgcttaatgtcacattgtttgtgacttttggatttgtaaaccattaagtatgttttgttttatcctctattaccttgtcggttatttagacatgcactaccctatccttttgtttagacctgggatgatccattaatctacttgctatggtattttatttaaaaaaaaaaaaaaaaaaaaaaaaaaaaaaaaaaaaaaaaaaaaa

SEQ ID NO: 54252 - DNA, 305 bp, Oryza sativa
  unsure (1)..(305): unsure at all n locations
  Clone ID: PAT_MRT4530_56373C.1
cccacgcgtccgcccacgcgtccggctcgactctgccggtgagagcggtagcgcgtggcggccgtaggcgagcgcagcgtgcggcagcatcgcccttcgcggcgaggcggcgggggcgcaaccggtgaggggacctacgttgctgccgcaatccgccgtttgccttcgccgccgcccgcgctgaatccgagccggagcgcgcgtctgttgccgtcacattgaccccaccggcccggcgcggtgccagcactttgcgtccctccgccgttcgngcgcacaggtgagatgaagcatttatatgagct

SEQ ID NO: 54253 - DNA, 933 bp, Oryza sativa
  Clone ID: PAT_MRT4530_56374C.1
atgccgagttcatctgtatgtcctctccctatggctgccaagaccaacatcgagttgcaacacgattttgaagaatggggagtggaatctcgtcctcctggtgggttcgttaatcttatcaatgccccatcaaaccatatgcatcatgtcgccgaagggagtccatcacagcctatcaatgttgagaatggagatatctctaggactaagaaacgcttattatggacgaacgatgaagacttgagattgatcagcgcctggctgaacaactcaaatgattctatagaatcaaatttcaagaagaatgataaatattggggcgatgttgctgcagcttacaacagcactaccccaaaaagccgggttaggcaagttaagcaagttaaggatcgttttggtaaaattaagaagaagcatgctttctttggtgtcgctggttctaacaacgacatcaacgtgccgaatcagtcccctctattccttgaacaagttagaggggaggctcctcgggttcatttttctgttaacgggaatgagtataacaatgggtattaccttgctgatggtatatacccatattgggctagcttcataaaatctatatcacttccacaaacagagaagcataaattgtttgctaaacgtcaagaaggggcaaggaaagatgtggagcgggcttttggagtgttgcaagcccgtttcaacattgtgcgccgtccagcgaagaagtggaaacggaagagtgttgggaaaatcatgttagcttgtgtgattctccacaatatgattgttgaagatgagagagaggatgcgatatgtgacattgacctcaatagaattcctaggacatcaatagtcctacctcctgaagtaacttctggaacatgctctgctcagtatgtccaaatcatggtgctgcacttctcaaagtag

SEQ ID NO: 54254 - DNA, 418 bp, Oryza sativa
  Clone ID: PAT_MRT4530_56375C.1
cgtcttttttttttttttttttttttctttttttttttttttttaaaccgcgcaattgtctggttatataatttttttaagtcatttttattgaccacttttgattttaaaaaaccatacattctaaaatttgttacatctgcccaacctatattagaactagtatttattacaaatggaactgcgcctttccaatgatcctttagttgaaagccaaaagtttcaaacaaaccgtttactgtctttccgcactatttcaatacaacaacaatcagactaaactttctaactatttctatgaaaccattcttcaagtccttaaccaaaagcaaccggagaaacttcataaggaaaccttaaatggtacttgtatcgtcttgattgctgtcttcccaacctatatagcccttttacctta

SEQ ID NO: 54255 - DNA, 1273 bp, Oryza sativa
  Clone ID: PAT_MRT4530_56376C.1
ctttctttcttcttctcctccgccgacgccgtcgttttctccgcagttcgccgctgcttccactccgcctccacctccgccgccgccgctgctcctcctcctcgcgcttacagtttcctctacttccatggacgtcaagccggctctagccgttctgcgcaagtttttcagtgctgtgaggactgtgaaggtcaccaatgtctccctgagtgcaactgtgcaagacattaaggagttcttttcattttcaggagacattgaacatgtggagatgcaaagtggcgatgagtggtctcaagttgcatatgtgactttcaaagatccccaaggagcagaaactgcacttcttctttcaggcgcaacgatagttgatctttctgtcatcatcgcacctgctccagaatatcaaccaccccctacttcatctgctcctccaatgtatagtgcaaccagtgtccctgtcagtgaagacaacaatgttgtccataaggctgaggatgttgtcagcaccatgcttgctaaggggttcaccctggggaaagatgccgttggcaaggcaaaagcttttgatgagaagcatgggttcacatccactgctggcgccaaggtggcctccattgacaggaagattggtcttagcgagaagttcactattggtacttccatagtgaacgagaaggtcaaggagatggatcagaagttccaggtgtcggacaagaccaagtctgcattcgctgctgctgaacagaaggtgagcactgctggatctgctatcatgaagaataggtatgtcttcaccggggcttcgtgggtcaccaacgcattcaacaaagttgccaaggctgccactgatgttggtacaatgacaaaggagaagatggcagctgaagaccagcataagggctcgggtccttctggagggcactcgtacacacccatccagtgatgactccacgctctctcatgtgccgcattgtgttgtattgatggatgtaaaacatagatatagaacagaaaaagtcccctcctggcataccacatacttctatcagtgaacttttcgcattgcaggaattttgtttccagtagaataggaaatatgatggtgatcacaatgtattccgctggtttataaggcgtatgttcaaactgtttctggttgtagtaacttgcatgaaccttggcaaaagttgtggaaagctcctttaataatgtcatgttgatgttggttcaaaaaaaaaaaaaaaaaaaaaaaaaaaaaaaaaaaaaaaaa

SEQ ID NO: 54256 - DNA, 528 bp, Oryza sativa
  Clone ID: PAT_MRT4530_56377C.1
atggagttggaagcggaggaggaggcgatgatgacggcgagggagaacgagaggctggtggagtcgctgtacgcggcggtggcggcgggggacggggcggcggcgtcggccgtgctggcgggcgacgtggactggtggttccacgggccgaggcggtgcgagcacatgcggcggcgcctgaccggggaggccgaggctgcgtcggcgtcgtccttcgtgttcgtgccgcggcaggtggcggcggtggggcgcggcggcgggtgggtggtggcggaagggtgggaggggccacgcgcgtactgggtccacgcctgggccgtcgagggcggccgcatcacccgcctccgcgagtacttcaacacctccgtcaccgtccgggacgtcggcggcggcggccactgccggccgcagctcgacggaggaggagttcgccggcgcgccgccgtgtgctggcagagccaacgtgggcgcggcggcggcgacgacgacgacgacaggtcgctgcctggcctcgtgctcgccatctga

SEQ ID NO: 54257 - DNA, 1795 bp, Oryza sativa
  Clone ID: PAT_MRT4530_56378C.1
ctatctatttacacttaggcccatttccgggctactcgtcgtcgccgtcgtcgtcgttgtcgtcgacggcgactcttgccgggacagccggttgagcatggcgaacatgccgaccatgggcgccgtgttgtacgtgcacgcctccgtctgcatgtagttctcgcggtcgtcgcggaacctgtcgcggcggtccgggccgccgacgatggcgccgacgacgacgttggggttggcgccccggcggccgaaccagtcgtcgaacccctgcgcgcacccgatgaactccttgctgtccttgtacggcacgatcgacgccgcccggtggtgcaccctcgccgggaacctctcgccgtagccgacgaggtagctcatcccgcgcgggttgctccccagcacgtagtccacctgctccctcgccgccgcgaacacctccccggcgcccgcgcccccgccgcccacgcacgtcgcgacgccgccgccgccgtccccgtctccgtctccggcgccggcgaggtagtccgagtaggcggagaggaggaacgcggcgttggtgacgtactgcatgttgttccactgccgcacgtacagcatcccgccggggctccgctccacgttggcgtccgcgccgccggccgcgttccgccccatgcacgcgcacacgtagtgctccgccttctccctgtacctctccagcgtccccctgtgcctctcctcgtgctcccctctcatcagcagtctggcggcgaggatctggacgccggcgtacttgacgtcccagctgaactcggtgatggcccagccggtgccgccgaactcgtcggcgttgtcgacggcgtagtcgaggtaggcggcgcggccggtggcgcggtgcagccacagcgccgcccacaggagctcgtcgtggtacccgctcaccgacgcgtagtagctcttcacctccgctatgctactgtcatacttccccctgtacgtgtccgcgaactcgaacagctgctgggcgtggtggaggaggaggtgggagtagtgcgggttggattggcggaagacgatggaggcggcggccatggcggcggcggtctcgccggcgacgtcggatcccgggcggcggcggtccaccttgtacgcctgcctcgacgtcgtcatgtcctccggccgctgccagcagtagtggtcggtgtcgccgtctcccacctcggcccagagctcgtggggcttggtatgggctttgatgaagtagtcggtgccccacttgatggcgtcgagggcgtgggcgagctcgccggcggcggcgacgtcggcgccgtactcgaggaggctccaggagagcatggtgacggtgaaggccatggggaggccgaacttgacgtggtcgccggcgtcgtagtagccgcccaccaggtccactccttgctcgaggccgtcggtgaggccggagtggtcgcgccaagccacgcgctggccgtgcgggaggcgccccgaccgctgcgcctcgaagtagagcaggctcttccgcagcgcctccctgtagtctagcggctgctgctcctcctcctcctctcctcccgccgacgccgcatcgcaccgcagtggcagcgctacgacggccaggaggacaaggaccagcacggcggcgagggtggtggttctggtaccaggtggtggtggctgaagccgggcgcggccacggctcatggccggccggccggtggcggcgccgtacgcgtcgcgcttgtcgatcgggcgccggccggcctctctggctgcacacgctcgcgccgccgtcctcagaaacctc

SEQ ID NO: 54258 - DNA, 141 bp, Oryza sativa
  Clone ID: PAT_MRT4530_56379C.1
atgctggtcatgagcgatgagaggtccaaggctaacctcaagtgtgtcaagggcgtgctagttgatttgatcatgcaatcagcaaaaaagaataaaagcagaattagtcgaccgatagccaatcggccgataggccgatag

SEQ ID NO: 54259 - DNA, 2393 bp, Oryza sativa
  unsure (1)..(2393): unsure at all n locations
  Clone ID: PAT_MRT4530_5637C.1
gagcgggtcccccccccgcgcggcggcccttgaggcccgccgctgcctcctccccccctgtgccccctcccctgctccaggtcgttcttctccaactcaccctgtttctctcaccaaatgcccgtagtacgctgctaaccatgtccatgtccatcgcgctccacgccgtcctcccccccgcagccgcaactccccgtcggcggcccacccgcctccgagcgagctcgacggaggcgccagcgagcggggagaaggggcaagaggacacggacaggaagagtggaacggggatgaggaggaggaggaggagagcgaagaaggtgcaggaggtggggctggaggccctctacgacgacggcttcggggaggccaccgtcagggactacttcgacgcgctgagggccacgccgctcgacggcggcggcggcggcggccccccgcggtggttctgccccgtcgagtgcggcccgccggcggtccacgcgccgccgctgctgctcttcttgccaggaatcgacggtgttggaatggaacttatcatgcagcacaaatctttgggcaaggtatttgaggtccgctgcttgcatataccggtcaatgatcgtacaccatatgaagggttgttacaaattatggaggaatctgtcaaatatgagcacaatttgtcaccaaacagaccaatatatatcattggagattcctttggtggatgtttggctctttctttggcatcacgaaatccagaaattgatttggttcttatactagtaaatccaggcagttcatgctcaaacttatttcatactgtaaaacgtccatgtttacagacaactcaaagttgcctttcttctgcattttctacaattatcccgagttgcaaaggtgatcctcttaagatggcaatggttagcattcagaacaatacctctcctcaagatactctggaaagtttttcagacagtctttcttcaatgctacctttactttcagaatttggacatatcgtacgaatggatactcttgtgtggaagctcaagcttcttatgtcaggtgtagactatacaaactctcgtcttaatgcagtacaagcagaaattctgcttcttgccagtggcaatgacaatcttcctccaagtggagaagcagatcgactgtttaaggcactgaaaagttgcaaagttcgatacttcaggacttccagcgatagattactcatggagagcagctttaatctgctaactgtcataaaaggagccagcatgtaccgccagggcaaacaaagggacactatcactgatttcctcccacctacaataagtgaattcaagagaacatttggtgaagatttcaagctgcttcaccatttgctgagcccagtcatgctatctactctgagaaacggcaaaatcgtccgcggcctcgccggtgttcctgacaaaggccccgtcctgttggtgggttaccatcagctgttggcaatggagatcacttcaatggctgaagagttcttgagggagaagaaagcagttctgcgaactttggctcatccagtgttttttgtggggaattatgagattttgcgccaggagctatctttttttgacgtagtcccattgtatgggggagtacaagtcagtccgattaatacatataggttatttgagagagatgaatttgttctcctctatcctggtggtattcgagaagctctacatagaaaggatgaagactaccagttgttttggccagatcaaccagaatttgtaagaatggcagcacagtttggagttactgtcataccattcggttgtgtaggagaagatgacatgttagagatagttctggattacaatgaactaaagaacatcccttatatcagagaaacaatagagtcgttcaaccaagattgtccaggagtaaggagtactgtaaaaggagaggaaggaaatcaggtcttacacttgcctgctgttctacctaaattaccaggtcggctatactatctatttggaaaaccaattgaaatgaaaggaatggacggtgtacagagggatagggagagtgcaaaccaattatatttggacatcaagtcagaggtggagaatataatgtcttatctgaagaggaagagagagcaagatccttaccgaagcatcacagcgcgcacgttttatcaggcaacatggggagttactgctcaaatccctactttcgaaccatgaaaattaggttcaaatgtattttgtgggaatgagattaatttatgaacnttgacagcagaaagggtgggaaagaagataagataaataccccctattgcttgttctattaaaaaaaaaagaacaagaaaaggncaggtctgttttaaaaaaaaaaaaaaaaaaaaaaaaaaa

SEQ ID NO: 54260 - DNA, 1977 bp, Oryza sativa
  Clone ID: PAT_MRT4530_56380C.1
atggcagcctccctgccgcggtgccccctcgtcgccgccgccgccatcgcgttagcctccggggagcggcgcggtgaccgtagcatcgccgccgttataacgccggccatcaacttgcgcgttactccaccgagaccgaggtcgagacgagatataaaccctccccacctagacccccgcaagcctccgactccgagcccctcctcctcctcccaatccctcgatcgccaccacccaccaccattcgcgcgccatggccgaagggggctcgccgccgcgtgctccggcgagcacggaggatggcggcggagctccgacgggaaaggggccgggaggagctgcttcttcaccaccggcaccgcctccgacgaccaagcagggaggcactcctccgccgcgggctccgacgggcaaggggccaggaggagctgcttcttcaccaccggcaccgcctccgacgaccaagcagggaggcactcctccgccgcgggctccgacgggcaggggggagacgcaccacagccgcgggatgccaatcagggaggcaccccgactccgatggtcaaggggggaggcgctgcgtcaccaccaccgccgggagctcatcatctgactaccaaggaggaggaggaggacgcgcagcgggatcgggatcgggctcgggacgaggacgacgaggctcctgcacggcgctgctcgtgggtcatactgcaagccgtaacccgcgtcaaggatctcccacccggagaagatttggcgttcaagtcggagaagccacccggcaccagcgtcctctacgtcgacaaggccatcggcttcttcaacttcgtcgtacctcgcgccaagcccttctccgtgaacctgtcacgcccaagaccaaccactcccctcgtcgtcgccgtacacgggtctggaatggtcgtcgcctccgccttcaacggcgtgcgctacttctgcgacgcgcacacacgagtcgccaccatgattccgccaatcccccccatggagccaagcctcattcccccagtcataagcatcggcgtcgtccaagatccgattcgaccagactacactatggttgcttgcctcgtttgcaccaattcgagcccgcagttcatggagctgcgctgctggacttacacctcaggttcccagtgggttgtcaagccccttaccaactgcttgcaacacccagtttggggcagtcaaggcggtgtgctaagccatatgaacaagatttggttcgtcgacctgcccttgggacttcttttctgcgatccgttcattgagaagcccaagctgacttatgtggctcttccggaaggctgccttatgctggtccccgacatcagatcgcgtcacaatcttgagaagcggcgttgcgtcaagatcagccaagacaagatatgctacgttcagttagatgaaggagaggcttgcttatggagtttactctattctgagagtgagagccccgagtggcagcttgagtacaaggcacctcttgcggacatatggggcgacaagatctacaagacctccgggctgacgccgggcaaagttcctgccattgctatgattgacccgacagactgtgctgtactatactttatagaacaagatgtgctgttctcttttgacatacgttccaagagagttttgatgtccaagagcttggagatgcgcactgacttctgttacccatcacaatttcttcactcctggctcttaccatcaaacatgtttgaggaaaatggtcctgtggaaagtgacaagttgccgagcaatgacttagatgaacagtctgacagtgatgatgatgaagagtccgataatgaagatgatgaggatgaagaacatggtcgtcaaaattcttgggtctgtgctcaagaggtcatcagttctgggcaagctgcctgggaatacttcgagtcgcagcttgaagctgtacaaggtaaccaggatggtgaacaatga

SEQ ID NO: 54261 - DNA, 316 bp, Oryza sativa
  Clone ID: PAT_MRT4530_56381C.1
cgaattgaacattttattactcgagaatacaatcctctcatctgattaatatataaatctattttcattagaaaaatccattcgtctctgtcagataatcaagcattaaagtccattcgagtatagcatgcatcatccctctaaaatatccatataagtcaacgtgacgggcagctgtttagttgtgatgatcctcttctttagactctctgcaccgcctacactagattcatcgaacctggacgcattttgactttacgtacctctctatccttgttccactgctcatcttcttcttcctctatcttttataaat

SEQ ID NO: 54262 - DNA, 243 bp, Oryza sativa
  Clone ID: PAT_MRT4530_56382C.1
tgccttccaggctcccccaaatctgctttgcgtcctctcgattcctcatcgaccatgtcggcctactgcggcaagtgcaaggactagctcatcatgaatgctgcctacattggcactcctggcaaggggatccttgctgcactatgagtccactgtctccattggccaccgctttgtcagcatcagggtcgagaacttggaggataaccgccggtctaccacgcgtagctgctcgctcaccac

SEQ ID NO: 54263 - DNA, 225 bp, Oryza sativa
  Clone ID: PAT_MRT4530_56383C.1
atgaggcgtgacatcggcccttggttgaacatgaaggcgttgagggtgttggaccagaagtacgtggcagaagccatcaaagtttcgtccttagctgaattttccaggatgcaaagaagaaaacaaactgagaggaggaaaaccgatctgctgcacaagaaaagggatttggccggtaagggcttacctctgcgtactcaggcgatggagctgcggatgaactag

SEQ ID NO: 54264 - DNA, 539 bp, Oryza sativa
  Clone ID: PAT_MRT4530_56384C.1
gcacgaggcgtcgctcctcgactcctcctcgctcgctcctcctcctccccgcgtcatggcaggagatcctccccgctcctccgcggccacgccggagccgccgccgccaccgctcctccgcggccactccggagccgccgccgccgggtccttcttcctccccatcgacgcggccggcctcttcgctcgcgcctcctcctccccgctgccgccgctccgccgcatcctcgccggatctctgccggatctctgccggagctccgccttggtccctcatcaagtccctaatccctaatcttcttccttgagcattggcctgtaccatgattttcctttttttgttgaagccaggtcggccaaactgcaagtgacccattgattatgttatttggtactctcagaccacatatatattcttccttccatgttggttcagccattgcttcatgcttgctttactttgagttttgtttgctccgatctaacattcacattgtttttgtgcgttgaggactggggcgggcttctgttttatttag

SEQ ID NO: 54265 - DNA, 1425 bp, Oryza sativa
  Clone ID: PAT_MRT4530_56385C.1
atgcagactcctacaatcctacagctctatcaggctcagagcagctctactataactaattatgcgaaggaagaaatgggaggctttaccggcgtgatcgtcttctccggcgatgtagccccggagcgagatgcctcactggaggaattcttggattcctgctgcgatcaaatcggagcaatgagatgcgcaagaaatggcgacgagcagacagaaatcaagaagaggaaggaggaagcaatggaggaggagtacctgcttggccgccttggccggcgaagcgaagaacgcgcagcacggcgtgcccgccgacccggacaggatggaggagcgggaggcctcgccggcggccgtcttggcggccttccgcggccgcggggtggccggctgctgctcgtcccgcggtcgcggggtaccgcggcgcggggtcgcgacgcggaggtttcgccgcgatcttctgttgctgctgcttcggccgccggacttgtgcgctggccaggccgtgaagacgaacggcggcgagggggaggcgaagggaagaaggagaagccgccgctgccggtggagtccgtgctcgccggcgtcggggaaggcaagggcgcgatggcgctgccgccgtgcaactccttcggcgacaaggaaccgcagcctccgctggcattggagcctgtcggcgtcagcggttgctccggtgcacccaagaacgtgaaaccgccattggccgtggggcctgtggtcgccgccgcttgcttcggcgaggcgaagaacgagaaggccccggggggcgccgtgggctccttcggcgaggccacgaacgcgaacccgccgctcgcggtggagcccgtgggcgtctccggcgcggccggagacaccaagaacgacaaggcgctgctgccgctggaccccgtcggcgtcgtcggcgccctcggcgcgtcctccaagaacgcgaacatgttcccacccccgccgccgccgccgccgccccctgtcccgcccaccgccaacgggaaggagaagtcgctgtcggggcaagaaccccgcgtccccgcgcgcgaggaaagcagaggcggagcggtggccggggagggcgtcggggtcggggagccgaaggggtggagctcgagcagcaccttcttgcgcggggacgagggcgggaggaggcaccgccgcttcttgccggcgtcgcagggcgcggagaaggcgaccgcggagtgcgcgcgctcgatgcggagctcggcgaggtggtggcgcggcgtcgtcggcgtcgtcgccggcgagccgaaggaggggagcaggtgggggagcggcgccgcctccgtcgccatggccgtggcgtggcgcgcgcgtgcagcgcacgagttcttggattcttgggttgagctgggtggtggtggtggtgggtcccagaggcggttggttagttag

SEQ ID NO: 54266 - DNA, 1456 bp, Oryza sativa
  Clone ID: PAT_MRT4530_56386C.1
tcagtgggaatggtcgaagctgaactccttgtgcacaccgcacttgcaggtcacgcgcaccaccagctcgccgccggtgcaggccgccgccgccgccggcgagctcggcctgggtgcctctctctccgcgctcgacacctcaacctctcgctccggcgtgatcgtcttctccggcgatgtagccccggagcgagatgcctcactggaggaattcttggattcctgcttggccgccttggccggcgaagcgaagaacgcgcagcacggcgtgcccgccgacccggacaggatggaggagcgggaggcctcgccggcggccgtcttggcggccttccgcggccgcggggtggccggctgctgctcgtcccgcggtcgcggggtaccgcggcgcggggtcgcgacgcggaggtttcgccgcgatcttctgttgctgctgcttcggccgccggacttgtgcgctggccaggccgtgaagacgaacggcggcgagggggaggtgccgcctgtgggagacgactgattggccgccgcgagccccggagaagccgcggttccgaacgccggcccaggcgaagggaagaaggagaagccgccgctgccggtggagtccgtgctcgccggcgtcggggaaggcaagggcgcgatggcgctgccgccgtgcaactccttcggcgacaaggaaccgcagcctccgctggcattggagcctgtcggcgtcagcggttgctccggtgcacccaagatcgtgaaaccgccattggccgtggggcctgtggtcgccgccgcttgcttcggcgaggcgaagaacgagaaggccccggggggcgccgtgggctccttcggcgaggccacgaacgcgaacccgccgctcgcggtggagcccgtgggcgtctccggcgcggccggagacaccaagaacgacaaggcgctgctgccgctggaccccgtcggcgtcgtcggcgccctcggcgcgtcctccaagaacgcgaacatgttcccacccccgccgccgccgccgccgccccctgtcccgcccaccgccaacgggaaggagaagtcgctgtcggggcaagaaccccgcgtccccgcgcgcgaggaaagcagaggcggagcggtggccggggagggcgtcggggtcggggagccgaaggggtggagctcgagcagcaccttcttgcgcggggacgagggcgggaggaggcaccgccgcttcttgccggcgtcgcagggcgcggagaaggcgaccgcggagtgcgcgcgctcgatgcggagctcggcgaggtggtggcgcggcgtcgtcggcgtcgtcgccggcgagccgaaggaggggagcaggtgggggagcggcgccgcctccgtcgccatggccgtggcgtggcgcgcgcgtgcagcgcacgagttcttggattcttgggttgagctgggtggtggtggtggtgggtcccagaggcggttg

SEQ ID NO: 54267 - DNA, 134 bp, Oryza sativa
  Clone ID: PAT_MRT4530_56387C.1
atggcgctgcagctcaccgggcaccgcagagcagtctactccatcccgctcatcggcatgcactggcgatcgggagagcaggtctctggaacattcgtcttcgatgtcctgcaccgggagaaggtgacaataag

SEQ ID NO: 54268 - DNA, 749 bp, Oryza sativa
  Clone ID: PAT_MRT4530_56388C.1
ctgctcccctccttcggctcgccggcgacgacgcctacgacgccgcgccaccacctcgccgagctccgcatcgagcgcgcgcactccgcggtcgccttctccgcgccctgcgacgccggcaagaagcggcggtgcctcctcccgccctcgtccccgcgcaagaaggtgctgctcgagctccaccccttcggctccccgaccccgacgccctccccggccaccgctccgcctctgctttcctcgcgcgcggggacgcgggcgttggcggtgggcgggacagggggcggcggcggcggcggcgggggtgggaacatgttcgcgttcttggaggacgcgccgagggcgccgacgacgccgacggggtccagcggcagcagcgccttgtcgttcttggtgtctccggccgcgccggagacgcccacgggctccaccgcgagcggcggcggagcaaccgctgacgccgacaggctccaatgccagcggaggctgcggttccttgtcgccgaaggagttgcacggcggcagcgccatcgcgcccttgccttccccgacgccggcgagcacggactccaccggcagcggcggcttctccttcttcccttcgcctgggccggcgttcggaaccgcggcttctccggggctcgcggcggccaatcagtcgtctcccacaggcggcacctccccctcgccgccgttcgtcttcacggcctggccagcgcacaagtccggcggccgaagcagcagcaaca

SEQ ID NO: 54269 - DNA, 279 bp, Oryza sativa
  unsure (1)..(279): unsure at all n locations
  Clone ID: PAT_MRT4530_56389C.1
gctgtgctcccctgctgtgtgcagtggcccaaagctaacccatgctggagagcccnacgtggagagctggaagcctgggtgcatgatgcctggggtgatgcccgtgatgctgctgctggtgtgttggagtggtgctgccgtgtgtgttgggaccctggtggaatgttgggagtgtgatagagatgtgttgaggatgagttctggaacagcaataattgctcaaacaggtcactgcattgcgagtggtttgtgttcgattatattaaaaaaaaaaaaaaa

SEQ ID NO: 54270 - DNA, 416 bp, Oryza sativa
  Clone ID: PAT_MRT4530_5638C.1
aaaacccacgggaaaatgttttttatttaaaaaatttctttaaaaaacaaaacaccaaaacccaaaaaaaccccggcccctcccggggggttaaccgaaggcccccggggggggggggcacccccgggtgaggcccggcttgaacccccccttccaaaaaaaggcaaccccggggacgtcaaaggcccccaccttggggggcccccccccttccaggaaaggcaccacccccccgggggggaacgcgtgcccccccccccgttccattggaaacccccaaaaccccaggccctggacatccctggggaaccttaagggggcaaacttgccaaaagggcaacccccccggaacccgaagaacgggggcccccccaaccgggggaaggggggccccggcggcccccacctttggtccc

SEQ ID NO: 54271 - DNA, 602 bp, Oryza sativa
  unsure (1)..(602): unsure at all n locations
  Clone ID: PAT_MRT4530_56390C.1
agagtctgttgaagtggctgtcaaagcctggggagaaaaatcattgaccgagctagaagctgaagagcggctctcctactcatgtgagaagggaccaactcgtgatgaagtaattgcaaatctgagaagtgcattcatgaagataatggatgaatataaggtttacacagaggaggaaaagaagcaggtcatttcagcaggtggacttcatgtagtaggaacagaacgtcatgaatctcgcagaattgataatcagctccgtggtcgaagtggcaggcaaggggatcctgggagctctcggttctttcttagtcttgaggataatatattccgaatttttggaggtgacaggatacagggtttgatgcaagccttcagagtcgaagatcttcctattgagtcgaagatgctgacaagggctctagatgaagctcaacggaaagttgagaactatttcttcgatatcaggaagcaattatttgagtatgatgaggtattgaatagccaaagagatcgagtatatgcagaaagaagacgcgctcttgcgtctgatagtcttgaatcacttattgtggaatatgctgaattaacaatngatgaca

SEQ ID NO: 54272 - DNA, 3546 bp, Oryza sativa
  Clone ID: PAT_MRT4530_56391C.1
atggccatggcgcctcccgccgccgcgacctgcgccaccgccctgcgcttcgcccacccatcttcttcctcttcctcctcctcttcttcttcttcgtcttctctcccttccccgcgtcctctcggtggcgcctgcggcggccgcccccagcacgggcgacggagcctccgggccccgcggcggcggggtggtggggaccgcgtcgccgcgcgcgccgggctggggggcctgctgggcggcatgttcggcggggccggcggcgacgacggggacgccgcgaggaagaggtacgccgacaccgtggcgcgtgtcaactccatggagcccgaggtctccgcgctctccgacgccgacctccgcgcccgcaccgccaagctgcaggagcgcgcgcgcgccggggagtccctcgattccctcctgcccgaagcatttgcagttgtgagggaagcttccaagagagttttgggccttcgtccctttgatgtacagttgattggtggaatggttctgcacaagggggagattgcagaaatgaaaacaggagaagggaagacccttgtggccattttaccagcttacttaaatgctttgagtggaaaaggggtgcatgttgtaactgtaaatgattatcttgcaagacgtgattgcgaatgggttggtcaggttccccgatttctaggactgcaggttggcctaattcaacaaaacatgacacctgagcaaaggagggagaattacttgtgtgatattacttatgttacaaacagtgagcttggtttcgattatctaagagataaccttgcaatgactgttgatgagcttgtcctgaggaactttaactattgtgtgatagatgaagttgattccattctcattgatgaagcaagaacacctcttataatatcaggccttgctgaaaagccaagtgatcggtattacaaagcagcaaaaatagctgaagtttttgaaagagatattcattacactgttgatgaaaagcagagaaatgttttacttacagaagaaggctatgcggacgctgaagaaatactggacataaatgatctatacgatcctcgtgaacaatgggcttcatatgatgtgagtgcaacaagctgttggtttgaggggttacgcccaacgagatcctcttattgaatataaactggagggatataatcttttcttggatatgatggctcaaattcgacggaatgtaatttactctgtttatcagttcaagccagtgatgaagaaccgagaataggagaaatctgaaaagaaggggacatgactggaactgctgctacggaaagccaagagttcgaaagcatatacaaactaaaagttaccgttgttccaacaaacaagccaatgatacgaaaggatgaatcggatgttgtttttagagcaacaaatggaaaatggcgtgctgctgtcgtggagatatcaagaatgaacaaagttggtcgccctgtgcttgttggtacaactagtgttgaacaaagtgaaaccttatcagaacaattgcatgaagcagggattcctcatgaggtcctcaatgctaaaccagagaatgtagagagggaggcagaaattgtagctcagagtggacgccttggtgcagtgacaattgccaccaatatggcgggacgtggtactgatattattcttggaggaaatgcagaattcatggcaaggttgaagctgcgtgagatgcttatgccaagagttgttgatccattggatggtgtcattatatctaaaaagcaggcctcacctaagaagacatggaagacaaatgaaagtttgttcccatgtgaactttcaaaagacgcactatcatatgttaaagagtctgttgaagtggctgtcaaagcctggggagaaaaatcattgaccgagctagaagctgaagagcggctctcctactcatgtgagaagggaagatctatactaatagtggaatttggagatatacttccaaaggttgctgtaattgcgaacaagggattgactaactgtataataggttgcctatccacccaagaacagtggctcgacgcatgcattattgttggtcagggccctgttggtagtaagcagcctgctctcctccagactccagtggcattacgcttcttgaggacggcattgggctaccagtgcactgcaccttgtgggattgagtttggtggaggaccaactcgtgatgaagtaattgcaaatctgagaagtgcattcatgaagataatggatgaatataaggtttacacagaggaggaaaagaagcaggtcatttcagcaggtggacttcatgtagtaggaacagaacgtcatgaatctcgcagaattgataatcagctccgtggtcgaagtggcaggcaaggggatcctgggagctctcggttctttcttagtcttgaggataatatattccgaatttttggaggtgacaggatacagggtttgatgcaagccttcagagtcgaagatcttcctattgagtcgaagatgctgacaagggctctagatgaagctcaacggaaagttgagaactatttcttcgatatcaggaagcaattatttgagtatgatgaggtattgaatagccaaagagatcgagtatatgcagaaagaagacgcgctcttgcgtctgatagtcttgaatcacttattgtggaatatgctgaattaacaattgatgacattttagaggcaaacattggccctgataccccgagagaagattgggatcttagcaaactgatagctaaacttcaacagtattgctatctattagatgatttgacaccagaattgttggagggcaaatcgtcaagctatgaggatttgcaagagtaccttcgtacccgaggacgtgaagcatactaccaaaaagctgagattgtggagaaacaagctccaggcttgatgaaagaagctgagaggttccttattctaagcaacattgataggctctggaaggaacacttgcaggcgtagaacggtagaagtttgtgcaacaggctgttggtttgaggggttacgcccaacgagatcctcttattgaatataaactggagggatataatcttttcttggatatgatggctcaaattcgacggaatgtaatttactctgtttatcagttcaagccagtgatgaagaaccaagaagaggagaaatctgaaaagaaggggacaaagaagaaagtcgacaagggtgctaacaaacttggtgctgcccaagctgcatcttgagtgtggtcactaaaattttgtcgttatatatctccatgttggtggtcgtcgtccccagccctataattaagcctatagggatgtttgtcagagtagagagcagtacaagtaatgagataattcagtgccttgatgctggaatacagtttcttaatgtaaatgtttctttgacatgtcgaccaatcagctacgcccatgccctggcatattgttcatagtaggcgacaccagtcttacaattgtaaaaagataactttgccaactaaatatttcttttacctcc

SEQ ID NO: 54273 - DNA, 536 bp, Oryza sativa
  Clone ID: PAT_MRT4530_56392C.1
gggctgcaggaattcggcacgagggaacttaagaaaataccagaggtaaaagtctctatgtgggaaacatgaattatcaccacgaggcattgcgcactgggaagtgggctgtcacttatgaggagtggccagaagaggattacccaacatatgcaaatggtcctggctacgttatatcttctgatattgctgcttccattgtgtcagaatttacagctcataaattaaggctctgggagatggaagatgtgagcatgggcatgtgggttgagcggttcaataacaccagacatgttcaatatgttcacagtatcaagttctgccaatttggatgcatagatgattactacactgcacattaccagtcaccgaggcaaatgctatgtatgtgggataagctgcagtctgggaaagcacaatgttgcaatatgagatagcgacaatgaaactggcagcatcgatcccccttcgattgtgttagtggtcattcttctttgctacatgatgatcctgagccccaagatcgaaggactgtt

SEQ ID NO: 54274 - DNA, 419 bp, Oryza sativa
  Clone ID: PAT_MRT4530_56393C.1
tgttatttggggtggttgataagctcaccaggtaaaaaggtagaaaccatgtaaagaaaacttccttcaatttagtttgtatgggcattaataagttacctaaaacaaatactaagaattttgggtcaaaaggtatgctttctccacataattttgatgtaagagtgatatggttcaacccataactctttttgatatgggtgttcagttgctacttttcttcttttttgcagaaaattaatttggcaagcacttcattttactgctctgcaattgcttcacaggtaacattcatgctttcaagtatgtactgttcattcatctatgcacatataaatgtgaattttatactgcagaaatagctcaccattcagtttcaatagtttatgttaatgtttcccgataacattggaaccatg

SEQ ID NO: 54275 - DNA, 312 bp, Oryza sativa
  unsure (1)..(312): unsure at all n locations
  Clone ID: PAT_MRT4530_56394C.1
tcaaacagatgtcttagagtcacatatcggtgtaaatccccaatgcgtaggagaaaatcgcatcagcgccatcgccatcaggtgcgcactggtggaaaggcgatcgtgcgggctcttcgctataccgcagctgcgaaaggggatgtgctcaaagcgattaagtgggttaccgcaggttttcccagtcacgacgttgtaaaacgacgcccagtnnnnnnnnnnnnnnnnnnnnnnnnnnnnnnnnnccagaaacttttttgcaacgaccgtgtgtncgctttnccagtcggaaacctgtcgtgccagctgcat

SEQ ID NO: 54276 - DNA, 369 bp, Oryza sativa
  Clone ID: PAT_MRT4530_56395C.1
atgaaggcaaagatacgagtcggtggcaatgaaagcaagccaatgatgaagcccctcgcatgctcgccggcgaacgacggcgcggcggcgcaaacggagggcatctacgtgttgcgggcgacgcgacgaaacttactgaggcacgaacggcggtggacggtgaccggacgacgacggcgacgaggaagaagcggcggcgaccttcggcttgatgacgacggcggtgctccggtgatctacggcgacgacagagggacagacgaggtcggcggcaactcggcgaacacggcggtggccttcccacgcgacgacgacgaccggagcgacggcggcgcacgactggacgaactgcggcgacggcggcgctag

SEQ ID NO: 54277 - DNA, 1624 bp, Oryza sativa
  Clone ID: PAT_MRT4530_56396C.1
ttgatttcacctttttttatggtttaatactttaatcttgtatttatttcagttctaccttatgatagctgtgctgctatttggtggaccaccgatgatgtatttttggaagtaactttcagtttactgaaagtaacaatttctagcaaacaatttattctgcaagtctaaatcctgccaaatggatgtctgattcatgtctattctacttatttgcttaccccctttattacatggatatcatgtgtaatctcattgcgggtaacttaaattcctattcatgttctgccatcgctgtcttattctttctgaataatgctgagaaacattgcactgctcactattaagcatgtgcttacagtcaacttggatcccccgggctgcaggtgaacagcatctggggatttgctggacaaagcagtgtcctgtgcaagtgtgatggtcctggttcacaatatgttaaaactcgattatacgatgcaggttagcaaagcaagcatctatatataactgctttcattcgattgcttacatttttggcctacactgcaggagaagattgttaaggcattatgcatgagggcatcctcgtcggtccgccccggccacggccaacggtggggcttccgcccctcccccggcgtctgtggcggacaacgcgcgtcgcggcttcttgctttgcgggtccaaggccgctcggggggactggttcacgcaggcacacgggctctcaggatgcactcacctatgtctgaacattttcgaagactaaaactcctcacagagtcaggtgcaattagtgagatagtcaagtctaacctcagtgaccgaatgaggtcttatcttgaagctggttgcacccatcacaactgaaaccatccagaacatgaacaagttacattcttgtcaagagaaactcaatgaccatataagcaaagccaaattattgcttgaagaactccatattctggaggaagatgtttatagtaccacactaaaagcctgtctgagttccttaagacatatggatgattgccctgatgataatagtcttacaaatattttttctgaggatgaacagcaatctggggatttgctggacaaagcagtgtcctgtgcaagtgtgatggtcctggttcacaatatgttaaaactcgattatccgatgcaggagaagattgttaaggcattatgcattaaaacagcatcgtcagagctagagggctactgtcaaatgtgggatttgcgaccatacatcgatgacaatgtcatacaacttgcgtggcagtttgtttcttagagggtccaaagccactggagaagatgaagagaatcacacattcacagtttcacacagtgttgacaggcaggtgactttccaatgagcagcagtggtcatgataagcagcagcattagtcagtattgagtagtggatcaattgatgatgatccaacaatgaactacattcaaatggaactgtcaactgtacatatgtttattaggacactaccaattaattttttgggtatgaagaggaattttatgaggccaagctgtaatgagtcatgaatctgccagctaattccggttccttttgttcatgcgcttaaaaaaaaaaaaaga

SEQ ID NO: 54278 - DNA, 307 bp, Oryza sativa
  unsure (1)..(307): unsure at all n locations
  Clone ID: PAT_MRT4530_56397C.1
acccaccatgggaatgctttgggctaccttcaaagcccccagggtgaagtttgattttggccagttggaagnaaaaagggggcttcggtgccaatggntgaattttgtggtgggttttggggtgttagaaaggcttgantaagggattcaatggaagggaaatggaaaggattcttgtttgttactttaaagaaaaaaacttaaagtcctttgtaatacccgganccctcttcntcttngtggtggtattttgcccatctttaagantntttgagaaccccaataanaaaaaaaaaaaaaaaaaaaa

SEQ ID NO: 54279 - DNA, 1813 bp, Oryza sativa
  Clone ID: PAT_MRT4530_56398C.1
atggaggcggtggtcgtcgacgcggggtcgaagctgctcaaggccggcatcgccttgcccgaccagtccccatcgctggtgatgccgtcgaagatgaagttggaggtagaggacggtcagatgggcgacggcgcggtggtggaggaggtggtgcagccggtggtgcgtggcttcgtcaaggactgggacgccatggaggacctgctcaactacgtcctgtacagcaacattgggtgggagattggggatgagggccagatcctcttcacagagccgctcttcacacccaaggtgataggcttcgtggttcatttgaacgtgttcattgttctacgctgtaaacctgttgatttggctgataactggtccaaattgatactcactcattactttacatgccgaaatgttaagctccgaatttttagggtcatttgcatgtttcctcatcttttgttatgctctctccaggcacttcgggagcaactggcgcaacttatgttcgaaaaattcaatgtttcaggcttttatgactctgagcaggctgtattgtcactttatgcagttggacgcatttcgggctgtacagtggacattgggcatgggaaaatcgatattgctccagtttgtgaaggtgctgttcagcacatagcatcaaagagatttgatattggaggaactgacttgacaaacctatttgcggaagaactcaaaaaatctaactcatcggtaaacattgatatttctgatgttgagcggctgaaagagcagtatgcatgctgtgcagaagatcaaatggcctttgaagctataggaagctcatgccgaccagaaaggcacacacttccagatgggcaggttataacaattgaaaaagaacggtacattgttggtgaagctttatttcaaccccacattttgggcttagaagattatggaattgttcatcagctggttacaagcgtctcgaatgtcacaccagagtaccgcgttttcccgcgggaaacgcttccggggagaggagattttcaaaaataaattcctcatccacatcctcctcttcccctagctcctaggcagggtctcgtctcgactccgaatcttagggtttctcctccccgctccccgccgcgggcgccatggaggcggtggtcgtcgacgcggggtcgaagctgctcaaggccggcatcgccttgcccgaccagtccccatcgctggtgatgccgtcgaagatgaagttggaggtagaggacggtcagatgggcgacggcgcggtggtggaggaggtggtgcagccggtggtgcgtggcttcgtcaaggactgggacgccatggaggacctgctcaactacgtcctgtacagcaacattgggtgggagattggggatgagggccagatacttcacacagtgcggttgtgcccaccccaggcacgtcgagtttaaatggcgtttcttatgttcgtaaaatgccattcaggatgcagtagaatctaacattggcatctatttattacaagttgtagaggattgtacctggcaacgctcgtaggctgcattcgtttgattgtccgttcaccgagcgtacggaaatcagttcattctgtgattctcccttccaattgctctctgaattctgtgtagctgtagtgctgtgtagcaaactacaagaaaacaaagcttagctagaagcggtattgttcttccaagttgattggcaatttgagctgttctatgagtaattcgtagatcaaatggcctttgaagcttttggttaaaacttttgacaaggagaacatgcagcttaaagttgggct

SEQ ID NO: 54280 - DNA, 1532 bp, Oryza sativa
  Clone ID: PAT_MRT4530_563C.1
aaagcgaacgaatttaaaaaccgcttcatacacagtttttttaccaaagtaccagcaaaaacatcttcaatttttataagagtagagagaagagaagagatagagataggataccagcaaagttacttgggtttactttttagttcacgggtttactagatcacgaaccaaattttaacgggcctaattgggcattagtgtccatatgaaaagcgggctcagttgggccaacaactatatttgctgtttaatttccaagggtccgaaacgaataatgtgaccgcggatcaaacagctgggacctccttccaaagcagggagcgaaatccgctcttgattcgtctgataaattacagcggcaacggcaatgcagcacaatggtagacaatggacacatatatactcatacacagtgaagcactccatgtagaatacaatagcgaagactttcaatgatcaggttggccattaggagaagatgtagaccacgtcgaacgatttcgattttttcccaataaacgtagggctgtagttgtaaatcaggttgtccaacaccttgtctgcgggaggtctgttctgggacttgcgggcttggctgataaaatagttggcaaaattttgtgtcacttgtactgcctcctcgctgtgtggaatcatttgtttaccaaactcaaaaatagctttctcaggatgccactgagtgcatgtgataggatatttgtttgcttgcacggttgagacatagacctcgccattttcatcaggtgaggttgtcagaatcttgaagaaacttgataaggcaacattctctcgcaatgtcttgggtgatataccatatttgtggttttgcatcacaagacaactggtgcttagtttcttgatgagatcaggatcaaatctttcaaatactgatccctcaagtgaagagtaattgggaaattgaagagtagatgcttgatttgtggcactgaatgactccaagatattattgtccttgctgacaatcatgcttacaagctcaaaaccaagacactgtgcaaaaagtggaaatggaatccctgcatcattcttgtccaagacatactgaaacactttctttatggtctcaaaatatgggccactcttcaccgaaccaccagtaaacagaacaccgttaaccaaactcagtttctcgaggaggcgctcctcgggctcgttgtagatgagcgggacgacgcgcgccccggcggactcgacgaacttgacgtaggaggcggcgatgtaggaggcggccgtgccgttgctgaccctcccgcccgcgccgtcccccgggtgcgacacgatgccgatcaccggccggtcgtacgccgcggggtccgtcggcgccgcacacgccctccccctcggcagccggatgaccccctccgccgccgccgccgagcggtggagcacggcggcgaccgcgaggaggaggagcaggcgatggggaggaggagaacccatcgctgctgctcccgtgcgtgaggagtgcgtctcacgcgacgcgagatgtg

SEQ ID NO: 54281 - DNA, 495 bp, Oryza sativa
  Clone ID: PAT_MRT4530_56400C.1
atgggcgtcgtcttggcacgggagattccttcctcgcaggaccaggcggaggcggtcttgtgggagatgtcggtcgtgagcgatgtggcggcgcagatcggcaacctaggggcggggaggggccggggagcagtgaaacatccgtggggtgagtatggtgttgcatgtgtggtgatcaatggagggggaggagacggtagcctgaagcgcggtttccccaatcaccctctcctcacctcctccggttcccccttggctagcgccacctccaccgccgccccagccttgcttgtcgtggggacctactttgtacccttcctcctccccatccttccaaggagttcatcctccgacgaccatctcgtcatcggcgagctctgcgtagtgtcaccctgcgtccaggtcgacctcgatgccctcaagggcactcaccttggcatgtatgagcagcgcaacgtgacggtgttagttgaggcaggagaatcagcatcagag

SEQ ID NO: 54282 - DNA, 947 bp, Oryza sativa
  Clone ID: PAT_MRT4530_56401C.1
attcggcacgagggcttcacctttcctccacttactactctttgtgagagtgagcctctcgccattgttgcctcgataagaagcttaattagctcggaagccttttcacttttcagccatgaggctgtcgtccctgctgttcttggtgtgcttcttcactgtcgccatgtcgcaatgcgcggcggcggcgaaggcgaggcacttcaggtgggaggtgagcaacatgttctggtcgccggactgcgaggagaaggtggtgatcggcatcaatggccagttccccgggccgaccatccgcgccaaggccggcgacaccatcgtcgtccacctcaagaacggcctgcacaccgagggcgtcgtcatccactggcacggcatcagacagatcgggacaccatgggcggatggcacggcatcgatctcccagtgcgccatcaaccctgaagaaaccttcacctatcgcttcgttgtcgacaagccggggacgtacttctaccacggccactacgggatgcagagggcggcggggctgtacgggtcgctgatcgtggacgtcgccgacggcgacgaggagccgttcaagtacgacggcgagatcaacctgctgctcagcgactggtaccacgagagcatctacacccagatggtcggcctctcctccaaccccttccgatggatcggcgagccgcagtcattgctgatcaatgggaggggccagttcaactgctcgctggcggcggcgcacacgccgggcgccaagcagtgcgccgccgccggcaaccggcactgcgctccggtgatcctccccgtccttcccaacaaaacgtacaggctcagggtcgcgagcaccacctcgctcgcttccctcaacctcgccgtcgggaatcacaagctgacggtggtggaggccgacgggaactacgtggagccgttcgccgtcgacgaca

SEQ ID NO: 54283 - DNA, 354 bp, Oryza sativa
  Clone ID: PAT_MRT4530_56402C.1
atggacgcgacaccgcggggatgtggaccgtcggatcgggggatccgacggcccaggggtgtggacggggttgcccggacggcagtgcagtgggagacatcttcaacaagtggaggcaacaaagcagttgaggaagaactcaccaatgacaacatcttctcctatgaggttggtgtggagagggcgcctttagagggaagctctaggaggcagaagcccgatgatgatgccaccttggccatacgggagaaggaagagacgatggcgatggtgatgaggaatgaggagggaggcggtggctggctggcctcgccggatctgagagcgatggcatgtgagggtggcggcgcgtga

SEQ ID NO: 54284 - DNA, 304 bp, Oryza sativa
  Clone ID: PAT_MRT4530_56403C.1
cacaaaggaggcaattcttatggggccattcattcattcacatcagtagttcattacatgacaggttcattcatcacacaaatcaccaattccacctgaccccatttttcaccatcttcctccctctcttaatttttgcaataagctaatgtcattaaggaaaaaaaaatcatccactaattaattaatcccatggaaaagggaccatgcacggcaacatggaggacggcttctaaccaacgtcaacaaacacggtgttctcaacggcggcggagcggaggtcgacagcgacctggaccaactg

SEQ ID NO: 54285 - DNA, 1214 bp, Oryza sativa
  Clone ID: PAT_MRT4530_56404C.1
atggacgcgctcaggaagccgacgtacgagaaggatgagaccggtttggctccaaccgaccccgccccggcgttcccaactattggcatgcgaggtttccctgaaccgactagctacttatccagggccgaggaggagggtggctactgggccaagcccaagagcaagagagagggggcggctgctgactgggcgtcggctgacttggtcaagtggggccgacggctgaggtggcgccaacgtggacgtcacggggagctcaaggggatctccgggagcgtggcggcgagaggaatcggctcgagaggtgccgacggcggtcgattgcggcggcggcaatcaccggcgagcaaaaggggaaaacacaacgagacgacgaggattcgattcaaaggggtgggagcatctccggggttcaaggaatccgtttccggtgtcggatggggcggagaagcactgaggagggccggcgacgagcagcggcctccgggagcggacggtaatggcggtgaggccatgccgggcgacggcggtgctagggaatggtttggggaggtcctagggagctcaaggacggtgttggcgagggtggtcgacgagctggggcccgacgacggcgcgcgactgcgcgcggcggcggaaacagagcaacggcgaggcgcgcggcgcatcgtccggcaggctatggcgtgcggcggcgggcacggcatagcgaacggtaggaggaaagggttcggcggggagctcaccgacaagaggaagcggcgtcggcggatcgaagggagtcgtggcgcgggatgtggagcttcgaggggaaggaaccgagcacgggcgatcaaggagaggcggtggcggactcgcggtcaagttgtgacagaggcggtcacgggtggcaaaggaggtgacggtgtggatgcgttgggcggcgaaggcggtggatcgagcggcggaaaatcgaaccgcgggagcgggaggattagcgcgggctggcgcggtcaaggtgggggtggcgagctggcgctggcgtctgcgtctctgcctccgagcgctagcggccaaggagtggaggcatggcgtcgttgcttgggagggaaaaagagagggaggacggtggaaagggggggctttaccatgccgggtgggggcgagcggcagggcggcatgggcggccgtgcggcgcaggcggccagggctgatgcggcggcgaccgggcg

SEQ ID NO: 54286 - DNA, 288 bp, Oryza sativa
  Clone ID: PAT_MRT4530_56405C.1
ttttttttttttttatttttttttttttttttttttttttttttttttttttttttttttttgggggttttttttttttttttttttaaaacaaaaaaacattggagttcattatttatttcccctatgtttatatgctttcttgcaaaaaaaagccctttttttttttgaacccccccgagggtttcccacagcttgtttttatagccttatgaccagcttttgggggccttggaaaaactaccccggaggaaaaaccacctgttccattggggagggtcacctttc

SEQ ID NO: 54287 - DNA, 669 bp, Oryza sativa
  Clone ID: PAT_MRT4530_56406C.1
atggccgaggaggagggtggctactgggccaagcccaagagcaagagagaggaggcggctgctgactgggcgtcggctgacttggtcaagcggggccgacggctgaggtggcgccaacgtggacgtcacgtcggatggggaagggagaggaggtcgggcggctcatggcgcgcggcgggatccggcgaacagcggcaagccggaggggcggctagcactggcggcaggaggaggagaaggggaactcattccatcgctcggatcgggaagacgacgcgcgacgacggctggcggcggcggccaatctcgctggcgcgccgacgtggccgcgcgcgagaagagcgaagggtgcgcgggctcggacttagccgaaccgggttcaaggaatccgtttccggtgtcggatggggcggagaagcactgaggagggccggcgacgagcagcggcctccgggagcggacggtaatggcggtgaggccatgccaggcgacggcggtgctagggaatggtttgaggaggtcctagggagctcaaggacagtgttggcgagggtggtcgacgagctggggcccgacgacggcgcgcgactgcgcgcggcagcggaaacagagcaacggcgaggcgcgcggcgcatcgtgcggcggcgggcgcggcatagcaagcggtag

SEQ ID NO: 54288 - DNA, 2733 bp, Oryza sativa
  Clone ID: PAT_MRT4530_56407C.1
atggcagttaaggaccggttcacgagaaaccctgggagacttaccgtgcttaccacaagcgggagtggctgccggattcaccgcggcgcaagaggggactgcccactgccttttgaggggtggggtcttgctctcttttcccccacaccagagttgaagttcttctcagttggagccgtctcagagaggttggtttcgttgctgccgtcaaggtttgcctgtggagtggagtcgcccgctgctgaagtcaagcttcccgaaaagagaaatatgtgtggagtattggaaaaagatattcccaagaatatctttgactcattgacacgtggggccaacaagaaggctgaggaggagggtggctactgggccaagcccaagagcaagagagagggggcggctgctgactgggcgtcggctgacttggtcaagtggggccgacggctgaggtggcgccaacgtggacgtcacgtcggatggggaagggagaggaggccgggcggctcatcggacggctcacggcgtgcggcgggatccggcgaacggcggcaagccggaggggcggctagcactggcggcaggaggaggagaaggggaactcattccacggctcggatcaggaagacgacgcgcgacgacggccggcggcggcggccaatctcgccgacacgccaacgtggccgcacgcgagaagagcgaagggcacgcgggctcgggcttcaccgaaccggggcgacacggcgcggaggcaaaggagaaggccggtggcctagggacagtcagggggagctcaaggggatctccgggagcgtggcggcgagaggaatcggctcgagaggtgccgacggcggtcgattgcggcggcggcaatcaccggcgagcaaaaggggaaaacacaacgagacgacgaggattcgattcaaaggggtgggagcatctccggggttcaaggaatccgtttctggtgtcggatggggcggagaagcactgaggagggccggcgacgagcagcggcctccgggagcggacggtaatggcggtgaggccatgccgggcgacggcggtgctagggaatggtttggggaggtcctagggagctcaaggacggtgttggcgagggtggtcgacgagctggggcccgacgacggcgcgcgactgcgcgcggcggcggaaacagagcaacggcgaggcgcgcggcgcatcgtgcggcaggctatggcgtgcggcggcgggcgcggcatagcgagcggtaggaggaaagggttcggcggggagctcaccgacaagaggaagcggcgtcggcggatcggagggagtcgtggtgaggtggtcgcgatggtgggacggaacggcaccgggtgggcgcggccggggaggaagagaggagaggtggcgcccggagctcctcgtcacgcgcccacgcacgcaccggttcctccggtgctcggcggcggacggcgacgacgagatcgagtcgagcggcaacagggcggcgacggcgcgggatgtggagcttcgaggggaaggaaccgagcacgggcgatcaaggagaggcggtggcggactcgcggtcaagttgtgacagaggcggtcacgggtggcaaaggaggtgacggtgtggatgcgttgggcggcgaaggcggtggatcgagcggcggaaaatcgaaccgcgggagcgggaggattagcacgggctggcgcggtcaagttgggggtggcgagctggcgctggcgtctgcgtctctgcctccgagcgcttgcggccaaggagtggaggcatggcgtcgttgcttgggagggaaaaagagagggaggacggtggaaagggggggctttaccatgccgggtgggggcgagcggcagggcggcatgggcggccgtgcggcgcaggcggccagggctgatgcggcggcgaccgggcgggtggcggcgtcgggggcggcgttctcgtcgtcgacggagacagggatggagcccgtcgtgtcttcggcagtggccgcggcgagctgggtcctgcgccttgctggaggtgaaggcatcgaagtcctcatgccgcctcttcttcgcctccttgggctcgttgcgcgcgtcgcgacggcgttggcgttctgggaggcgtcctcgtcgtcgatagagactggccgtgcgtcttcggtggtggccgcggcgagggagtcgtcgtcgccggcgagagctcgtgcctggtcaatcctccgcgcatgcctccacgtcctccggtgggaggggccaccaacgtcgaagagaggaggaggcacacctgaccggatcaccggagtagcttcagctcggcggcgttgcgggccgagtggatccaccaactccgccatcgacactcccagtcccagtcccagtagcgccaccaacgatgtcgtcgcccactccgccgccggcgtagtgccaccaacgacgtcgtcgtccactccgtcactgccggcgactgccccgccatcgccagagaaggtgagcaacgacgaggacgtaggtggaggaacgacgtgcgacctgtacgacggggagtgggtgcgcgacggcgacgaggaggcgcggccgctgcacgcgccgggtcgtgcccctaggccgacgacgaggcgaacgcctgcgcgtcgaacggccggccggacgcgccgcctacacacggtggcgttgggcgccgcgccggtttgtatgttcaacgtgacggatttcctggcgaggctgtgcgcggccatcggctga

SEQ ID NO: 54289 - DNA, 2509 bp, Oryza sativa
  Clone ID: PAT_MRT4530_56408C.1
atggcggcgtcgatgggagtggaggtagtgacggcgatggacgcgccgcatcccgtcgtcaaggtcctcatgccaccggcgaagcccacctccacgtgttgctcgcgccccttcaactcctcttcggctgaggaggagggtggctactgggccaagcccaagagcaagagagagggggcggctgctgactgggcgtcggctgacttggtcaagtggggccgacggctgaggtggcgccaacgtggacgtcacgtcggatggggaagggagaggaggccgggcggctcatcggacggctcacggcgaagacgacgcgcgacgacggccggcggcggcggccaatctcgccgacacgccaacgtggccgcacgcgagaagagcgaagggcacgcgggctcgggcttcaccgaaccggtatggggttgcgacgcgcacgcggtgacgcgggacctgatggtcaccggcgacgcacgcgcggtggcgttatgcggcggcggaaggggcgacacggcgcggaggccaaaggagaaggccggtgcgcctagggacagtcagggggagctcaaggggatctccgggagcgtggcggcgagaggaatcggctcgagaggtgccgacggcggtcgattgcggcggcggcaatcaccggcgagcaaaaaggggaaaacacaacgagacgacgaggattcgattcaaaggggtgggagcatctccggggttcaaggaatctgtttccggtgtcggatggggcggagaagcactgaggagggccggcgacgagcagcggcctccgggagcggacggtaatggcggtgaggccatgccgggcgacggcggtgctagggaatggtttggggaggtcctagggagctcaaggacggtgttggcgagggtggtcgacgagctggggcccgacgacggcgcgcgactgcgcgcggcggcggaaacagagcaacggcgaggcgcgcggcgcatcgtgcggcaggctatggcgtgcggcggcgggcgcggcatagcgagcggtaggaggaaagggttcggcggggagctcaccgacaagaggaagcggcgtcggcggatcggagggagtcgtggtgaggtggtcgcgacggtgggacggaacggcaccgggtgggcgcggccggggaggaagagaggagaggtggcgcccggagctcctcgtcacgcgcccacgcacgcaccggttcctccggtgctcggcggcggacggcgacgacgagatcgagtcgagcggcaacagggcggcgacggcgcgggatgtggagcttcgaggggaaggaaccgagcacgggcgatcaaggagaggcggtggcggactcgcggtcaagttgtgacagaggcggtcacgggtggcaaaggaggtgacggtgtggatgcgttgggcggcgaaggcggtggatcgagcggcggaaaatcgaaccgcgggagcgggaggattagcacgggctggcgcggtcaagttgggggtggcgagctggcgctggcgtctgcgtctctgcctccgagcgcttgcggccaaggagtggaggcatggcgtcgttgcttgggagggaaaaagagagggaggacggtggaaagggggggctttaccatgccgggtgggggcgagcggcagggcggcatgggcggccgtgcggcgcaggcggccagggctgatgcggcggcgaccgggcgggtggcggcgtcgggggcggcgttctcgtcgtcgacggagacagggatggagcccgtcgtgtcttcggcagtggccgcggcgagctgggtcctgcgccttgctggaggtgaaggcatcgaagtcctcatgccgcctcttcttcgcctccttgggctcgttgcgcgcgtcgcgacggcgttggcgttctgggaggcgtcctcgtcgtcgatagagactggccgtgcgtcttcggtggtggccgcggcgagggagtcgtcgtcgccggcgagagctcgtgcctggtcaatcctccgcgcatgcctccacgtcctccggtgggaggggccaccaacgtcgaagagaggaggaggcacacctgaccggatcaccggagtagcttcagctcggcggcgttgcgggccgagtggatccaccaactccgccatcgacactcccagtcccagtcccagtagcgccaccaacgatgtcgtcgcccactccgccgccggcgtagtgccaccaacgacgtcgtcgtccactccgtcactgccggcgactgccccgccatcgccagagaaggtgagcaacgacgaggacgtaggtggaggaacgacgtgcgacctgtacgacggggagtgggtgcgcgacggcgacgaggaggcgcggccgctgcacgcgccgggtcgtgcccctaggccgacgacgaggcgaacgcctgcgcgtcgaacggccggccggacgcgccgcctacacacggtggcgttgggcgccgcgccggtttgtatgttcaacgtgacggatttcctggcgaggctgtgcgcggccatcggctga

SEQ ID NO: 54290 - DNA, 288 bp, Oryza sativa
  Clone ID: PAT_MRT4530_56409C.1
atgcagctgctcctcctgctgctcgccgccgtcttggtggcggcagagccggctgcagcgatatcgacgatgcccatggagctctacttctcgccgggggagctcgcgcgtattgccgggtacggcgaggagccggtttcgaccgtggtcgtgtccggccaggtcgcctgcgagctctgcctctgtcccggctccgacctcctcaccttcgagctcccagatgatccttttctccgctgcgattatccgggcggtaaatgcatggtgacaagccatgacaaactttga

SEQ ID NO: 54291 - DNA, 167 bp, Oryza sativa
  Clone ID: PAT_MRT4530_5640C.1
ccctgttggtatttcttaatgacattagtagaaatacaattcccagcaatggcgcagaaatactcctggtatattatggctacagagttcatccgcaagcgcacggatatacgattgtagcatttcacccgatagtattccaagagtatcgtatttatttaatcccg

SEQ ID NO: 54292 - DNA, 1649 bp, Oryza sativa
  Clone ID: PAT_MRT4530_56410C.1
caaaaattttttatataataattttttttaaccactgctagctcatcatcagtattcagtactactactgaataatgccccccaaagtgcagtgcaagtctgcacgtacgagctcatgagaatcaggtacatgtacaacaacttctactactagtagtatactactgctgctgccgccgatgctgcatgctacaactaggctacttgctagatcatcatcatagtactacacgtaccatcgtcgtagaatgcatcgtatacagatcaatcgatcagatgttcagaaccaaaaaaaggagaaattaagttaacaagatgcaaatcactatcagagtatatcagtagccggccatccagctcgagctagtgcggacgatcaggatcatcgatcaacggtggttgttgttgttggcgtcgtcgttgtgcaagaacggcgacgggatgaacatgtcctgcaggaggccgtaatcctgcgccatgaagtgctgcatccggagaggagtagtagcagcagcagcgctccccgtcgccggcggcggcggcggcgtggtggaagcaccggtggtagaggcgatgatggcaaccaagccagcatgatcaggctgcggcatctgctgcatggcggcggcgtgcagtgatccgccgctcgccgccgccgccgccgccagctgcatctggtgctgcatggcatggagatgctgcgcatgcggcggcgccaggaggccgccgccgagcgcgtcgtgcggctgcggaggcaaacggtggccgacggcggctgcgaagtggccgggatggtggtactggaggccgccgtggtggtgcgcggcggcggcggcgccgaggaggtgcgccgtgccgcgcagcgtcgccgggatcgggtgcgtgtgcttcccctcgtaggtggtgatcaccaccgccgcgtcctggtacgaccgctccaccctcttcttcaccgggcacttctgcgtcgtgcaccggtagtagctcctgggaaatgggctgttcttgacggctttctggccgtacttgcgccaccggtagccatcctcgaggtggtcgacctcgctcttggtcatgaacgcgaaccgcggctgccgcggcctcttctcccccttccccttccccttacctcctttcttgttcttgtcttctccatcgccatcccccttggtcgtcgacgatccttccttgccgtcgtcgtcgccgccgtccccctcctcctccttcttgcacttcccggccgactcctcgtcccctccggcgccgccgccgacgccgcacgcctcgctcgacgtcgacgacaccgacatgctgttcggagtcatcggccccgccaccgccgccgccgccgcagcagcagaagcaccacccccagggaacaacccgacgccgtccaccaccagctccctcttcacctcctccagaggcgccacgtcgtcgtcgaactccccggcgaatgcctcgtagtccagcggcggcgtcgtcggcgcgctctcctgcatcaggtggtggtggtagtcgatgaacgaccacggctgctgctgctgcagcatccccggcatggcgccgttcggcggccgctcagcgaacagcgacgccagctcgtcgtggaacgggaagccctcgccgccgccgccgccgcccgacat

SEQ ID NO: 54293 - DNA, 1953 bp, Oryza sativa
  Clone ID: PAT_MRT4530_56411C.1
atggagcataccaacctgccgagccatggcgcccaagccgccgaagcagaagcactcgccgccgccgccgacctcgagcaaggcctcacccgccacctcatggaataccaccagagcgaggcgtcgtcggacgagagcgccaggcagcggccccgcgtcggccgcgtcccgccgcacgtccgcaacctggacggcggcgccgaggcgtacaccccaaagttcgtctccatcggccccatccaccacgccgacgccacgctccgccgccacagccacgacctcaaggtggcgtacctccacgccctcatcgcgcgccgcaccccggaccccatcgacgaggtcgccgtcctcgccgcgctgatcggctacaaggccggcgtggcggcggtggaggaccgggcgcgcaggttctacaaggagcccgtggacgaacacctcaccgccgaggcgttcgtcgacctgctggtgctcgacgccgccttcctcctcgagcacatgctcaacctcgccacggggtacgaggacccgctgctccaccgcacccactgggcgccgtcgcagctgcactccgacctcatccgcttcgagaaccaggtcccgttcttcgtcgtcgccgagctgctcgcgctctcgccgctgcaccgcgacccggagctggaggcgtgccgctccggccgccgcgacttcctccgcagcatcggcgtgcactgcctcctccgcaaggacgacgaggagctcaagacgctgccgccgagcgacgacatccaccacctgctccacctctacagcctgtcgctgacggaggcgcggctgcggcggccgcacgcgcacgccgggctgggcgccacggcgtggcgcgcgctctggaagctccccatcgtgacgctcatgccgttcgcctacctgctgtgctccggtggcgccgacgacggcaagggggaggaggaggacgaggcggcggcggtgaagctgccgaacatcccgagcgcgacggacctgcagagggtggggatcaagttcaagcgggcgccgaggaagcccgacggcgggttcctggacgtgcggctggaggacggcgacacgctggtgatccccatggtgaacatcgagcagttcacggcgccgcagctgcagaacctcatcgcgctggagcaggccacgccggagctccccgacgactgctcctgctacgccttcttcatggacaacctcgtcgccaacccggccgacgtcgcgctgctcgagtccgagggcatcctcaagagcaacctcggcagccacaaggcggtggtgacctacttcaacaagctgtgcaaggggaacaagctggaggtggaaggcaactacctgcggtccgtgttcgaggcgctgatggagcgcaacaggaaccccatgtacgcctggatccgcaccctgaggaagaagtacttcagctcgccgtgggggatcatcgccatggtcgtcaccctctttgtcttcgcctccaccgtcctgcagacctacatctccatcgtccagtactacttcgccaacaatggcgattactagctagctagctgccggcctacgcgtatatacgtactgcatttgcattattattgttattattgccttcggatcggattgattacgagaccatcagcttgcatgcatgacgcatcgatcgagagcgagagcggggccatcgatcagagtggtgtgctgctgctagctaattaagctgtttttgagtgcacatgcaagcatgtataccttgtttgtgatcatcagtttgcgcttgtttaatttctcatgcgtgatgcagagatgtgtactgctaatatcggttttgtgagctgtgggtttactgacgtacgctgtgccagaaatattgcgtggctttgaatgtcatctcatcgattactaattttcccaaaaggttgaaaataattcgtcaaaaaaaaaaaaaaaaaa

SEQ ID NO: 54294 - DNA, 1389 bp, Oryza sativa
  Clone ID: PAT_MRT4530_56412C.1
atgtattctttagctggtgaaatgctccatgttgcgcaagcattcatcgacaagaactaccatcccaccgttatttgtagagcatacaccaaagctcttgacgatgctctatctgttcttgataagattgctattcctgttgacgtggacgaccgtgttgcaatgcttggtctggtgaagagttccatcggtacaaaatttactggtcagtttggtgaccttattgcggatcttgctatcgatgctaccacaacagctggtgttgacctgggtcaaggcattcgtgaagttgatatcaagaagtacatcaaagtagagaaggttcctggaggccagctggaagattccaaggttcttaaaggagttatgatcaataaagatgttgttgctcctgggaaaatgagaagaaaaatagttaacccacgcatcattctcctggattgccctcttgaatacaagaaaggagaaaaccagaccaatgctgagttgatgaaagaagaagattggcaggtgatgctacagatggaagaggaatatatagagaacctgtgtgcacagattctgaaattcaagcctgatttggttataacagagaaagggttgagtgacctagcagtccattatttaggaaaggctggtgtaagtgcaattcgaaggctcaggaagacggacaacaacaggatcgcaaaggcttgtggagcagttatagtgaataggccagaggaacttcaagaatctgatgtaggaacaggagctggcctctttgaggtcaagaagtttggtgatgagttctttgccttcattgttgactgcaaagatcccaaagcatgtactgttttgttgaggggagcaagcaaggatgtcttgaatgaggttgagaggaacttgcaggatgctatgtctatggcaaggaacatttggaaaaaccctaaactgctacctggaggtggtgctactgaattaactgtatctgcaacattgaaacaaaagagttcttcagttgaaggtgtagagaagtggccctatgaagctgccgcattagcatttgaggcaattccaagaactcttttacagaattgtggcctgaacgttattaggacaatgacacaacttcagggaaagcatgcaaatggtgaaaatgcttgggttggcattgatggaagcagtggtgatattgtggatatgaaagagcggaagatctgggactcgtacagtgtcaaggcgcagacattcaagacagctattgaggctgcctgcatgctcctgaggatcgatgatattgtcagtggcatcaagaagaagcaagctcctggagccagttcagctccaaagcaacctcaaatagaacaagagggtgatgcagacaatgaacagatgatcccagagtag

SEQ ID NO: 54295 - DNA, 406 bp, Oryza sativa
  unsure (1)..(406): unsure at all n locations
  Clone ID: PAT_MRT4530_56413C.1
gcgatttctctcggattccggggagtgggacaagctggtgggcatgccgtccccattgccagccaggaggacggtcgacatcgaccaggaggtggtggccttcggcgaccggctatggtgggtcgatgcgagctggggcgccgtcaccatcgaccccttcagcnaccggccggagctccggttcgtcgagctgcccaaggagagcntgctgcctgaccttaacgacgtggtgatgctaagggagcttggcaagtacaggcgcatgggggtcagcaagggcaagctccgctatgtcgaggtgtctttggggaagcagttcttgatcaggtcgttctcgctcgccgacgacgacgagggcggcgacttcttgacgcttggagcacgaggttggctttnggcccccccc

SEQ ID NO: 54296 - DNA, 328 bp, Oryza sativa
  Clone ID: PAT_MRT4530_56414C.1
tctatttgcttttgcatccacaagaccactcgaacgggctctctatatccgccgacgggtctcgactaatcacttaggtggtcacaacgccccccgaggagattgtgtacatggtcaagttcgccaaccacgctcaaaggattgaggtgatccgtgagtacgtgctgcacggtggcaacactgtaggtgcccacaagctcactgtcatggaccgcacccttttggctgttgcctacatgaatgagattagggcccggcaggcctcctggctcatgagactaattctacagacacacagggtggccggcaacctggcctgaagaacatg

SEQ ID NO: 54297 - DNA, 160 bp, Oryza sativa
  Clone ID: PAT_MRT4530_56415C.1
attcgtcaccctcttgtaactcattgaccgtctcactgtgacatatggacccttacacccctcttcctcctgacctccggcgagctcttcttcgagggctgcagggagaggcgtcgtgggtggagactcaaccggagcatgcacgcggccgagaggcacg

SEQ ID NO: 54298 - DNA, 247 bp, Oryza sativa
  Clone ID: PAT_MRT4530_56416C.1
cgattaccagaagctgcgcctagcagaagcagaagcttcacaggcggaataaagggaagctgatgctgtaaggttttatgcctatcatggatgcttagaagatgatacaatgtttctgttgctacatggactgcatgattgcacaagctggggcagtggtgctcgttaaacaccgtgctgggttcagatgggcgctctaaatggctaagtaactgtctgctgcttaacgtgcttgagaactactacg

SEQ ID NO: 54299 - DNA, 453 bp, Oryza sativa
  Clone ID: PAT_MRT4530_56417C.1
ctttgttctatctgaatgctggaataagatatgtacaaggggggaatgatgtaatggcacccctcttctttgcatttcggagtgatccggatgataaaaatgctgaattcgcggaagcggattcattcttttgcttcgttgagctgcttagtgggttcagagacaacttctaccagaaactggacaacagtgctgttggcattcgaggtacactagccaagttatcacagcttgtagcaaagtatgatggagaactccagcaacatctggaaataactacggaagttaatccccagttctacgcattcagatggataaccttactgctgacccaggaattcaacttcgccgacaccattcacatctgggacacactattaagtgatcctggtgggccccaggaaaccttgctcagaatatgctgcgcaatgctgatccttgtccggaagcgcc

SEQ ID NO: 54300 - DNA, 894 bp, Oryza sativa
  Clone ID: PAT_MRT4530_56418C.1
atgtcggagtacgcgaacaagaggacgcgcggggccttcatcgccgccgtgttcgccatgcaagggtccgggatcctcttcgacgccatcgtcgcgctcgcggtgtcggcggggtttccgcacgcgtacccggtgtcgtcctactccgacaaccacgccgcgtccctcatcccgcaggccgactacgtgtggcgcatcatcgtcatgtttggcaccgtcccggcggcgctcacctactactggcggatgaagatgcccgagacggcgtggtacacggcgctcatcgcccgcaacacgaagcaggcggtggccgacatgtccaaggtgctgcacacccagatcgaggagagcgtgggccacgccgagacggtgagacggtggtcgtcggcggcgagacctgaggcctcttctcgcgccagttcctgcgccgccacggcctccacctcctcgccaccaccagcacacccggccgctgccgtccaacctgacggccaatggtatctccgcgccggtgaggcgaagagcctccaagtccggcgcagcgtcagggacggcgggaagcgaggcggagtccgtgtcgcagctcccctcgcgcacgtcaagctcccgctccgccggcgcaccgccgcggtggcggcgctggacgcggacctccccgccgaggccgtgcgccatttctccaaggtgctcgacgcgtgccgtggcgggctcccgtacccgttcgcgactgcctgcctcgtcggccgtgccgaggtgttccgttccttcgggaaggcagccgacgccatcgccgactgcaaccgcgcgctcgcgcttgacccgccgtgcgcgcctgacggagagagagaaagaaagaggaagaggggaagaggaaagggagatggaagagaatga

SEQ ID NO: 54301 - DNA, 575 bp, Oryza sativa
  Clone ID: PAT_MRT4530_56419C.1
cgaccaaactacatagcgcctttttggtaaaaattttcacggccgttcaaagctaaaaacagggacattcacaagcttttgtcacagcctacagggccgggcaaataaaggaaagagggggaatatacagggtacaggttacccgaaggggcagcattcagtactatttgccaccaatccttaaaaagggccccggcgacgcccttgaaacggaccttttttttttttggagcaccaccagtgggatcgggggctgaaaccccggtcctttggggggagcttcctgcggggggggccggaacaccaaaactggatgcaaaactcgctgaggcctggggcactggacccacgaaacgggagggggagcttcctacccaagggggattcgtctaagttttggcttgggaaaccctgttaccaacgtccgttttatttgggccaagcgagggaatcttgtccaggaccattgggggcaggggaaaaaccatttgttccatcttctcgcacgttgcgctactcgttgtttaaggggggtctcttctaaaaactgttgggttgcgttcgggttttgggct

SEQ ID NO: 54302 - DNA, 2098 bp, Oryza sativa
  Clone ID: PAT_MRT4530_5641C.1
tcagtagagcgagttctggaagaacatgtcgtctccgggctcttccttggctctcgaggcgtgcatcgcgtcgttctgcctctgctgctgctggtgctggctcatgtacgagcccctggcgtcgtcgaacccggagaagccgccgaagctgctcccgccgaccacgccgccgaacggtccctggccgccgaacccgtcgggcctcagcgcgtacggctgtggccccgtgggctggtaggacatgggcggcggctggttcggcaggtacgggtggctgctggtggcggccgccgccggcggcgcggggcggtagagcgcggcgctcccccgcgcggcgggcacgtcgtggttgtgtttcccctcgtaggtggtgatcacggcgcgcaggtcgtgggacgcgcgctccacgtgcttccgcacggggcaaccggccgtggtgcacttgtagtagctccttgggttcgggttgcccttcaccaccttctggccgtactttctccagcggtagccgtcgtcgaggatgtcgatgtcgctcatggtttggacgaccaccctcggttcccgcaccgtccggttgccagccatggagatcccctcgccgtcaccgtctttcctccatctcttggaatccggctcgtcgtcgtcgaactcgtcgccgccgccgttcccggcccgaggggagccaactctgatctcgtcgtcaccgaacgacgccgacgagttctcgggcgtcgccgctgtgccggacatgcccccgaaggaatgctccgacatgtcgccgccgctctgcaggacctgcgccgccgacgagccggagttcctgcgcgtgttctgcggcttggcgtggttgtgcgtgcccttgtacacgatctcggtgatctggccgtcgagcgaccgctccaccttcttcttggtcgggcagttcgggaaggtgcacttgtagtagctgcgggggttctcgctccccttcacctgcttctgcccgtacttgcgccagttgtagccgtcgtccgacgaccgcctctgcgactgcggctggctgtacccgccgccaccctgcacctgtggcgccatctccgacgaggtcgcctggaacggcgccgcaccgaagctcgccgcgttggcacccgcgtccatgcctgcaggctgctgctggtagccccatggctgctgctgctgctgacttctgtatgcctcgtcccccagtggggccggtgggaccggtggctggaaagtcgtcgttcgcacggcctcctcgctcgcaggcgccgtctgaaacgagaagtcggagtaggaattcctctgctcgtccttgccgccttgatcggcgctctgcgccgccgccacctccggcctccagtcaaagtgctgcgacgcgaatgcgcccgtcgtcggcgacgggaagatactggaggtcaggagcaccggcgagccgaggaagtcggcctggttcatgccgatcgggctgttgaagaaggacgacggcgacaccggcggcggcgagagcggcagcgaaggcggggtcatggccttgtacctggacacacctccgccgccggctcccgcgtttcccccgaggaggtccgtgaagctcgcgctggcgaacgagaacgtccccagccgcgaattggccgacgtctcgacgctcccggacgacgaggttgtcatcggaatccctcaggtcgcgaccaaaaccgccgcgtctcacagctcgtcgccgtgcgaactgcagtcagccgagtatacgtatgtgttcctttttcgtgtttgtgacttggaggctggagacgtggacggatgggtctacgtgctgacgtttctctacggccgagcagagacaaagctggccgggaggaaggggtcgtcgtcgtcgtctccggcggccgaggaggacgacgacggcactgcgtcggcgaggtcggccaaccctcagcaggaagcgggagctcccctcatcctcgccctcgccctcggcctcggtgtcaccgtcatccccgctacggcctgccgctttgcgcctccgggatggacgccggcagcctgcgtcgacttgcaacagtaccctctgataccccacaagtatcaggctgatacctag

SEQ ID NO: 54303 - DNA, 2632 bp, Oryza sativa
  unsure (1)..(2632): unsure at all n locations
  Clone ID: PAT_MRT4530_56420C.1
ccgtagtccagttcgttcgcgaacgccgtcttgtgtcgaaggcgtggttccaggctttgccgctaaggaagtagcggatggcgaacttgaagatgtcnagggggaagaaggtgacgatgctgaagagccagatgcccatgccccacgaccacccgatgcccttcatcttcgcgaacggcccagttcgcgtacaccgcgatcagcgttgccatcagctgggcgatgaggaacgcgccgacgagcaggagccctgggcgctcgacgaagaaccagctcctcgcgcgtgtcacgaagatgagcgcctggctgatgatgctcacctggaggtacaccgccgccatcagctcctccgtgctgcctccgatcgggtgcaccccgaacgtcctcgtgaagaagtcggtgtcgcggacggcccagaagaagaggacggtggcgagggcgaggtaggtgccgaggacgatgccggtggcgaagatctcctggaggcgccatgcgtcgggcaacggggacggcttgacgcggtccttggagatggtcatgatggtgccgtcgttgaggatggcgatgatgagcaccatgaagggcgcgaagtcgaacctccagatgagcgccaggaggaggaagccgagcacgacgcggatggtgatcgacacggcgtagatggtgtagttcttcatccgctggaagatggcgcggctcgtcagcaccgcgctgatgatcacgctaagcccgggctcccgcacgcgatgtccgacgcccccctcgccgcgtccgtcgcgtccgccaccgcgatcccgatgtccgccttcttcagcgccggcgcgtcgttcacgccgtcccccgtcatcccgcagatgtgcttcctctcctgcagcctccgcacgatctcgtacttgtgctcggggaagacgccggcgaagccgtcggccttctcgatgagctcgtcgacagggaggccgccggtgtcgccgtctttgagcagagagctggaggggtacatgttggtgcccatgccgaggcggcggccggtctccttgccgatggcgagctggtcgccggtgatcatcttgacgttgacgccgaggttgagcgcgcgacggatggtctcggagctgtcgtggcgcggcgggtcgaagagcgggagcacggcgaggaactgccacggcgtgcccggcgcgtccttgctcccctccggcaccttctgcctcgccaccgccagcgaccgcagcccgcggtcggcgaacttgtcgatgatggcgtgcacccgccggctcacgtcgtcccgtagacggcacagctcgatgatctgctccggcgcgcctttgctgatgcggtgccacgaaccatctttggtgtcgatgtaggtgatggccgtgcgcttgtcgacggggttgaacggcatgaagtgcacctcttggatgccggcacgggcctcgcttgggtcggcgagcatgccgacgatggaggcgtcaatggcgtcctggttctcggttcgcgacgccctcgccgcgtacaggacgatcgcgtccttgtcgagatccttcacgaacggtcgatcgatagggaaaaaaattaacggcaaaactgaaagattaatggtgtgtgctgtgcgtgcctcgatcatgttcttgtcgacggtgagcttgttgagggtgagcgtgccggtcttgtcgctgcagagcacgtccatgccggccatctcctcgatggccgtcatccgcttggtgatggcgccctgctgcgacagccggtgcgagccgatggccatggtcacggacagcacggtgggcatggcgatgggtatcccgccgatgagcagcacgaggaggttgtcgatgccgtcgcggtactgccggtgctggatcgggtacatcacgatgatctcgatcagcatcccggccgcgatggagcagatgcagaagttgccgatcgccgtcagcaccttctggaaatggccgacgttgttggtgctgtcgacgaggtgggcggccttgccgaagaaggtgtggacgccggtggcgatgacgacggcctcaatctcgccctgcttgcaggtggaacccgagtagatgctgtcgccgggcatcttgttgacggggagcgactcgccggtgagcgccgactggtcgatcttgagcgggtcgccctccatcagccgcgcgtccgccgggatgatgtcgccgagcttgatgctgatgatgtccccgggcaccaggatcgccgcgtcctgctccgaccacttcccgtccctcagcaatgcgcacgcgcgacgtgccttggtctgcggcgcgaggctggccatgagtgcggcggcggcgttcccggcgttgttctcctcgatgaagctgatggtggagttgatgaagagcagcgtcacgatcccgacgaagtcctgccagtccggcggccgcccccctccgttggcgagggcgatggccatgatcgcggcggcctccatgacccaggagagcggattccacatgaaccccaagaacttgagcagcttactctccttcttctcctcgagcttgttgcggccgaagatctcgagccggccgttgccatcggcggaggtgagcccctgcggcgagctcttgagcacggcgaacacctcctggatcggtatactctc

SEQ ID NO: 54304 - DNA, 3521 bp, Oryza sativa
  Clone ID: PAT_MRT4530_56421C.1
aaaagatggttttttccctcaaggaattaataagagtgtttcctaagaacaaatagtacatgctaaaacttagtttgaaacatacagaaaaggctgatggattcttcaacatatgcacaaacaaagtactaaattagccctcacttttagttctggtcttcgaccaatcaaacgtaccaacaaacctacaacctctccaaagtaaaaccattaaaacaacaaaagctacgtacccccattattcatctgaccaaattaagacagtctcctgaccccgttaaattaagctgccaaaaaaaaagaaaaaaaaagaatatcctgtctcacttatcaagctaacgagcagcatcatcgatcatgtatggtattcatgcgtgtgagatcgatggtgctagctagacggtgtagtggttctggatggtgtcgatgtcgaggcccttgagcttgaccaccgactcgacgtggcccttgagcgtgtgcagctcccgtagcctggcgatctcggcgcggcgcttcgcctgctccgcgatctccgacagctccaggtagtccttgttgtcgtcgaacagcgccgtcgacgtctccgcctgctgcagcccgtgcagcgacctctgcgcgatcgcccactgcgcctccctcttgctcttcccgtagtccagctcgttcgcgaacgccgtcttgttgtcgaaggcgttgttccaggctttgccgctgaggaagtagcggatggcgaacttgaagatgtcgagggggaagaaggtgacgatgctgaagagccagatgaccatgccccacgaccacccgatgcccttcatcttcgcgaacggccagttcgcgtacaccgcgatcagcgttgccatcagctgggcgatgaggaacgcgccgacgagcaggagccctgggcgctcgacgaagaaccagctcctcgcgcgtgtcacgaagatgagcgcctggctgatgatgctcacctggaggtacaccgccgccatcagctcctccgtgctgcctccgatcgggtgcaccccgaacgtcctctgcccacaaacacacggcgtcagagcgcgcggcggcgaggcgtgcgaggttgggtgatgagtggtcaccgtgaagaagtcggtgtcgcggacggcccagaagaagaggacggtggcgagggcgaggtaggtgccgaggacgatgccggtggcgaagatctcctggaggcgccatgcgtcgggcaacggggacggcttgacgcggtccttggagatggtcatgatggtgccgtcgttgaggatggcgatgatgagcaccatgaagggcgcgaagtcgaacctccagatgagcgccaggaggaggaagccgagcacgacgcggatggtgatcgacacggcgtagatggtgtagttcttcatccgctggaagatggcgcggctcgtcagcaccgcgctgatgatcacgctaagcccgggctccgtcagcacgatgtccgacgcccccctcgccgcgtccgtcgcgtccgccaccgcgatcccgatgtccgccttcttcagcgccggcgcgtcgttcacgccgtcccccgtcatcccgcagatgtgcttcctctcctgcagcctccgcacgatctcgtacttgtgctcggggaagacgccggcgaagccgtcggccttctcgatgagctcgtcgacagggaggccgccggtgtcgccgtctttgagcagagagctggaggggtacatgttggtgcccatgccgaggcggcggccggtctccttgccgatggcgagctggtcgccggtgatcatcttgacgttgacgccgaggttgagcgcgcgacggatggtctcggagctgtcgtggcgcggcgggtcgaagagcgggagcacggcgaggaactgccacggcgtgcccggcgcgtccttgctcccctccggcaccttctgcctcgccaccgccagcgaccgcagcccgcggtcggcgaacttgtcgatgatggcgtgcacccgccggctcacgtcgtcccgtagacggcacagctcgatgatctgctccggcgcgcctttgctgatgcggtgccacgaaccatctttggtgtcgatgtaggtgatggccgtgcgcttgtcgacggggttgaacggcatgaagtgcacctcttggatgccggcacgggcctcgcttgggtcggcgagcatgccgacgatggaggcgtcaatggcgtcctggttctcggttcgcgacgccctcgccgcgtacaggacgatcgcgtccttgtcgagatccttcacgaacggtcgatcgatagggaaaaaaattaacggcaaaactgaaagattaatggtgtgtgctgtgcgtgcctcgatcatgttcttgtcgacggtgagcttgttgagggtgagcgtgccggtcttgtcgctgcagagcacgtccatgccggccatctcctcgatggccgtcatccgcttggtgatggcgccctgctgcgacagccggtgcgagccgatggccatggtcacggacagcacggtgggcatggcgatgggtatcccgccgatgagcagcacgaggaggttgtcgatgccgtcgcggtactgccggtgctggatcgggtacatcacgatgatctcgatcagcatcccggccgcgatggagcagatgcagaagttgccgatcgccgtcagcacctgaccaccattgatggtgagcagagcaagcaagcagttggcacctctccgacgagaagtggcggatggatgcatgcatgataccttctggaaatggccgacgttgttggtgctgtcgacgaggtgggcggccttgccgaagaaggtgtggacgccggtggcgatgacgacggcctcaatctcgccctgcttgcaggtggaacccgagtagatgctgtcgccgggcatcttgttgacggggagcgactcgccggtgagcgccgactggtcgatcttgagcgggtcgccctccatcagccgcgcgtccgccgggatgatgtcgccgagcttgatgctgatgatgtccccgggcaccaggatcgccgcgtcctgctccgaccacttcccgtccctcagcaatgcgcacgcgcgacgtgccttggtcttcggcgcgaggctggccatgagtgcggcggcggcgttcccggcgttgttctcctcgatgaagctgatggtggagttgatgaagagcagcgtcacgatcccgacgaagtcctgccagtccggcggccgcccccctccgttggcgagggcgatggccatgatcgcggcggcctccatgacccaggagagcggattccacatgaaccccaagaacttgagcagcttactctccttcttctcctcgagcttgttgcggccgaagatctcgagccggccgttgccatcggcggaggtgagcccctgcggcgagctcttgagcacggcgaacacctcctggatcggtatactctcacggatgaacgcaatattggcggaatgatgaagaacactgacgaggtcgacgttctccttcttgagatcctccagtgagaccgacat

SEQ ID NO: 54305 - DNA, 897 bp, Oryza sativa
  Clone ID: PAT_MRT4530_56422C.1
atggctggcaacgaagctgatgaccatacgagcgcagcggccactgtactgagagagttgtcggggactagggtggaggtggcgcgcgcccgcgaggcggcggtgaaggcgtggctctccgccatgccgctcggcgaggagctcgagaggctccgcgccgagctggccgcggccaagaaccgcctcgccgcgacggcggcggagatgccgccgctcaagtccgccatcgcgtcgacgaacgacgccgccgtcgcgaggaaggaggcggcgggggagaagcgggcggcggcggaggagctccggcgccgcgttgatcgcgcgcgcgacgagctgcgtcggctgcggtcggaagccgccgcggcgagggaggagattggggcggtggagcggcgggtgctcgtccggcgccaggccgcgcgcgcgctgcagctggccgagcgcgccgtggcggcggaggcccacacgctggcgtggtccgcggccgcggccgccgagcaggccgcgcgcgcgccgggcgccggcgccgacgccgcacaccacgacgtcgtggctctcccggcgcggatgctggaggagctgcgcaggggcgtggaggccgaggagaggaaggccgaggcgcgcgtcgaggaggccgaggctctgcgccgcgcggcgaaggcgcgccgtgccgcggccgcggcgaggctggccgaggcgcgcgccaggaagcgggaggccgccgagcaggggcgccgccgcgacgccgagaacgagcgcggcgacaacgcggcgaggaggagccggagcggcgggactcgcctcgccgcgaggaagctacccagctggctctgcgccgttggccggagtggcggacgttcccaagcaacagcaatggcggcgcatggcacaaacagatga

SEQ ID NO: 54306 - DNA, 338 bp, Oryza sativa
  unsure (1)..(338): unsure at all n locations
  Clone ID: PAT_MRT4530_56423C.1
acatcgttcgcaaataagctaccattaaaaaaaatcttatatttcttttttctcatttttctgtattataccccaattgtcttagtactaggacgacgacgaaaaagcagtcactagtctctctttcgttttcttttcatttttaaagttccggtttaatttatctgtgccggatactctacttggggattgttttggatcaagtatgaatataaatgcaagtttcaagaaaaaaaaaaaaaaaaaaaaaaaaaaaaaaaaaaaaaaaaaaaaaaaaaaaaaaaaaaaaaaaaaaaanaaaaaaaaaaaaaaaaaaaaaaaaaaaaaaaaaaaaaaaa

SEQ ID NO: 54307 - DNA, 537 bp, Oryza sativa
  Clone ID: PAT_MRT4530_56424C.1
cccttgattgaggttaagcacgaaggttctgaaatgttcctggaaattatgatcgatatccgccgcaacgtgggttattctctcttccagggccagccccagcaacaaccccaggccggttaaccctagtcctagtcagtcaagttttgtgcggaaggggagatttggatttaggcaaatgccacctccccagtttgattgggggcttacatggtcttaactgccgttagacttttgcctgaaactccctgagcattgactccagcgattccctcggatttaagcaccaatcttctacccgcaaataacccacatttccccctgggcaaaccgctctgaggggcagatttttttcatccaaatagcgatgaattttttccacactggcttgctgaccgggccagtggaatgttttagcctgcttaatggcccttagattaccttccccatcgggcagttaatgacggccggtgaaaagaataccgacgttctgtccccagtaatagcaactagcaccttgagaataaccaggagtcc

SEQ ID NO: 54308 - DNA, 198 bp, Oryza sativa
  Clone ID: PAT_MRT4530_56425C.1
atgaggccggatcgacagttcagatttggaagctatcttgcccggtcccaccagtcagtgtccgtcgccggcgtcgaggcatctaacgaagccttcagccgcagtatccggttatgctataagaactccggcgatggagaattgctccacgaaagccagatcacaccaacaccgcaagttgttggacagatcaattga

SEQ ID NO: 54309 - DNA, 2751 bp, Oryza sativa
  Clone ID: PAT_MRT4530_56426C.1
agaacatcagtgaacttttgattttttttaaaaaaaatcaaacagtgcatgtctagataaaaatcaaacagtgcccttgccaatcgaagggtcactcatgttatcatgtatgtacatctcaggttaacaggaaggtttgtattagcgccacacgagcgacgcggccatgctcttcaattccctactgtgcaacaccgcaccaccagtttggatttagcgtgtgaaaaaaaaagaatcacattacgaatctcgcacctaaaacgctacatgtcaaccaatcagaacgtcgaggccaagacgaaacgaaatcctcatagtctagtcatcatcctcatcatcgttattgttgttcgcatggtatatcttttgtgcacggtacatatcagcaacttgctcagatgtggttgcctgttctggatttttatcatcacgaacacgtaacaagcgaggaaatcttagggagatgcccttgttcggatcaactataccattggcagcacgatgcacaggactaatgctcaaatcagcagctttcacctcccaaacctctgaaggctcaaaccacacatctgggtccattgtgtcagcaaacctatagtatgcctttggttttggtattgctttagttcgaaggctcacagaacgctcctcaagctgttgctcagaaaatccagtgcctatgttgcagattgtttggtattcttcgttctgctcatcgtaacatgccaggaggaatgatccatatacacctgtacgttttcctctcccatgaaaggcagcaattggcaccaaatccaaagagtctccaatgctgtccatgtagtctttcttcaatttcaaccaattgttcgatcgttttgctggctcatatgtagcatccttatccaatgtcttgataatcaacccttcacaactggagttgacagctgtgtcaagaaatttttgtatctcctcgaggtcatttgatgtaattgaagttgccaattgaaaaacacctggtacttcctcaaaggagttgtaaagatgctctcgtcgaactttcagttgttcctggagaagaggcttgccattgatgtaaagaatatcaaagccaaaagtacagactgacactttgatatcacttatggtaacacccttgcgggcccgtgtgctaagtatctgaaaaggtaatattttcttcttttcacggtcataagcaacaatttcacagtccaagacaaatgatttgactgtaggcttccggaatctagaaaccgcatcaacaacatcaggatacttcccagtgttcctctcagcattacgactatagatctctactgatccatcttccaggcaatgtatctgagcccgttcaccatcatacttgtactcacaagtgtactcaagaccctgaaatttgtctatgatctctgagacagactttgttgcttttgccaacataggaccaacaggaacaccaatagaaaaactgcatatctctggaagtttccaaacaccaacttctagaatagctgggacaattttatcgtatattggaagaactgaatatacttgtttaattatttttgcagcctcttcaaaaggggattggatttttgacggtggagaatgtttttcagaatacacagcagcttgcccaagagccatctggacggttttttctgctaacccaatcctcatcttcgactgaagtagtcgtgtaatgtattgaggttcacagtcagttgcggcaacgagaagtcctttgatatgatttcttttcttatcttgactatctttgcctgattcctttgcaattgtccggaattttgcaagtacatgtgagatcgtcagtggtttcggtttgtacatcatcttctgtgacaacctgcttgcttttgcaacaagccccaaatcgcccaactcctttaggttcttcttgacatgctcctctctgcggccgtatgcctccgcaagtgcacggataattgatgcatccccaattccaagttcagtcccttcatgaggcggcgcaatccggttggctgagaggtatactgtcgcgaggagatcctctggtgttgtggcaatcaccgtgcggaatacattcgataggatctccgtgataacaatccttccagactcattagagatgaggtcaagtgcccgagcgaggaacaggaacggcacgggctcctcggggctccaataagcagcagccatgggattgaattcactgcccttcttcttgagctcgagggtggtgtccttttcctcagacttgggggcatccaaggctttggtcttcttaggtgaggagggcttctttatgtcctgggattcagaagctagcgcttttgccttcgtcggagatggtgacctcctcttctccttctcaacgccttccgcggaggacttggtgtcggatttggcacctagggttttaggcttcttcggcgagggcttctccttcgcctccggtttcgcgccagcagccaccgattcggacctcttcccctcacctggcgagttggacttagtcggcgaggacgaccgcttgggcttcaccggcgaatgcggcttctcctccggcttcgccaccgcgccgccatccgcctccgcggcgggctggggctgcgtcttcagcttcttcggcgacggcgccgcccccttcttcgccttcctcgccgcgtcccgcgcgttccccatcagcacatccgccaccgtccgcttccctcccccacctccacccccacccgccgaggccgacat

SEQ ID NO: 54310 - DNA, 3045 bp, Oryza sativa
  Clone ID: PAT_MRT4530_56427C.1
atggcggaggcggcggcgctcttctcgctctccgcggccgccgtggtggaggacgtgctgcggcagcacgggtgccgcctcagcgaccgcgacctcgcctcccgcagggcggaggaagccgcggcgaggcggaacgaggcggcggggtggctgcgccgcacggtgggggcggtggccgcgcgcgacctgccggaggagccgtcggaggaggagttccggctcggcctccgcaacggccagatcctctgcggcgcgctcaacagggtccacccgggcgccgtccccaaggcatgcgcacacgttgtgttcgttaatttgattcgctcccgctgcgctgtttgccactgtagcgtgatggtggtggtgaacacggcggcggactccgtgctgcagccggacggcgcggcgctgtcggcgttccagtacttcgagaacgtgcgcaacttcctcgtggcggcgcaggagatcggcctgccgtgtttcgaggcctccgatttggagcagggagggaagagcgccagggtggtgaactgcgtactggcattgaagtcgtacggtgactggaaacaatgtggtggcaccgggccatggaaatacggggggaatttgaagccgtcggcttccggcaagtcgttcgtgaggaagaactccgagccattccggaggtgccaatcgatgaacgagggcgaggtgccttacgaggaggctggattcagcggtgattatcatcttgattccggtgacatgtcgacgtcacgccctttgaaaatgttggttagtgcagttttgtccgacaagaggcccgacgaagttccacaggtgaaggcggctctgaaaaatggtacagatggcaccaaatccttctcgaaatcaaagatggatacgatagaggtttactccaaacatagacaaaccaaaaaggaagcatatggagaagttacactgaagcaatattcaatgctacaactacagtcaaagcatgttgaggaactcaaggctgatattagagctacaaaagctggcatggagtttatgcaaatgaagtactccgaggacatcaacatcttaggaaggcatctgtttagccttgcacatgctgcctcaggttatcatatagttcttgaagaaaatcgcaagctgtacaaccaagtgcaagatcttaaagggagtatcagggtatattgtagagtacgaccctttttacctggacaagtaagttcttgtgctgtgggttcaattgatgagggcaatataaccatcatcactccttccaagtctggaaaggaaggtcgaaagacttttagcttcaacaaggtgtttggcccttcagcaacacaagatgaggtgttcttagatacccagccccttattcgctcagtacttgatggatacaacgtttgcatctttgcttatggccagaccggttcagggaagacatatacaatgagtgggcccaagaacatgactgagcaaacccagggtgtaaattatcgggcactaagtgatctatttaagcttgccgaacaaaggaaaggagcattcatttatgatattgctgtgcaaatgatagagatttataatgagcaagtcagggacctccttgtcaatgatgagattcgaaataattctcagaatggacttaatgtgccggatgcaagccttgtctgtgtcgcatcaacaatggacgtgatggaattgatgaatgttgggcagaagaaccgtgcagtcggcgccactgcactaaatgaccggagcagtcgttcccacagttgcttaactgtacatgttcaaggaagagatttgacatcagggaccattcttcgtggctgcatgcacttagttgatctcgcaggcagtgagcgggttgataagtcagaggtcactggagaaaggttaaaagaagcacaacatataaacaaatcattgtcggctttaggggatgtgattgcttcacttgcccaaaagagtgcgcatgtaccttacaggaatagtaaattaacacaactcctgcaagattctcttggaggtcaggccaaaaccttgatgtttgttcatataagcccagaaagtgatgctttaggagaaagcataagcacattgaagtttgccgagcgtgtatccactgttgaacttggcgctgctcggttgaacaaagagtctggagaagttaaagaacttaaggagcagattgctcgactcaaatcatcattagcaatgaaagattcaggatcagagcaaaacattaaccgtgaccctgaggcatttaacatgaagatgccttcacctggcttttcaaataggcgacagggtagttgtgagttggtgtctagccaaactaacttcagacaaccaatggaggacgttggaaacatagaggttagagccaatccaacattaagacagaagaaaccaagctttgatctccaggacttattagcgtcaaatgattccccatcatggccagatagcatttcaagggcaaattttcaaatgggagaagaaagagtgactattggtggggaatggatcgataaggttgtagtgaacaacaataactcagtaggtgattgggaaggcgacagtgcagctttacctgacttcttttaccaaaggtaccattcaggtacaagagataagcaatacctgagaaataactcaagaaaaaaggacggaaatgagtttgagcagcaaagaccaagattttattccacaaatactgatgattctgatgacattgacattgcaacaagtgattcctcagaatcagatgcactatggcagttcaatgtccaaagcatcaatagttcaattagcgagaatggttcaaagatcaagaaaccacaaacgaagctaagagagagctcagataccaggacaccactccattctcaaataccatctgcttcgagaaaaacctccaatggaaatagatctggacggcaacctttaagtggtagcgatagcagaaggctctcatcaaatggtagacatgctgtgtttgtcatgagagattgcgaggtttttctcgagtacagcaatgagtga

SEQ ID NO: 54311 - DNA, 261 bp, Oryza sativa
  Clone ID: PAT_MRT4530_56428C.1
atggccgcggccgtgccagccatcgtcatctccctcgactaccgcctcgcgcctgagcactgcctccccgccgcctacgtctccgccgtgctctggcttcgcgacgcggcggcgggggacccatggatcgacgcgccacgagggaggtcgcgggtgcgggggctgtcgccgccaggttttattattttttttatcgaattgccacgtaagcgctacgtcactgccacgtcagatgaagaccaagtcaaattagccacgtag

SEQ ID NO: 54312 - DNA, 1101 bp, Oryza sativa
  Clone ID: PAT_MRT4530_56429C.1
atggcgcccacgccggactccgtttctgctacgtcaccgccgccgccgctgccaccgccgcattttgtcatcgtcccctttccggcgcaaggccacacaatccccatggtcgacctcgcgcgcctcctcgcggagcgcggcgcccgcgccagcctcgtcgtcacgcccgtgaacgccgcgcacctacgcggcgtcgccgaccacgccgcgcgcgccaagctgccgctcgagatagtggaggtgtcgttctcgccgtcggccgccgacgccggcctgccgccgggcgtcgagaacgtcgaccagatcaccgactacgcccacttccgcccgttcttcgacgtcatgcgccacctcgccgcgccgctcgaggcgtacctgcgcgcgctgccggtgccgccgagctgcgtcatctccgactggtccaacccgtggacggccggcgtggcgagccgcgtcggcgtcccgcggctgttcttccatggcccgtcgtgcttctactccctctgcgacctcaacgccgccgctcacgggctgcagcagcagggcgacgacgacaggattcttcaactcaccatggaagccatgcgcacggccgacggcgcggtggtgaacacgttcaaggacctcgaggacgagttcatcgcgtgctacgaggccgcgctcggcaagccggtgtggacgctcgggccgttctgcctctacaatcgggacgccgacgccatggcgtcgcgcgggaacacgctcgacgtcgcccagagcgcgatcaccacgtggctcgacggcatggacaccgactccgtcacctacgtcaactttggcagcctcgcttgcaaggtccccaagtacttgttcgaggtcggccatggcctggaggactccggcaagccgttcatctgtgtggtgaaggagtcggaggtggccacgccggaggtgcaagaatggctgtccgcgctggaggcgcgagtggcggggcgcggcgtcgtggcagcctgcggcaccatcttcggcgtcatccccttcgtctcccgccgctcgctcggcatcatctccggcatgaccggcgccggcgtcaacttcggtgccgggctcacgcagctatag

SEQ ID NO: 54313 - DNA, 146 bp, Oryza sativa
  Clone ID: PAT_MRT4530_5642C.1
gtttttgccactgactatgacgaactcgttagtggggattttttgttccatgcttgacactcacatcaaggttaacgttattggctgagccactagcacctagactggaaacatgctttctacgccagaaagcaacactcgctgac

SEQ ID NO: 54314 - DNA, 875 bp, Oryza sativa
  Clone ID: PAT_MRT4530_56430C.1
ggttccaactagaaatattctgatttctgaaaaggcatgcatttcttggattctcagtccatattgtgaagaaagtctgttcactactaaaattacattatccattaacttcttcagaataagaaacacagatgacttgaagaagtaaatcagtgtaaatctgatgccaacaaaaaggaaaaatattcagaaaacagtgtgtaacttctggattcaaatgtgcttttgtttgcacctccactgtttactgttctggagcgttcttggctccctgcagggtgaagctgtgtatcagctgcgtcaggctttcgtacgaggatcctcctttctccatggctctgcgagctttctccccgtactccttcgccttcctcctcctctcgtcggactcggcctcgccgctgtccatgagctttgacaccgcccgcgcgacgtcaccccgggtgaccgccatggcctcgtcgccgaacagcagcacgggcgccgtcacgccgaccggcacgccgacgccgagcacgtcgacggcgagccgctcgttcaggaactggtcggagaagtgcggccacgtcacgacggggacgccatgggcgatggactcttgcatcgagttccagccgcagtgggtgacgaagccatcgacggcacggtgcgacaggatggcgagctaaggcgcccagccgcggaccacgagaccgcgagccgccacacgggcctccagcgcggacagccattcttgcacctccggcgtggccacctccgacaccttcaccacccagatgaacggcttgccggagtcctcgaggccatggccgacctcgaacaagtacttgggcaccttgcgggcgaggctgccaaagttgacgcggacgcgtggg

SEQ ID NO: 54315 - DNA, 131 bp, Oryza sativa
  Clone ID: PAT_MRT4530_56431C.1
gtttatgtttgagagggatcatgcaaaacatcttcagtaaatctttggatttgaggcatcgagttaagtaaagggatgagggacggggacgaatactggtaggcgccaagtgtatttgacatggaaagatt

SEQ ID NO: 54316 - DNA, 1423 bp, Oryza sativa
  Clone ID: PAT_MRT4530_56432C.1
attcatatgggggccaaacgtgaaacatgaaaggccacaaagctgacaaccttataccctgatatcaaccagataaaatgttcaggtagagcaatttcaaagtagtgcaaaaattggtcgcctgaaaaaaagccaacaattcctagccaagaaacaaagaaaccgaacaaatctttggttccaactaaaaatattctgatttctgaaaaggcatgcattttttggattctcagtccatattgggaaaaaaggctgttcactactaaaattacattatccattaacttcttcagaataagaaacacagatgacttgaagaagtaaatcagggtaaatctgatgccaacaaaaaggaaaaatattcaaaaaacagggggtaacttctggattcaaatgggcttttgtttgcacctccactgtttactgttctggagtgaagaagtaaatcagtgcaaatctgaagccaataaaatggaaaaacattcagcaaacagtgcaacttttggattcaaatgtgcttttgtttgcacctccactattctactgttctacagcgtttttggctccttgcagggtgaagctgtgtatcagctgcgtcaggctttcatacgaggagcctcctttctccatggctctgcaagctttctccccgtactccttcgccttcctcctcctctcgccgccgtccatcagttgtatcaccacccacgtccttgcgcgccctcgcggtccccgtctcgccctacccctgcgcgccctccggtccgccacgccgcccacccgcgcccgcagccgccgctaatctgatgccaacaaaaaggaaaaatattcagaaaacagtgtgtaacttctggattcaaatgtgcttttgtttgcacctccactgtttactgttctggagcgttcttggctccctgcagggtgaagctgtgtatcagctgcgtcaggctttcgtacgaggatctcctttctccatggcttgcgagtttctccccgtactccttcgccttcctcctcctctcgtcggactcggcctcgccgctgtccatgagctttgacaccgcccgcgcgacgtcaccccgggtgaccgccatggcctcgtcgccgaacagcagcacgggcgccgtcacgccgaccggcacgccgacgccgagcacgtcgacggcgagccgctcgttcaggaactggtcggagaagtgcggccacgtcacgacggggaacgccatgggcgatggaactccagcatcgagttccagccgcagtgggtgacgaagccaccgacggccggtgcgacaggatggcgagctgcggcgcccagccgcggaccacgaggccgcgcgccgccacacgggtgacgaagcctagccgcgcccgcctccgctcgcctagccacgcccgcagccgcctccactcgcttgagtga

SEQ ID NO: 54317 - DNA, 137 bp, Oryza sativa
  Clone ID: PAT_MRT4530_56433C.1
atgagtgaccgagtgaggatcggaacgggacctgctcgtggactcacggacggagaggcgctggtcacggcgccggcgcgccgcgtcgcgtgctggcgctgttgcagtaaccctagccgcgagcttgcggcggccag

SEQ ID NO: 54318 - DNA, 1582 bp, Oryza sativa
  Clone ID: PAT_MRT4530_56434C.1
tcaaatgtgcctatttgcactgcactctactgttatagaacttgagttttttggttcctgcagggtgaagcggcgtatcagctgcgtcaggctttcatacgaggagccccctttctccatggctctgtgagctttctccccgtactcctttgccttcctcctcctctcgccggcctcctcgccgccgtccatgagctttgacaccgcccgcgcgacgtctgctcgccccacctgcatggcggcctcgtcgccgaacagcaacacggacgccgttgcgccgaccggcacgccgacgccgagcacgttgacggcgagccgctcgttaaggaactgatcggtgaagtgcggccacgtcaagaccggcacgccatgggcgatggactccagaatcgagttccagccgcagtgggtgacaaagccaccgacggcgcggtgcgacaggatggcgagctgcggcgcccacccgcggaccacgacgccgcgccccgccacgcgcgcctccagcgcggacagccattcttgcacctccggcatggccacctccgactccttcaccacccagatgaacggcttgccggagtcctcgaggccatggccgacctcgaacaagtacttggggaccttgcgagcgaggctgccaaagttgacgtagatgacggagtcggtgtccatggcgtcgagccacgtggtgaccacgctctgggcgacgtcgggcgtgtttccgcgcgacgccatggcgtcggcgtcccggttgtagaggcagaacggccccagcgtccacaccggcttggcgagcgccgcctcgaagcacgcgatgaactcgtcctcgaggtccaggaacgtgttcaccaccccgccgtcggccgtgcgcatggcctccatggccgcgtcccgtaggtcctcccaccctggtgtgttgaagaaccctggctgcgtgtccttggtcacctccacgcgcaccggcatgcccggcacgacgtacctgtcgtcgtcgccctgctgctgcagcccgtgcgcggcggcgttgaggtcgcagagggagtagaagcacgacgggccatggaagaacagccgcggcacgccggcgcggcgcgccacgccggccgtccacgagttggaccagtcggagatgatgcagctcggcggcgccggcagcgcgcgcaggtacgcctcgagcggcgcggcgaggtcgcgcatgacgtcgaagaacgggcggaagtgggcgtagtcggtgatctggtcgacgttctcgacgcccggagggaggccggcgtcggcggccgacggcgggaacgggacctccactatctcgagcggcagctcggcgcgcacggcgaggtcggcggcgccgcgcaggcgcgcggcgttcacgggcgtgacgaggaggctggcgcgggcgccgcgctccgcgaggaggcgcgcgaggtcgaccatggggatggtgtggccctgcgccggcaaggggacgatgacgaaatgcggcggcggcggcggcggcggtgacgtagcagaaacggactccagcgttggcgccatggtgggcacgagagcggtgcgagtggcagccaaaaaagcttttgat

SEQ ID NO: 54319 - DNA, 197 bp, Oryza sativa
  Clone ID: PAT_MRT4530_56435C.1
aatcggcacgagggctgatgatgatgccgcagcgccatttggctagatgaaacatggctaagggcaagagcgtcatttggctgcgccgttactcaccgttaggatcaaaaacggacggaatggtgtggaggacagacacgataaagttcgacgatggcatagaggaaagttcgacgatggcatagagggaggctcga

SEQ ID NO: 54320 - DNA, 231 bp, Oryza sativa
  Clone ID: PAT_MRT4530_56436C.1
atgacgaccatccgccggttctgctgcgacgacctcctccgcttctcctccgtcaacctcgaccacctcaccgagaccttcaacatgtccttctacatgacgtacatggctcgctggcccgactacttccacgccgccgtcagccccggggaccgcgtcatgggatacacctctggaaaacatgagaatttagggatcttttggggttacagtgcccgattggaatgtggt

SEQ ID NO: 54321 - DNA, 297 bp, Oryza sativa
  Clone ID: PAT_MRT4530_56437C.1
atggagccccaacagaaaatgatcaaggcagcagaagaaacatcagccctctctcccttcaatgccaattacaaaggttcagatgctcatgtcatatcttcgcaggggcttcgggactgcacacaaacatccacaggacagagttatttccaatcacctgcaatgacactgacattacaagttttcccaacaaaactgggatccttcccatgttgctacctgggacttccgctccatgtgcagaagttgtggaagattgatttactcatatacaataaattatatgggtgtaaatag

SEQ ID NO: 54322 - DNA, 462 bp, Oryza sativa
  unsure (1)..(462): unsure at all n locations
  Clone ID: PAT_MRT4530_56438C.1
gcacaaactggtccttgttatcaacaacactccaacagtcatgctgatacaggtagcaatgcatagcggatttacagccaaatcccagacagttactatgcataatgcacaaacgtcatggtgccagaaatttaattcttgtttcattagaaggcggaaaccnncgcttctttaattaccattgcatctgtgctattatctactattaaggtttgngcgctttttgccttcctatgcaccagaaactgtgggccnnatctctccaatctttcacttttggagtttcctttcaaggaaagtccggcgtttattcaaaccaaaatacctacttttcccagccatttcagggtcaaggcaaaggggaggcaatcttttgtgtttgaggccctcggtagttgggaccctggccttgcccgcaaaaaatcttttccccctaagttctttttgtaaaccaaactcaac

SEQ ID NO: 54323 - DNA, 442 bp, Oryza sativa
  Clone ID: PAT_MRT4530_56439C.1
agctcaagttgctggacattgataagaaagacgcccctgatgtgaagcctgatccgaagaatgagatggtgcgcgatctcatcaagcagacacgggagatggaggcgcaactcaaggagcgcaaagagtgggcgcagcagaaggcgatacaggctgctcgcaagcttggcactgatctcactgagctgcgtgtgctacgtatgcagcatgatgagaaccagcggcgcaagaaggataagcaggaaatggaagatgagacaatgaagcgactcacacactggagaatgagctgaagaagaagagtgggcagcttgaccggagtaatgccacagtgcagaaactggaaatggagaatgcagagatacgtgcagagatggaagctgcaagctgagtgcttcagagtcagaacggcatgccagaagttggtaaaaaaaaaaaaaaa

SEQ ID NO: 54324 - DNA, 3140 bp, Oryza sativa
  Clone ID: PAT_MRT4530_5643C.1
atgttttgtactggaatcaaaaagctcaaaaagagccaaaacaagatttttggacatattggagtgtattgggtgcgttcgtggcaaaaactcacttcgtgattcgcgcggtgaacttttgtcaattaatgccaatattggcacacgagggtgcgatgttttgtactggaatcaaaaagttcaaaaagagccaaaacatgatttttggacatattggagtgtatcgggtgcattcgtggcaaaaactcacttcgtgattcgcgcggcgaacttttgtcaattaatgccaatattggcacacgagggtgcgatgttttctactggaatcaaaaagttcaaaaagagccaaaacatgatttttggacatattggagtgtatcgggtgtgttcgtggcaaaaactcacttcgtgattcgcgcggcgatctattgtcaattaatgccaatattggcatgatgcagcaacgggggttcccgatctttcgatgagaggagggtaaacttcgatttggggaaggatacgacgttggcggtctgactacaactaccacaggggtgctgcgccttagcaaccggtacaccgactccacgttgttgctgttcttgccgtgccaagaacaaccttgaaccaggttcaaaagtaacatgtttctttcctttgctcccagcaagtttatacttaatattcatgcgctctatgttctccttagtggtctcatgcagttttaacatcaattcagcgcgctgttttgcatcaaagttcactctctctgaagttgggaggggcaaaagatcaattggagtatggggcagaaggccataaacaatctcaaaagggcacttcttagtagtagaatgttgtgaacgattataagaaaactcaacatgaggcaaacattcttcccacattttaatattctttttcaaaacagccctctccacgtctctcctcatcttgggccaaaagaaatgatcagtaaggatatccttcgtcttcttcacaccaaagtttcccatcagccctccaccatgtgcttctagagcaaacaattccttatcataagtagaataattcaaactaggcccactcaatttctcgctgaaatatgctacaggtttgtcttcttgtaacaacacaccacccaatccaatcccactagcatcacattcaagctcaaaagttttgttgaaatcaggaagttggagtaaaggagcgtgtgttaacttatctttcaaagtgtcgaatgcattcctttgtgctgcagaccaagtgaatgtcacatttctcttggtaagctcatgtagtggggctgcaatggtgctaaaatccttcacaaagcggcgatagaacccagcaagtcctagaaagcttctcacttgtgtgatagttgttggaaccggccagctatgtatggcttcaaccttggcttgatctacttcaattccctgcggagtcataacatagctaagaaaagagactcgatctgtgcaaaatgtgcacttctcaaggttaccaaataaacgtgcatctcgtagagcatcaaaaatagcaggcaaatgaccatgatgatcctctattgatcccttgtcgagtaactcttgcacttgacgttgaatctcctttgtttcctccgagtgggtcctgtatggtacacggtttggcaaagaggccccaggaatgaggtcaatttggagctcaatccctcgaattggtggcagccccaatggaacctcctttgcgaaaacatcagcatactcctgcgaaatgttagtgaccggaggaggcaaagaaataggagtatcctcaattggaaataaagtttgtttgcaaaccaaagcatagcaaacaacagtgtcagtgtcaacttcatccaaatctgattttgtttcaatgaaacaagatcccttcagcttaatctcatttttattattttgaatagagttggtggatttcttcttatgcttcttgccgctgctattaagccattgaatatagtagggctgcggatgtggctgtgtgctcaatgcaagtttcacgaggctctcatagtcctctgcagcctcggccccaatgtgttcctcatcttggtggggcgcgtcgccttcccctgcattgttagttgcaagcaaagcataggtttcttcatctaaatcactagcggaggagtacccaccatcagctctcacgatcattacacgagtgcttggccagtccttgcgcacgtgaccaaagcccttgcagcgtaggcactgaatatctcttgtccttcctgataatgccactgatgatgagctcttggaagatgtagcagcaacccctcttgtgggttcactcgggcatggtgtagagtttgttgtagagggacgcaacttgttgcttgaggacgatggtgctgctgctcgagttgacggtgcagcagcgttggaaggggtccaagagctagcacgacctgcagaaatgttagtcctgaagccagctcttcgtccctgcacttccatttcagctttacaagcaagatgaaacaaacgatatattgaattatattctttgtaggctagaatgtcctgaatttctcggttcagcccacccatgaatctatccataccagcatcatcattttccaccaatccacagcaaagcattcctgtttgcaaagcttgataatactcttctacagatttgttttcttgtctaagttgttgcaatttatgcaacaaatcacgtgcatgatatgaaggaacaaatctagatcgcatgaatcttttcattgcatcccaggtttggggagtgttatttggattggaacaaacaaattcactccactcctcatcatgctcggtgtcagcagcgtactctagttcttcccttgctgcgatgctgctattagcatcatggccattgtggttgcgcctagccgatccatcatgaccatctttgctcattctctccaatgtattcaagatacctgcaagagaagtgttcacagccacaagggacctctccaatgaggaggaaaacttggagttggtgtcaatttgagcagcctccaattgaccaaggcgatcattggcgaccgctggcttgtggtaagtacgagaaattcttccagggtttcccgtgaaccggtccttaattgccat

SEQ ID NO: 54325 - DNA, 187 bp, Oryza sativa
  Clone ID: PAT_MRT4530_56440C.1
aagcggaaaatcatctgtcactgttggatgtcaaaccatgggacgacgagactgatatgaagaagttggaggaggctggtccgcagtgtcaacgatggaggttcttcacactggggagcatcaagagcattgtgcctgtgggttacgggatcaagaacggtgcaagatcatattgaccagtttcttg

SEQ ID NO: 54326 - DNA, 564 bp, Oryza sativa
  unsure (1)..(564): unsure at all n locations
  Clone ID: PAT_MRT4530_56441C.1
agaaaaagattggtatttattgagccaatgctccatgtatggtgtacatacanntactgttatttttgctgttgagtacttaccccagtaatatgatacaaagatcgacgcttcaatatacaccaagggtgaatcatggggttagagccgttttcgcctatggtcctgcctcaatcctctcgatggtttctaacctcgttttccgtttccatcctttcatagtcgcaaccaggttaaccaacccgacaacctgacttttgctgtattctggatgagaccgtgcccaatgaacatactcggtctctggcaaataataagcctttatgaaagtatccacaatttgcagctttggcctaacatttgcggatacaatgtgcagcagcccattaattagtacctgaaggtccagtgacatcaaagcccgtccttcatctgtgcaccgttttaccctagagagaccttcaactaaaacttctgcgatgctatctatgccatactccagcaagaggtcttggagctccttggaaaattctccatggtccaatctagttttgtagtgctttg

SEQ ID NO: 54327 - DNA, 831 bp, Oryza sativa
  Clone ID: PAT_MRT4530_56442C.1
cacgcgtccggccaactgtttggcatcttttatcactacatatacgagacatttgggaaccaggacaggggtcaaagtggcaagtctttacctgatcatcaatcgtttcggcttagagtggctttgtcaaaaataacacaagactctgaccagtggatcaaaccacagagtatttcatattcaccttcatcacccgtatcaatggatgtgatgcctactgcgcctcccagctcaatgttcaccttgtatggtttgaaggagcgctgtgcagctgctgaaacaatatcattggttgctcgagttttgaacagatctcgagcacatctacattccgttctgtctcaaagtaacacttccattcttgaagaattctttgggacaatggttgactctgttccagatttggctgagcacattcatagaacaagtgcaaggatgcttttgcatatcaatgggtatccagataagattgcaaatgccaaatgggaggtcaaggagcttggcatggagcataatggctatgttgatttgttattgggtgaattcaagcactacaaaactagattggaccatggaggaatttccaaggagggactaattaatgggctgctgcacattgtatccgcaaatgttaggccaaagctgcaaattgtggatactttcataaaggcttattatttgccagagaccgagtatgttcattgggcacggtctcatccagaatacagcaaaagtcaggttgtcgggttggttaacctggttgcgactatgaaaggatggaaacggaaaacgaggttagaaaccatcgagaggattgaggcaggaccatag

SEQ ID NO: 54328 - DNA, 1065 bp, Oryza sativa
  Clone ID: PAT_MRT4530_56443C.1
gagctcgcaaaggcaagcaacaactttgcccctgatagaaagatcggtgaaggtggcttcggctcggtgtacatgggatgtcttcccgatgggcgggtggtcgccattaagcatcgtggtctgaactcacctcagggtatggagccgttcaaggcagagatcgcaatcctctctgccatccgctacaagcacatcgttccactatatagctactatgtgttggtcgaggagaagcagaagcgccacctcctgcggccgtcccggaaggaaaaggaggagaaagagcatctgctcgtctttgagtacatggagaacggctcgctggatcaccacctgcacggcccaacgtcgtcgtcgtcgtcgccagtgttctgcggtcagcagccgatcatccaccgtgacatcaagccatccaacatccttctcgatggcaactggacgccgcgcttgaaggacttcgggctcgggtttgcgctcaccgaggaaaaggcagagactgacactgtcattggcacgcatggatacctggccccggagtaccatatggaacgcactctgaatttgatgaccgatgtgtacagttttggcgttgtgatgatggtagtattgaccgggaagaaatcatatttatttgacgaagaatcggtggagaggaatagggaagaatggaaggagagggagaagacagaagaatttgaggaagacgagaagcgagaagaatgtgcggaagaggagggggagaacacacaagatgacaaggaggagagtgaacgacaagaagaggagaagacaacagaagaatggcatgagtggtataagtgggacgagaggtctgatcgcagcttggtgtccatcgcgctgccactgatcgaggcgggggaagtgtggaagatgctggacaggcggccggcagcggagccaacgccgaggcagctggaggcggtggaactggtggcgcagacggcagtgcattgcgtgcggctgcggtgggaggagcggccacccatttcggtattcgtgaccaatctcgagaaggcgctcgagctcgcccgttatgatgggtag

SEQ ID NO: 54329 - DNA, 3319 bp, Oryza sativa
  Clone ID: PAT_MRT4530_56444C.1
ctatggtcctgcctcaatcctctcgatggttcctaacctcgttttccgttttctttcttttttagaaaaagattggtatttattgagccaatgctccatgtatggtgtacatacatactgttatttttgctgttgagtacttaccccagtaatatgatacaaagatcgacgcttcaatatacaccaagggtgaatcatggggttagcttcaaaatgggccgaaaggtgaaagaatcgacaagaaaaaaaagaaataataagaaaaggaaaaagagcaaaacacaacagctctatatgcagctgaagaaaacaaaaacaattacagccgttttcgcctatggtccttgcctcaatcctctcgatggtttctaacctcgttttccgtttccatcctttcatagtcgcaaccaggttaaccaacccgacaacctgacttttgctgtattctggatgagaccgtgcccaatgaacatactcggtctctggcaaataataagcctttatgaaagtatccacaatttgcagctttggcctaacatttgcggatacaatgtgcaggcagcccattaattagtacctgaaggtccagtgacatcaaagcccgtccttcatatttgttcagcagttccatagagcgactttaaactaaaacagctgaaaagctagctgtgcggcgcagtaggcatcacatccattgatacgggtaatgaaggtgaatatgaaatactctgtggtttgatccactggtcagagtcttgtgttatttttgacaaagccactctaagccgaaacgattgatgatcaggtaaagacttgccactttgacccctgtcctggttcccaaatgtctcgtatatgtagtgataaaagatgccaaacagttggcatatacccttaaaaagctcaacattgacaatttccagcttttgcattaatctggcatatttatccatcatcctgattccagtgaagaaatcacaccttaataaagaaagcgatgatcctgtctgtgatgaaatgtccccatccttccaatgggaagaattgcctttcacaatttttgtttttgctaacctactaggcaactgactatcttcatcaataaaatctgcaagaaggtcttcattctcttcgtcaagaggtgctttatttccattgccattgttagtacttccatgggcagaactattgtcaactgagttgaacatcatattggacttcggggattccgtggtgccattttctaccttgtaaaaaaatgggttttcaatcttagtccaagcagcaaatccatttttttccttccctgtatcagacatagtagaaccatgtattggcaaggtggagatacgactggttggtgagattagagcagcaccatcaccggtaaggcctgctaaactaattatccgtgatgcttcagcagacattattgtccaagattccctttccagtaccatctttagtgcatagatattttgccggtgaaaggccaccgaatagttcaaacagatacccttcaacttttgccggaactcgctcgcttcaaacccacaaaatgcttcaccagccaagataaaaatggtgagatcttcgtagttcttcaaaaattgatacgtgctagttgagaaaacaactgaatcacctaatgattcatctgcactctgggatgtgttgttccttcctgtcagagagttttcgccctcggactcgatactctttactcctgggcaaaagctcattatagtataatatgagcacatcaatgaaaacaaactctgaaaggttcttaataagcagggccggagcttgggctcaggaacttgagcacaaagatcactatatgtaaatctatttctctgcgtattatttccaacctcctcttccaacatttctttcaggacataatgagtctgagagagtacttcttgcaaaaagaaactctgcatcttttcagccatgccaccgatgtcacccatcagcgcataggcatcaataacagttagatagctttcctcatggaaggtctgacaaacccctagtaaatgggtgtctaatttttggattgttcgtgccaaccatgcctcaatcccacgccccatttcttgtacagaagaaaggcctgaatagttctccaagatttgcaaatattcaggcaataattgaaacgcctgaaaatagttttctttctccacaaaactttcaagttccatctgcatgtcttgtgcattacgaagttctgtaagaattggaagaacatccagcaaagcttgtttcttctttgattttacattgacaaccagatccctcgatacctcattctttgaagaggatacatgcctccgtccattcatgcagatcacatttgcaacctttaaatcttgttctaactccatcactaactgcatccccttcactggccaaaacttattatcagtgatctgggatttccttaaaaggaaatcagtatagatgcatttttggtagcataacacagaacatgttattttaggaaaattgagaaaaatacttataacaggtatgtccatttcttcatgatgacccataacatgatgtgatagtcgttctgcaattttgtcgagctgcgctaatctcaaagtagactgcttatcgaaatagctggaatcaccctctgcagggatactttgcagaatgtactttattgggtcgaactcctcctgaaagaacacctcctcgagctcatccacggcatgcccctgcgggttgctcccgtagatggagaccaagtcctccgaattcgaaggcaggctgatcttctcgtgcggtggcagcccagcgatcgcacgtgcggccgccgctgccgccgcagctctagctggaacctctatcggatccaacacagggtacaccgagtgagagattgacgaaggtggaggagggaggaagtgattagggacctcggggcgggaggcgggcggcggtggggtgggagggaggaggccgagggagcgcgcggagcggacggagctgaggagcttctcgccgacgcgggagaggtccatgccgccgccctggatcaggagcaggggcaggaagacgagcggcccaggcgcggacccgaacagctcgccgccgccgtctccgccgccgaagagcgaggggggtgacgatgccgatgacgaggaggaggcggcgggcgcgtcgcctcgcatctcagcggcagcgcagccggtggccgccggtgggcccctcggcgcagcggcgggggaccatgggagggaggggaggggtggaagctcccagatccggggggcggggggaggctagggctcgcgcg

SEQ ID NO: 54330 - DNA, 345 bp, Oryza sativa
  Clone ID: PAT_MRT4530_56445C.1
atgaacgggggaagcccggtgatgacggagagagagcggcgcgcgtaccggtacgggcaggcgtcgtcgccgacggcgcgggcggtcgggcagctggggtgcatcaggaagtcgtggtccaacgactcgctctcgagctacggcggcggcgggagggccggcggcggcggcgcccaggcgtgcgtgtgcgcgcccaccacgcacccgggctccttccggtgcaagcaccaccgccaaaacgcctccaacctcggcgccgccgccgcggcgccggcccaggtggtcgacgttgacgcggacgccaagcaccaggaggcccaggagcaggaggagaaggcgacgtga

SEQ ID NO: 54331 - DNA, 534 bp, Oryza sativa
  Clone ID: PAT_MRT4530_56446C.1
gcacgaggtttagactgaaagaatgtatgaacatgaaaggctttaattaccctctattagcttcacctaggttttgaaatcacatgatttttattgctagcttgacctcattcagttgtatgtgaaccaaaactatgataatatcaaggaaaggagctgatacttcttgctagaaaatgcactatcttgtctatgtaacatatatgatatttcaaaatgttcttttttcttgtctatgatattacaatattggtttgaagaattagtattttttggaccactggaatcagcaattgtcttttacagtgttcattagcagttacaatgcttaagcagcacctctagatcctgggtttgacttcccagtcctcgctggagcgaattttaggcctagttagaaaaggtcacttgttggcccctcataaaacacgtgttaagaatcgacatatggagggcgggtcctcgtgtagggggcaggggcctcaaagcatgggttaaggaccaacccatagggggcgagtccacgtggggggc

SEQ ID NO: 54332 - DNA, 762 bp, Oryza sativa
  Clone ID: PAT_MRT4530_56447C.1
ttttttttttttttttcctttttgcgtcttccttccaatctcgaccatccgtttctcgatcgcacggtcgatccggggccaaaatccctaggcgtaacgctcggtgcatctgcagctgtctcgtgttccaccgggcacgtcgcgctctctcgctcccgacgcgacaacatgctcgcctccgccgccgagttcacggacaacccggcggcgacagccacggtggcggcgcgacacggcgtcgacggcggcggcagcagggtggtcgtgccgctgttcctggtcaccgtgtccctgttcttcgtcacgtaccagctcttcggcgtggccgcggcggccggcgccatggtgctcgacgtctgcgccgtcgccctcgccgcgctcaatgtcacggtcacccgcgcgcgccgcttccccttcctgcgcctgtcgctcggcggggaggaaggccatggtggtggtggtggcgccggcggtggtgacgtggcgccggcggcggccgggatggacgcggcggcgatcatggcgctcccggcggccttcgggtacaagcgggagcagacggcggcggcggcggggggatgggcgcagtgctcgatatgcctcggcctggcgcgcgtcggcgaggccgtgcggcggctgccgtcgtgcgggcacctgttccacgccggctgcgtcgacgagtggctgcgcgcgcacgcgacgtgcccgctgtgccgcgccgccgtgtgcgccgccgggccggagccggagctgcccgtgtga

SEQ ID NO: 54333 - DNA, 462 bp, Oryza sativa
  unsure (1)..(462): unsure at all n locations
  Clone ID: PAT_MRT4530_56448C.1
tctcgtcacctgggacgactacaacgccaaactcagatccctgggcatcctcgtcaaggctcgcaatttcctcgtcttccagggtgatgtggaatccattgcctccaagaatcccaaggagctcaccgcacttctggagcagatctctggctctgacgagctcaggagagaatatgacgagctggaggaccaaaaaaaacagggccgaagagaagtctgcgcttatttttcaagagaaaaggaccatcgtcatggaaaggaagcagaaaaaggctcaaaaggaagaggcagagaatcatctacgcctccagcaggacttgaaactagccaagacagaacatctcctatggcaactctacaccattgaaaaagatgcagaganaatagaagtgaacttgaggaggataggcggtctcttcagcaagtgctggaggagaaccagtcctctgatatgagctttct

SEQ ID NO: 54334 - DNA, 165 bp, Oryza sativa
  Clone ID: PAT_MRT4530_56449C.1
tcgtggagatctgtctcctggtcaacagcctgtgtcttccctggaattggctttgtggtccttacaaccaagggtgcggtcggggtggcgcgcgccgacactggcgtcgcaaaacgccgacgttgcaaggatggtccggtcacccggccggcgcgacctagggtg

SEQ ID NO: 54335 - DNA, 498 bp, Oryza sativa
  Clone ID: PAT_MRT4530_5644C.1
atgtttttgactggattcaaaaagttagagaagcatccatacatgatttttggacatattggagtgtattgggtgcgttcgtggcaaaaactcacttcgtgattcgcgcggggaacttttgtcaattaatgccaatcttggcatatgatgagaccccacgggtgcgatgtttttgaccggaatgaaaaagttcaaaaagcaccaaaacatgatttcaggacatattggggtgtattgggtgcgttcgtggcaaaaactcacttcgtgattcgcgcggcgaacttttgtcaattaatgccaatattagcccccacgggtgcgatgtattttgaccggaataaaaaagttcaaaaagcaccaaaacatgatttttggacatattggagtgtattgggtgcgttcgttgctaaaactcccttcgtgattcgcgcgacgaacttttgtcaattaatgccaatattggcatatgttgagcccccacgggtacgatgtttttga

SEQ ID NO: 54336 - DNA, 370 bp, Oryza sativa
  Clone ID: PAT_MRT4530_56450C.1
cgccccggaagaaccggggcgacccacgacgccggcttgtgtcacagcggagccgggcacgcgcccagagggccgttattagaaaaccgggggccggtaccacacccacccgacgccgggaagagcgccgacctggccctcaccagggaggagggggaaagagaaagacagagaaaagacgaccccacacaggacgacaagggtacgacaaggccagcggaaaatgcaggggaagcagctaccccgggacctaccacgagaagaagagccaggccaactgaggccacgccccccagagacggcaccatggcccaagaggaaggacgaagccaaccgggaaccaggaggagcatgaggaagagtccggcgg

SEQ ID NO: 54337 - DNA, 472 bp, Oryza sativa
  unsure (1)..(472): unsure at all n locations
  Clone ID: PAT_MRT4530_56451C.1
cgagtaccaccagccgacggccatcggctctccgacgaccacaaggcggtggccgtgttctgcggcctggtaaacaaggtcgccgtggccaggcccggcgacagcactggaagtgggtctacgtcccgcacttccacctggagtcggccgcgtcgctcgccggctgcttctacgccgtctcgcacgtctacatctaccagctcgagagcgacggcgcgcgcggggagccgaagctggtgcccgtggcgtacgtgcccgtggacgccccctcgttccgcctcacgctggtggcggacgacgagagggagaggctgatgctgatgaaggaggtgttctacgtgcacgcgggcgaggaggtgccaccggaagggcccgacatgctgacgatgcccagggtgtgcgtcgcgtacgggtgggacatggcggcgagggacgatcgcgctgtcgangctgggcgcgngcgcgctgtttc

SEQ ID NO: 54338 - DNA, 616 bp, Oryza sativa
  Clone ID: PAT_MRT4530_56452C.1
ctctcctcctcttgacgctgatcctcctctccggcctcggattcttgccccgccatgccgacgccgcgaggggctacgtcaccgtctccacatccagcttcgcggtgagctccacctgcgccgacgaactccctggacgaggtacgtagttagtagtagtagacagcgagcgagcggggagatcgaactgttgcttctggtttttggggccggattgtgatgaaagattgggattcgttgcgagtttcagctgcctcgccgcggaacggcacgtcggcggtgctgcggctgacgcaccggcacgggccgtgcgccccggcggggaaggcgtcggcgctgggatcgccgccgtcgttcctcgacacgctgcgcgcggaccagcggcgggcggagtacatacagaggagggtgtcgggggccgccgccgccgcgccggggatgcagctggcgggatccaaggcggcgacggtgccggctaacctggggttctccatcggcacgctgcagtacgtggtgacggtgagcctcggcacgccggcggtggcgcagacgttggaggtggacaccggcagcgacgtgtcgtgggtgcagtgcaagccgtgcccctcgccgccgt

SEQ ID NO: 54339 - DNA, 1100 bp, Oryza sativa
  Clone ID: PAT_MRT4530_56453C.1
ctttctctgaaacccaaccacaaaaaaaggccaaaaacccaacaagatcgaccatggaaggccaccctcttcttcaccacctccagcagcccaccctcgcttacacgtgggacccacagctcgcgccgttcgaccacgtcgccggcgccggcgaccaggtggccttctccacggcgttggagctccggcaggcgctgctccgggcgctggccgagctggacgcggcgcgcgcggcgcaccaggcggagctccggcggatggagtccgaggcggggcgcctcgccgcgctcgtcgcgtccgccgccgacgagcgcgacgagctccggcggcactgccactccctcctgctcctgctgcaccaccagagccagcccgccgcgccgccgacgccgacgccgcaggtcagcagcctccccgccgcgcacgtcgtcgccgtcccggccgtggcggacgagctggcggcgctcgacgccgccgacgaggcggagctggaaatggcgctggcgcggcggctgccggagaagggccggctagtggaggccgtcgtgtcggcggggccgctgctccagacactcctcctcgccggcccgctcccccggtggcgccacccgccgccgcccgcgccggccgacatcccgccgttcaacccgaccaaggccgccgacgccgacaacaactccttctcctcggcgtcggccacgtcgtcctcgccggagagcaactgcagcggcggcggcgggcacgcgccgctggtgtccccggcgctgccctaccacatgatccccttctgcatgtagcggcgtcgccgactcgccgccgtcgtcgtgggtgaaggtgcatgctagctcccgtgcctcctgggcgggcacatgcgcgccaccattcgatcgccaccaacggcttaatcgtgtcattagtgctaagcttaattacgaataagtaagcagcagctagtcattacataaataaattaaggcttggttttgattagtaggggtgattagtggggcgattataattagcttagtgattagaagtgggcagagattgggacatgcgagacaaagaattacatgaatgccactacctacactagtatc

SEQ ID NO: 54340 - DNA, 594 bp, Oryza sativa
  Clone ID: PAT_MRT4530_56454C.1
atgcagcgcgaccgtgagagcgaggcgacggggttgcaagccttgcaggaggtttggcagagattcgcgtcgtgtgaggggatggggaggagactggggcggaggagaggtgcgcctctgctgccgtcggatgcaattaagctacacgatttgtataggtgcttcaagatctttgcattatacattataggaagcaaatcaaacccaatggtctgttgcaatgctgctctactcttgttagatgtttttgttttcgatcaagttcatgtcttctgtaaacattcttgcatcctttgctactgtttacatcatggaaaggtagtcattgtcgagcacgttctggctactctagggataggcggcatggggcttctgcttgtccttgttgggcctgatagtgtcgccgttctggctgacaatgagttcagtgcgattaacatgggcgtcgatgacagcgaaccagacaatgagttcagtgcgattaacatgggcgtcgatgacagcggtggttcggacatcttcggctttgtacctgcttggcttgatggcatcatcgttcttatcgatgagatagcgtcggcagcggccgcgtaa

SEQ ID NO: 54341 - DNA, 176 bp, Oryza sativa
  unsure (1)..(176): unsure at all n locations
  Clone ID: PAT_MRT4530_56455C.1
ccnatcatatatttttatcacaaaaccttatcaataattgtaatannaaaatcattatcataagtgaatacagctatgcttcagttactccatatatccttcgtataacttcctaactttcttcaccatctctttggtagcataaacattttaacttgtccatcgctctaaagctt

SEQ ID NO: 54342 - DNA, 187 bp, Oryza sativa
  Clone ID: PAT_MRT4530_56456C.1
catttataaaaaaaaatttgaccaaattacctcctcaatcgtccactgcggcacattggacgagctacgtgacacgctggccgtcatgcggcggaatctcaccacttgcgtcactggaggtcgagaggccagcgggcttgatagggattggaccggaatgaatggttacatgacgaagggagtggag

SEQ ID NO: 54343 - DNA, 666 bp, Oryza sativa
  Clone ID: PAT_MRT4530_56457C.1
atgggagcagcatctccgcgagctcgctcgcgtttccaatggcagacgccccgcggccaccatcgcctcctcctcgtggaaagaaatcatcagagctcgtctccgacaagaaaccctcaccgcctactcctccagcctccgtcccgcctgcccctggccctgcccgctcggggccttcacctagtcgagctccggcccgggacgaagcctccacgatccaggtccacgcccgcctcgccaattcgggctttctcctcctgcgcctacgctacgagctggcgccgaactcgcgagctcctccgcctcggggtcgcgcgcagggtgttcgacgaaatgccgaagcggaccgtcgcccgcttcaacgccctcttcgctgggctcgcgcagcgcggggaagctgatgaggcgaggcgcgagtctgagtcccctccgggaagaagggttgccagccccagagctctgtcatggctgcctgccttacttatgcggtggaatgatgagcacaccatgcccttggatactgttggagaaatgatatttgggttcagtgaagaacctaatgggaatgatttcgctggtgttgtcagcatgcacaagtttgtcagcattgtcacttggttaattctgtcggcagagattggcaactccatctgtgtgatgttctga

SEQ ID NO: 54344 - DNA, 820 bp, Oryza sativa
  Clone ID: PAT_MRT4530_56458C.1
gttgtacgagggcaagcacagggccgagacggaacgcgtcaaggccgccgccgccgccgcgctcgccgcctcctcggctagcgacgatgacatcaccgtggtcaccgtcaccgaggacgacaacgacaacaaggcgccgctgctgcaacctcactcgcactcacacagccacccccatgggcatgggcatggccacgagttggcgcaaccggagggcagtggcggtgagggggaggtgccggcgcaagtgcggtccgtcgtggtgtcgcagatacttgagatggggatcgtgtcgcactcggtgatcatcggattgtcgctcggggtgtcacggagcccctgcacgatcaggccgttggtggcggcgctctcgttccaccagttctttgaggggttcgcgcttggcggatgcattgctcaggtccctctggtattaccatacgactatatgtctcgtagtctaggtaatctaagtctccaagcttcaaattggctgtcactctccatagcaaccgcacaattcaagacactatcagcagctataatggcatgtttcttcgccatcacaacaccagctgggatcgcagctggtgccggtgtggcgtcattctacaacgccaatagcccacgggctctagtggtggagggcatcctcgactccgtgtcggccggcatcctaatatacatgtcgctggttgatctcatcgccgcggacttccttggcgggaaaatgacaggatcgacacggcagcaggtgatggcatacattgcactgttcctcggcgctctctccatgtcatcccttgcaatctgggcctga

SEQ ID NO: 54345 - DNA, 463 bp, Oryza sativa
  Clone ID: PAT_MRT4530_56459C.1
ctaccatccggggcgagatcccctctccggcacgctgcgaggacaaaggaagtcgtagccgaaggagatgggaagcgccatcattgcattgatggaagacatggagcttccgcctccatcaccgttgatagaggatgaggcagtgtcgatgccattgttgtcgagtaagaccaccaccgaccaccattgccgccaagtgcaagggaggataggggaggaagtgtccttcttgttgctcatgttcgacaaatttgaaaccccaagatcctcggctattggatttggcattgatcgagcttggcgtcatcatctccaggtaccaggtctagtactgataggtaccacgcctagtaccatcgggtatcgaccagactgcgtagcagcaaatagctatgcgagaagtaccggtaactccttgcgattcgatcagttggagaacgatctcatgggatgcggtgattga

SEQ ID NO: 54346 - DNA, 487 bp, Oryza sativa
  Clone ID: PAT_MRT4530_5645C.1
atgtttttgaccggaataaaaaagttcaaaaagcaccaaaacatgatttttggacatattgtagtgtattgggtgcgttcgtcgcaaaaactcacttcgtgattcgcgcggcgaacttttgtcaattaatgctaatattggcccacacgggtgcgatgtttttgaccggaatgaaaaagttcaaaaagcaccaaaacatgattgttggacatattggagtgtattgggtgcgttcgtggcaaaaacacacttcgtgattcgcgcggcgaacttatgtcaattaatgctaatattggcccacacgggtgcgatgtttttgaccggaatgaaaaagttgaaaaagcaccaaaacatgattcttggacatattgtagtttattgggtgcgttcgtggcaaaaactcacttcgtgattcgcgcggcgaacatttcttaactagtgccaatattggcatatattggctcacacgggtgcgatgttcttggcc

SEQ ID NO: 54347 - DNA, 448 bp, Oryza sativa
  Clone ID: PAT_MRT4530_56460C.1
gctcgcgatccaagaagcgccaaaggaggaagaagactcctctctcttctcctcccttggctgcaattgcaatactgcaatacagcaaatccatatccagagaagcggttgaattccaggagccgtgtttgcgcagagaacgcatgctgcttctggaatcgtttcctgcctacttttcttctcctcccgtttggctgggcgccgctgctctctccgcctcagctcctcctcctcctcctcgtcgctctcttccctgtcgcggctgttgcgttttgccagttagagcccgactgcgtcggagccgtggcggggattgttgttgccggtgccaaaaatctgatcttggcgaaggttttcgggtggaaagcatgggttctcgctaactgccactctaaaagccgtcggcactcctgaagcatgagaggcctacccttcattcacagcgctt

SEQ ID NO: 54348 - DNA, 213 bp, Oryza sativa
  Clone ID: PAT_MRT4530_56461C.1
atggcgaagacggtcggcgcaaaagtcaatgtagatcaacagccaaggaagagctcggcgggcttgatgaccccgatttggcaatgtctgtcgtcgactcctccacaggcacctggatctaggccatccttcgcaagtggcagatgggggagtggcggtagtggcgctggcggtgcagtggaggtagtggcgctggtagtgcaggagagttag

SEQ ID NO: 54349 - DNA, 558 bp, Oryza sativa
  unsure (1)..(558): unsure at all n locations
  Clone ID: PAT_MRT4530_56462C.1
gggggccaaaaaaaaccctggcctgcgcacgctcanactccaccacgtggccactcccgcacggctgatcagcgtcatcctcaagccgcgcccgtgctcgagacccttgtttttttttactgcatgaaatacccatttgttgtttgttggggcccccacnncannaacctcctctttanattctctctggagcagctttacgtcacggtgaaaatggcgggtctgatgacgatcacgctgtacactctccccaaggtgcagtcggttcggctgcatccttcaccggaaatctttaaggcatacctccacgtggcgcggccgctcgtcaaacttttttttttgatacggccgttctttcatgcttgcacggtttttacctgcctcacgctcaagggcttggccttcangttgttggtcctctgcatataaaaaacactccaaccttccctgcttcctttttaaaactttttaatacctttcctcggccttggatttccttcttttaaaaaaacctcatcttccttcttctccctccttgggtatttcccccacccctct

SEQ ID NO: 54350 - DNA, 3415 bp, Oryza sativa
  Clone ID: PAT_MRT4530_56463C.1
atggccattggaggtaagcaactggctgtgttcggcggcctgtgttctcaactcctatccttcgtgttccacgcgcatacgaggcgagacgaagacgaagaggaagagcaagagctagggttaggaggaggcgatttgctccgcccgcagatcgggggcgccacctcgtctcgcccccgatctcgcaccgcccgccgcctccacctctgccgcgccgaatctctcagttggagccgccgccgccgccgccgtgggccggtggtcggtgcgccgcaaatcgcgccgctgccgtggccgtcgggctcccacccgcagatccagcatccaggaatcgtgcggctggggacggcgctccgcgggaccagggcggccagggtcgccgtcgccagggcgattgtcatgatgacaagcgacaacggaaaggctccagagaaggatggagagccttctggacctccgtcggctcctcaagaaggagaaatcagcaatgaaccaaaaaggcgacgacctctcaatgggtaaaaggctaaaagctcttttgactatcgtaatgaggaccaccggtccgacacggcgttccaccaaaggaaattggacccctgaagaggatgccatattgtccagagctgttcagacatacaacgggaagaactggaaaaaaatagcggaatgctttccggatagaaccgatgtacaatgcttgcacaggtggcaaaaggttctaaaccctgaattagtcaaagggccatggtccaaagaagaagatgaaatcattgttcagatggtaaacaaacttggaccaaagaaatggtcaaccattgctcaagctttgcctggacgtataggaaagcaatgtcgagaacggtggtacaaccatcttaaccctggcataaacaaggaggcatggacacaagaagaggaaattaccctcatacatgctcatcgaatgtatggaaataaatgggccgagctgacaaaatttttaccaggaaggacggacaattcaattaaaaatcactggaacagttcagtaaagaagaaagtcaattcatacatgtcatcaggtttacttacccaagtttcgtgtctccctctaaatgaatattctgcaaattgtaattcctcaccagcgatgacccaacaaaacagtgaagatagtggttgttttgctgtccgagaggttgaaaattcatcagggtgtagtcaatcatcacttgccaaggtttcttgctcccaagtgcatgatactactgtgccattgggctgtgatttgcaagtaaacgcgaattttgacaagaatgaagcacatgattctcaatcttccatgggtccccaagcatgctatacttctgcggaggctgttgcatctgctttgcctgctgtgcattgccatgtttcttcctctaacttggatccagatcaacacttgcaagaggactttgctcaaggactgaatttggacatgactatagatgaaatgccaactgttcctagttttgcagacaaccagactgtttgtagtatagaaaatcatgaaagatctctggagccatatgatgtagcaatggaggtgcctctctctatgttatcaagtgattctggagctgagcaaaaactacatttcatgtctgaggctgacttcaacagtcctaactgtctgaaatctgaactctggcaggatatttccttacagggccttctttctggacctgatgcagttgaagctgattcaatttcaagatcaaatcaccaatcggatgtatattcctctgaagcagatacccattttttagcaccaccctacatgccacagacatcaaattcttcaagtgtgatggggcttgctgatgaccagagtccacagatgtcagtacctccatctcttatttgttcaaatgctatgactgatgatgcacctttcgataatagaccagggcggaaggaaatgccactttctcaggcagaagtggttacccaatcttccagttcttctggtgatgctgaaatgtttgctaaccctggttgtagcaatgacagacatgttccttcttcaacgatggaaagcatacctgaatgtggggaccaacaggttactaatgcggaagaacctgaagccagtctagagaaagaaccatcgcttacacagagtgtgactgcaccagatgaacaggacaagggagccctcttctacgaacctcctcgttttccaagcctggatgttccatttgtcagttgcgatcttgtaacctctggtgatctccaagagtttagtccccttggcattcggcagttaatgcattcaaccatgaatgtctgcacgccaatgagattgtggggctcccctactcatgatgaaagcacgggcgttttgctgaagagtgctgccaaaagcttcatatgcacgccatcaatactgaagaaacgtcacagagatctcttgtctcctattccagataaaagaatcgagaagaaatatgggactgaaaaggatcgtggggtatcagacacatcctccaccggcattcaaacaagttgtatcaatgccactaaagatgatgcacttataactacagttttgcgtattgagcgatctgcttcttctaaatctctggaaaagaaacttgttttctctgatgaaaacaaggaaaatttgggctacacaactgaacagacaaaagatggacagagtgctggaaatgacgaacacatggacgagcagacaacaggggaacgcagttctgcaacaaatgtagctactaatgatgacctgtcaggcaatttacaacctgcaggtattcttattgaacacagcggcgatgatcccatttccccagattatggcaaaaataccatgaatcagaagctgaacacaaatgtgaaatctttatcagtctgtaaggagggagtgtgtgctaaatcaaagcccactgaactcatcgtggagaaatcttcaccatgtataaatgtggattatgaatatgtgaacatattggctgataccccaggtatcaaaagaggactagaatctccttcagcatggaagtccccttggttcgtcgatatgcattttcagggttcatacttcaccagcccagctgatagttacgacgcactaggattgatgaagcagataaatgtgcagactgctgctgctttggtggaagcccgtgaggtactggcaagcggcggccaatgtgacaacataagctctgataaggaaaacacggggaatccagatgccaagaaggaaccagggacaaccaaattgcaaacaaaaatcatggcagagggtagagtcctggatttcgagtgtaccacacctgaaagatcatcagacaaaaatgctggcagcaatctgggaagatatctgagctcacctattccttcgtcccatcttctgaaaagttttagatag

SEQ ID NO: 54351 - DNA, 2274 bp, Oryza sativa
  Clone ID: PAT_MRT4530_56464C.1
atggatattttccgcgtcgttgagtctatccttacgaagatgtgcagtgtgattgaccaagattgggagctgggaggcaaattgaagaatgatctgatatgcatcaaggaagaaatgggcatgatgaatgccagcatcgagcaatgggaggggaacatccaagggccggtgcagcagcaatgggtgcatcagcttcaagacttggcgtatgatatcgaagacttcattgatggccaccggattggacctcaagagccgaatcacttcatgcctcgtgctgcgcgcatgatttttgggacggatcgacgtcctcagcaagtcctggacgtgaagatcttgaaggaacgtgtggccatcttacagaagtggcaacaaacgtttggatctactcaagccgtcggcggtgcaggcaacggtagcccaccatccggtggcttcggaggctgtgaggctgatgagcagcttgtgggcatcgacaacgccaaaagggagctcctatcgctgctatcggcagccgaatcccagccagatcagcaaaacaagctgaaggttatatccatcctgggaagtaacgggatcggaaagactaccctcgcccgaagagtgtacgacgagggcgatatcgtcgagcaattccatcgccgtgcttgggttgcgtcctgggcgtgtgaagactcggctagcctcctgaaggagatagtcaggcaacttacaagcgaggaagacggtgcgcagggatcaactagttctaccgagcaggccggtggtgccggtgcccccaatgttcgaaatctccgacaagatgtcgcggcacacctgcaatctcacagccagatccagttgaatgaggaggatgcagaggatcgtttcaaggaatttattgaccggaacataattgaagcagttgacattggcaacgaattggaagctaagcactggcgagttcatgtaatggccgtgtgttacgtcgactttccatttacaatagaactgctaaagacacaacaactgcagagaaaatggaagtttctcgtgaggtctctgacaatacgcaatagcagcgttccgaacttgaaagaatacaagtcactgagagtactggatcttgaagaatgcaatggcatcgatcaaagggttgtcaagaaccacatatgtgagttgctctttctgaagtacctgagcctcaggggcactggtgttcgccttattccgagcaaaataaaaaggctacggtatttggagacgctagacctgcgggagacagaagtggaaatgttgcccctggaggtccttaagctgccacgtttggcccacctgtttggtagtaagctcgagatgcctcaggagctctctaacgatgcagacctcgacctgcagaggtttttccaacacgaatctgaactgcaggttctggcagggtttgtcatggaggataacaaggcgtttgtacatgtgattcgtcacatgagcaagcttaaaaaggtcaagatatggcgcaaagccaacgctgctcctgccaaggacctaactgaacatttagtcgtctgcattcagaggcgtttacagggcagcagaccccttgaatccttgtcaattgacttcggcgatctctccatagacttccttggtgatctggcgccgccctgtgccctcgagtccctcaagttgcgaggggctatgagcagcttgcctgccttcttcacatcaccggagaatcaactaagggagctgcacctttggtcaactggattgagcggggaagccctctctgccctacaaaacctgccttaccttgtctatctgacgctaaaagaggaccgtcgtggattttggagcgacacctttgctgtgcagagcggcggattcccaagtcttcggcggctgcgctttcaggccgccatgcttccaaaaggccagcccaggttcggccaagacgcgttgagtgctcactcgtccgtcgacatcgcaatggaggatgcagagttcacaccaagattgttgagtgacttcgacctcgacctcactggtgaccaggagatgcaagcctaccggatgctcaaggactggatttgttggaggatgaggaccactgggtttgccatcaagtttgggcgaagccaggtagtgaagaccgaggtggtgatagccctcgagatcactgaagtcctccctgtccggaccagggatgagacgtttcccgaagcgtggaaacgtctgcaggagtatggagccgcctgtcctcatcatgggatggatgactggctcatcctgtag

SEQ ID NO: 54352 - DNA, 291 bp, Oryza sativa
  unsure (1)..(291): unsure at all n locations
  Clone ID: PAT_MRT4530_56465C.1
gcgcgtacatcctcgtctgcggcactttcaactgcgcctccatgaaccctgccgacttcttctgcaagtccattgtgagctggggctagtctttcgatgcactgngctgattataccaactcatctgacataaccttaacaataacatttacaagttgcattacaaatgttactctcacgatcttnnncncaacatttacatctcagttcttgatctactactccgctggttcatgaactcatcctaatctactgcgttcctaccgtttacaggttcaattgagcatcata

SEQ ID NO: 54353 - DNA, 1215 bp, Oryza sativa
  Clone ID: PAT_MRT4530_56466C.1
ttaatttggaccacgttcttgaattctctcttccccatcttgagggcaaggccaacgggaagaagggcagcacgcggttttgccgagcaacagcatgtccttctgctcccgcgcgagcatccgctccagcaccatcttcgtgtttgagccaaaagtgctggcacaccctgcaatcccctcgcttcctccaccgcaaccctcactatttgcggcctccgccttgtccacaccctcctcatcatcactccccacaacccgcttcaagtcgtgctgctgggcaagtgcatcgctcgtggcggcgtgctgcgtgaggcctagctcgacatcatcgtcgccgcccagtttctcttccacaggccgccgcctgcaacggttctccgcgtcggtcgtcgccactttctccacctcccggcggtggcctcctcctcgccgccgtctcctcccgccggcggcgccggcgacggacacgggcacgggcacggacacgccgcacaccgcgacggcgtgcctccccagcatccgcaccccggcgcctcctgatggcgccttcttggccgggctccgcggcggcgccgccgcggggttcgcgttcttggcggcgctcgtcgtcttgtggtggtggcggcggcggtgttcgctcttcgcgtcgtcgcactcgccgccggcggcggcggcgatggacacgggcacgggcacggacacgccgcacaccgcgacggcgtgtctccccagcatccgcaccccggcgcctcctgatggcgccttcttggccgggctccgcggcggcgccgccgcggggttcgcgttcttggcggcgctcgtcgtcttatggtggtggtggtggtggcggcggcggtgttcgctcttcgcgtcgtcggactcggcctcagcggcctctttcttggccgccgccgccgcgttgtgcctgaggatgaggccctcgagctcccggcggatgcagtccacctcgtacgcgtcgagcagcgtcgtcggcttcttggccctcctcaccgacgacgccaccgacgacgacgacgtccgcgacaccgccaccgcgccgggcggcagccgctgcttcttctcctcctcctcctcctccatgtcggcgaacgcgtcgaggagtgtcttcagcgtcgtcttcgccggcggcggcggcggcggcgccaccacagcggcgggcagcagctgctgctgcttcttgatcggctcctccat

SEQ ID NO: 54354 - DNA, 546 bp, Oryza sativa
  Clone ID: PAT_MRT4530_56467C.1
atgtggcacctacgtggctgccacgcgggccggcgggaggtagacaacgacgtcggccggaacggacggcggacggcggctgcgaacggcggggcgaaccacggcgatacaggcgaaagcgagcacaccgggtggttgcatgagacgaggggagacgagccaacggctcggattcgccggagggagttcgacggcggcggattgcggcggcggcatccggcggcgagagaagagggaaacggcgacggcgcgacgggagatcaattcgggcgagctagagcatcaacgcgactccgggaatccattccttgcgccggattaggagggaacgcaccgagggaggccggcgacgagaggcgctaccgagctcgggcggcccgggctcaggcgcggcagagggctgactgcggcggcgactggccggttggccaccacggcgcgcgcgcgcgggaagcaacgggcggcgcggcgatttgggcggcgtcggcgggaacggcagcgagagcggagagggagggagaggcgctcggcgcggctctcgcgcac

SEQ ID NO: 54355 - DNA, 333 bp, Oryza sativa
  unsure (1)..(333): unsure at all n locations
  Clone ID: PAT_MRT4530_56468C.1
atggcggccactctggttgagataggagtaggaggtggccaggtggatggggtgagggagggtgaggggaagggggaggaggagganttcactgaccttagagggatggctatggtaggcggcgtcctggcattggtcagtggaattgggtcgccagtggggcggtgggccaatgttatcggcaggggcaaagcggagggagtggttaggaggcgatggatggtggtggcggatcccaacgatggggagccaccagtgatgggaaagacgcaacgtgatgggatggtggcagcaaaggagtacgaggaatcggtggatcagagacggtgttga

SEQ ID NO: 54356 - DNA, 1096 bp, Oryza sativa
  Clone ID: PAT_MRT4530_56469C.1
acggctcgcggtggaccgcgcgcgtgagcggggccagagggagcagctgactggggtcggctcgacccggtcttggccgagctagtgccgacgtggcgcctacgtggctgccacgcggtccagcgggaggtaaacgacgatgtcggctgcgaacggcggggcgaaccacggcgatacaggcgaaagcgagcacaccgggtggttgcacgagacgaggggagacgagccaacggcttggattcgccggagggagttcgacggcggcggattgcggcggcggcatccggcggtgagagaagagggaaacggcgacagcgtgacgggagatcaattcggtgatctctccggcctcgggccagggaagcggaggaagacgatgcgcccgaagtccccttcacgcgtccttcgcacgctccggctctcccggtgcttggcgatgaacggcggaggcgagacagaggggcggcaatggcgcggtggtggcgagcgaaacgggaggaggaatcgatgggagggcggtgtgacgccggcgggagagaaaagggaaaaaggaggagagaaaggggggctttcctcttgcctctttaggaaaaggaggagggagagagggctacgcggcagagggaggaggagctctgcctccatcccttggaagctagcgcgcggagtggcggggccgactcgtgacgacggcgatgacggcgggggcggtttggaacggagcggcgacacgggcggcaggcgcgggctcaggcgcggtagagggctgacggtggtggcgactggccgatcggccaccacagtgcgcgcgcgcgggaagcaatgggcagcgcggctatttgggcggcgtcggcgggaacggcagcgagagcggagagggagggagaggcgctcggcgcggctcacgcgcacacgcgtgcggcgcacgggcagagcgagggaggggagagagagagacagagagagagatgggccgagagggaatcggcccaccgaacctgagggaggcaaaatagacttttcgagaaggattgagattagggatttgaatttgacgatggattggggatttgagatttggaattggcacggagac

SEQ ID NO: 54357 - DNA, 488 bp, Oryza sativa
  Clone ID: PAT_MRT4530_5646C.1
atgtttttgaccggaacgaaaaagttcaaaaaatgccaaaacatgatttttgcacatattctagtgtattgggtgcgttcgtggaaaaaactctcttcgttattcacgcggcgaacttttgtcaattaatgccaatattggcacacgagggtgagatgtttttgaccggaatgaaaaaagttcaaaaaatgtcaaaacatgatttttgcacatattctagtgtattgggtgcgttcgtggcaaaaactcacttcgtgattcgtgcggcgaacttttgtcaattagtgcaaatattagcatatattggtgcgatgttttttgaccagaataaaaaagttcaaaaagcaccaaaatatgatttttggacatattggagtgtattgggtgcgttcgttgctaaaactcccttcgtgattcgcgcgacgaacttttgtcaattaatgccaatattggcatatgttgagcccccacgggtatgatgtttttga

SEQ ID NO: 54358 - DNA, 352 bp, Oryza sativa
  Clone ID: PAT_MRT4530_56470C.1
actgacaaatcatgtctatttatgtgaccctgtgtagtcgaattctcaataagttacgcacgaaaatccgacaaatataatgtacacctgtgtaaaacaacatgcacgaaaagggttacattgacagtatggcctgcactcactcaaatgcacaagtactgttctgaaactactgaaagttttgtaacgcctctctttggggaagcccaggagggcaagaatcagtgcaaataagctgacgattatcagccctctcaggatcttctgcttctcaatcgtgtaaggtgggtacctagcacgcggctcccgtatgaagccgaggatcaagaccgacttcttgtgagtgtaacaa

SEQ ID NO: 54359 - DNA, 2025 bp, Oryza sativa
  Clone ID: PAT_MRT4530_56471C.1
atgcagcgatgtttgaaagagcagaataacatgcacgcggtagaattggggagcactcgggtttctgagttccagagtgcttttgtactgggacgactgataatagatagcgccctagtggcatatgagtgccttcactccattaagaagcaacactgcaagaagcctttctttgctctaaaagtggatatgatgaaagcctatgatcgtgttgagtggtctttcctgcatggatgtcttttgaagctgggcttcgctgatccttggattcaaactgtcatgcgatgtgtcacctctgtaaggtatgcagttaggatcaatggagagctaacgaacccggttactccgtcgaggggtttgagacaaggggatccaatcagcccttatctctttctgctctgcactgaagggctatccagcatccttcaaaagaaggaatcaatgggggtgattcagggcattaggaacggtcgtcttggcccaccaatctcacacctgctctttgcagacgacagcatcttctttgctaggagcgatctgcacagtgttcaaggactgaaagatgcactccaagcatactgcaaggcctcaggacagaaaattaatcttcagaaatcttccatcttctttggccagaactgtcttgaggatataaagaactcggtgaaggagacactccaagtttcggttgagatcctccaagacacgtatctaggcatgccaactgaaattggaagagcgtccactggctcttttcatttcctcccggaaagagtgtggagaagagtgaatggttggaacgataggccgatgtccagggccaggaaggagacgatgctcaaagctgttgcgcaggcgattcccacctatgttatgagctgcttcaagctgcctgtgtcaacttgtgagaaaatgaaatcctgcatccttgaccattggtggggcttcgaggacgggaagaagaaaatgcattggcgttcctgggagtggatgacgacgccgaaatctctgggggggatgggtttcagagacctgggccttttcaaccaagctatgcttgctagacagggttggagaatcgtgactgatcttgtttcgctctgtgctagggttctcaaaggaaggtacttcccgaactctgatctctggaatgctcccaaacccactgccacttccttcacctggcccagtattctctttggaagggatttgcttaggaaaggtgtgaggtggggcattgggaatggctcttcggtaaaaatcctcaaggatcattggataccaggaatcaaaccttcgatggtgagacctctcctccctttgcctgaggatgtcacggtggacttcttagtcaatgatgcgattggggagtgggatgaggataagcatatatgggaggctagaaatcattccaggaataatcctaccttagcaaatccaagacaggtcatccagaaaatcttggcttatgtcgagatgattgaacaacactgttgccgtgctgtgcaagcggttaggggtgatgctcttcggccagtgcccagatggaggcctccgcctgaaggtacgattcttattaatacagatgctgctgtcttccagtcagtcaattcgtttgggttggggtttctatttctggatcacagcgggctgtgcttgttcgctgctaatgagcgacactcggggtgtatccaacctgaaatggcagaagctttggctattcgctgtgcgttgcgcacggcgatggaggagggtcaccagaaaattgttttggctttagactgcctagctatcatccaaaagattcagtctggaacacgcgaccggtcaatggttggcgctcttgtctctgacataaacttcctggcggctggttttttggactgctctttcattcatgttaatcgtgtaactaatgctgcggctcaccttttagctcaatgttctgagcaaacagtttgtaatacctaccgtactgtaatcccggagactcttcgggaggtactgctgtctgatcttaattaa

SEQ ID NO: 54360 - DNA, 113 bp, Oryza sativa
  Clone ID: PAT_MRT4530_56472C.1
gtctccgaggcggaacaattccgcggggagggggctgtttaatccggccgaattctgaaattccccttgagcaatcgggattaggcgtaggaatattgcgcggtaagggttaa

SEQ ID NO: 54361 - DNA, 376 bp, Oryza sativa
  Clone ID: PAT_MRT4530_56473C.1
agttcaaccatgaaacattataagcaacagagaggagaaccacttaagtccggagaggaccaaacacacagatcaattactggcactgagaacaaagcctacattaaacgctccatcgtttcaaccaccaaggggcatgaggaaaccaaacacactatagcggtcatagacgaacccgatgtgctaggactgaagcgaagaagcactaccggcaggacatgagcccgcacacacggtcaggccaagaggataaccgcacacccggcagacgcagtagcccgggccgaaggcttgggggacgaagactaacacggcgaagaggcccaggaaggtcgacctcgccatctggttggagtaccggccgcagacgtgagag

SEQ ID NO: 54362 - DNA, 310 bp, Oryza sativa
  Clone ID: PAT_MRT4530_56474C.1
atctgtaaacacgaatttctaccacttcttttgggacaacataaagtggttaaatacacggtaatacatgtggcatgagccatttgcaattttgcacatataaactgaggtgccgccacggaatacatctggctagagtcattcgaaaagacatgagccatttgcagttttgcagatataaaccctaaggtgtcgcctgccagcagcagactatgggatcagtttttacctcctttggcaaagatagtgtattacagcgagagcattttaaatatttttaataggctgggcttgttagtccaaaggaaac

SEQ ID NO: 54363 - DNA, 390 bp, Oryza sativa
  Clone ID: PAT_MRT4530_56475C.1
gaacttagctactctcagtaacttctgtgagttctcaaaataaagtacagattacatctctattacccatgcgccatggtcaactccaaaaagacacggatattttcatattctcagatccaagtaccttcaaaacgagcacctgaactgcttactaccaaggtaatggaggaaagcatcttccatcaaaaaccatcaactactacatgatcaactcaactcttcataggcagcaaaaagggaatgccaagtcgctaatactttggatgctcatacccatcgttcttggtcttggcctcaagaaacgaggcactcgccttgtccaaaaaccaaaccaacttaccgtccgttggctgaaccattcttgcaggaattcggacgcgtgcggga

SEQ ID NO: 54364 - DNA, 143 bp, Oryza sativa
  Clone ID: PAT_MRT4530_56476C.1
gtcagaccgtgctcatcatgactggtcagactgcgccctacctcggccagatcatgcctcttgtggccggtctaaccatctcactaactgtcggtcagaccaagtaccaggctggccataaatataagaggatgatcaattaa

SEQ ID NO: 54365 - DNA, 620 bp, Oryza sativa
  unsure (1)..(620): unsure at all n locations
  Clone ID: PAT_MRT4530_56477C.1
gaattgtnatacgantcactatagggngaattgggtnccgggnccccccnccaatttttttttttttttttttggtctgaaaactgcgaaaatattttcntatatttacagggtnanaatggncttcncaaatcncaatggttacaantnttcaacacgggtcatgggcattttacctcttcntcntgaacgaatggnatctcctattgaancactatgcaacacttatccttttcttttggantatttacccncnatatgatccttacatcttttactgttgtncagctacaggncaccacgttnctttctcanttctctgaagngcgttcnaacacgctcaagggtgggtncatggtgcgaaaaancatgccaagtctcttcntgccttccgttcaccgctccgancctcgccaactcgccgcggaaaaatgcgangttcacaatccgnacngtggtcggangttcatgaacacctggaaacattaaaatttgctttcattcttccaaatcaaaaacctccatngtncaaagattccaacntattctgccaatcnganccggggatcctattcaaacgccccgcgngancccttntccttatnngtatcaactgntnc

SEQ ID NO: 54366 - DNA, 408 bp, Oryza sativa
  Clone ID: PAT_MRT4530_56478C.1
atggccggcggcgaccagcgcggggattcgccgtcgtcgcacgagctgagcggccggctggaaggcatcctagccgacggtgaggcgccgtgggctcgtcgggcttgcaaggcggccgcgttggaggtcaggctgctcgcgcccatcgcggcgccggccatcgtggtgtacgtgcccaacaacgtgctctccatctcgacgcagatcttctgcggccacctcggcaacctcgagctcgctgcttcgtcgctcggcaacaatggtatccagatcttcgcctacggcctcatggcggcctcattttcccctgccatctcctccgccatcaaggaggcactctggcgcgccaccaacgcgtatgccacgctcgccgagcaagccaccgcccccatcctgcgcaccttctag

SEQ ID NO: 54367 - DNA, 181 bp, Oryza sativa
  Clone ID: PAT_MRT4530_56479C.1
ataaaaagttgaggttgggtcatacagcccagaatgaagtccaagcatggatagaaaatgtaaatactggggctgtatatagaactgtataacaaaagctccacaattaaacacacatagcgaagccagggacgccaagacggaaggggtgggccaccaaaactctcgctccaaagaccac

SEQ ID NO: 54368 - DNA, 513 bp, Oryza sativa
  Clone ID: PAT_MRT4530_5647C.1
atgtttttgaccggattaagtaagtttaaaaagcaccaaaacatgatttttgtacttattggagtgtattgggtgcgttcgtggcaaaaactcactccgtgattcgcacgacgaacttttgtcaattaatgccaatattggcatatattgagccccccacaggtgcgatgttttttgaccggaataaaaaagttcaaaaagcaccaaaacatgatttttggacttattggagtgtattgggtgcgttcgtggcaaaaactcacttcgtgattcgcgcggcgaacttttgtcaattagtgccaatattggtatatattggcctacacaggtgcgctgtttttgaccggaatgaaaaagttcaaaaagcaccaaaacatgatttttggacatattggagtgtattgggtgcgttcgtggcaaaaactcacttcatgattcgcgcggcgaacttttgtcaattaatgccaaaattggcaaaagttgagcccccacggctgcgatgtttttggctgg

SEQ ID NO: 54369 - DNA, 132 bp, Oryza sativa
  Clone ID: PAT_MRT4530_56480C.1
atggtggtggctattactatcatggacattgctgagactgatacacttgttttagggccagtcctaaggcagtgcggtcaggacaactgccatgagctcctaaggccctgcaggctggtagtagtagtatag

SEQ ID NO: 54370 - DNA, 366 bp, Oryza sativa
  Clone ID: PAT_MRT4530_56481C.1
catgatttacatagcatgttcttccattgctctatattaatgggacacttaatccaagggttcgggaaatttctgggtatccagctagttttcagaaggatggtgacatttagtggcatctaaaagctctatttaagttggcacattccctattcttgctagtgttaatgttgcatgagattattgcaagcatttgtttttgtgcacaggcttgggcctttggttatagaataggttttattgtatgcctgtgccatcgccatttcatactacacaaattcccatgtctggtttatcctgcactatataagcaaataaaatgtggcaattgcttgtcgggttcagttataaggtgatccatgatga

SEQ ID NO: 54371 - DNA, 336 bp, Oryza sativa
  Clone ID: PAT_MRT4530_56482C.1
atggctagggcggaaaaaggggcagcggcagcggtggctagggcggcggcagctagggcgcatggcgggagagaggaggcggcaggaaaaagaagtggtgtggtggcttatataggtggaggtgaaattggattagggtggggctggctgttatgcgcgcaaaggagagggggaaggggaggcgcgcgcacgggagatgggaagtggaggagcgcacggctggggagaggagagggattcggaattccggataagggtgggatgcggtgccaaattgagaaagaatgggtaaatagatgtggtgaagttttaggaaaagaaacagaaacggagtag

SEQ ID NO: 54372 - DNA, 365 bp, Oryza sativa
  unsure (1)..(365): unsure at all n locations
  Clone ID: PAT_MRT4530_56483C.1
cacaatttctgcatataccacataaatcctcaggggcacgagctaggagcggctccaattccatccgatgtgccggtgccatctgtagaggatctcgccgatcaggttgcggatgtgctcgatttcttcggattaggatctgtgatgtgcctgggtgttacagctggtgcctatgtcctcactctgtttgcaacgaaataccgggagagggtaataggcttgatgttggtttcccctctatgcanagccccatcatggagtgaatggttgtataataaggtattattaaatttgatctactattacgggactcgaggcttggtcaaggaatgcttgcttcagcgggtacttcaagcaagaaagcc

SEQ ID NO: 54373 - DNA, 242 bp, Oryza sativa
  unsure (1)..(242): unsure at all n locations
  Clone ID: PAT_MRT4530_56484C.1
naccccgtgggcggacgcgtgggccccttacttgaggataaattatgtctaatattcaaactggcgccgagcgtatgccgcatgacctttcccatcttggcttccttgctggtcagattggtcgtcttattaccatttcaactactccggttatcgctggcgactccttcgagatggacgccgttgggctctccgtctttctccattgcgtcgtgggttagtngcacnctgntacacgctcn

SEQ ID NO: 54374 - DNA, 243 bp, Oryza sativa
  Clone ID: PAT_MRT4530_56485C.1
ggcacgagtgcctttttaacagaaaaaggtaagatgatgatgagtgttcattgggacgactgttgcactactaggagtgggattgaaaatgcactgttttattgtgcaatctccgcccaaatgtcgataaatgagtggcgttgttgtgacctggaaggcaaaaggcagagaggcattgcttatactacgcttttgagtctgagttgcactttgtttctcgggtgatggcagcaaacacctgct

SEQ ID NO: 54375 - DNA, 379 bp, Oryza sativa
  Clone ID: PAT_MRT4530_56486C.1
gagcttcaactcactgcagggggtgtcgccgccggtgcggctgttcccgatctacttcccgatcggcaacctggcgacggggttcttcgtcatcttcgcgctgctgccggcgtcgtcggcgtctccacctcgctcaccgcctccacgacgtcagccaggggtaccccgccagcatgatgtccgccgccgccgcctccatcgtcacctggaccctcaccctcctcgccatggggctggcgtgcaaggagatcagcatcggctggaggccaccgagcctgcgagcgctggagacgttcaccatcatcttggccgggacgcagctgctgtgcgccgggtcgctgcacgccggagcacacgtagccatcatacagaatccgat

SEQ ID NO: 54376 - DNA, 165 bp, Oryza sativa
  Clone ID: PAT_MRT4530_56487C.1
atgtgggacagaccgggggtcccgacggacaacgtggctagccggatcccaacggagaagatgccagaggacacgagagtggagacgtgcagccacccgatggtgcaggtggatggtgatggggcctgtggagagagctcgacggaggtggcccagcggtgctga

SEQ ID NO: 54377 - DNA, 231 bp, Oryza sativa
  Clone ID: PAT_MRT4530_56488C.1
atggcaatgcaggaaaagatgatctcccaaatgactagcgggattagggtgcgcggggtccatgctctccagatcattaagggatacgagttggttgatcagatccactgcgagattgtttatcggtttccgaataaaaagattgcagataagttccattggtccttcaaagaaaaggaaaaggaatggatggccaggtggttcttttcgctacctgtaatgactggctga

SEQ ID NO: 54378 - DNA, 581 bp, Oryza sativa
  unsure (1)..(581): unsure at all n locations
  Clone ID: PAT_MRT4530_56489C.1
tcccaagatcatcaacgatcggaccgggagtcgcccggttcgggttcntgacgtctcgagcgagcagggccagcgcgacgccatcgaggggatgaacgcaaggagctcgacgccgcaacatcaccgtcaacgaggcccagtcgcgccgctccggaggcggagcggcggtggctacggccagcgcggcggaggcggaggctacggtgcgcggctacggtggtggttgcgcgcggtggctacggccagcccgtgaagcggctacgcggtgcggtgctacggtggcgccgtggtgcgcggctacgcgcggctacgcaacccccgcgcgccaactccgacgggaactggagggaacctgaccggtgggcccctccatgcccaaagttatctatctatctaatcgagctaccatcatcatcatccgatccgttatcatcgttatttttgttgaaactatctagtttggtgttaactgtggtggtccccatcttgtttttggatccaagaagaaagctcttctcgtttgcttggatcaaaggaatgaatggaatgaatcttagtgtcaaaaaaaaaaaaaaaaaaaa

SEQ ID NO: 54379 - DNA, 497 bp, Oryza sativa
  Clone ID: PAT_MRT4530_5648C.1
atgtttttgaccggaatgaaaaagctcaaaaatcaccaaaacatgatttttggacatattggagtttattgggtgcgttcgtgacaaaaactcacttcgtgattcgctcggcgaccttttgtcaattaatgctaatttttgcatattttggcccacacgggtgcgatgtttttgacaggaatgaaaatgttcaaaaagcaccaaaacatgatttttggacatattggtgtgtactggatgcgttcgtggcaaaaactcacttcgtcatacacgaggcgatcttttgtcaattaatgccaatattggcccacacgagtgcgatgtttttgaccagaatgaaaaagttcaaaaagcaccaaaacatgatttttggacatattggagtgtattgggtgcgttcgtgacaaaaactcacttcatgattcgctcggcgaccttttgtcaattaatgcaaattttgccatattttggcccacacgggtgcgatgtttttgacc

SEQ ID NO: 54380 - DNA, 669 bp, Oryza sativa
  unsure (1)..(669): unsure at all n locations
  Clone ID: PAT_MRT4530_56490C.1
cccacgcgtccggtattaatgactcattgcatgcttcttttctccaacttcaaacgtcagctctctccttctccgttagcacatatttcaaaatattaaatggtgcgtaatttgcaaaataaaaagtctacatagaagttgttttaaaaatctaataaatctttttaaaaatttattaatacttaactaattaagtgctaatgagttttttggtttcacgtcctaaaaactaacctctaatatgcatgatcaaatgcagccttaacttactaagccagaaatatcgaatttgtcagatctgtactaagcgtacgtacacgggccatgggccaagccgttagcccaactatggtactccttataagtaggtgttgttaattgtgattgggtggcgctgattgcggtgttttaataacaatactactccgttactgggaaacaaggaaagaaattagttagtgaagatttgatttggcatacgaataaatagaatgaattaaatggtcaatttccgttactgggacccaatatataaggcaccgaattgaaataaatagaatgaattaaatggtcaatttccgttacggngacccgatatacaaggcaccaaattgaaggctctatatatactcggtcagtccgtccatccattcatccacgatccatcat

SEQ ID NO: 54381 - DNA, 1308 bp, Oryza sativa
  Clone ID: PAT_MRT4530_56491C.1
atggccgagcagatgggcgttgctattactgatcaggtcgacctgctgagccggatgcactcgccgtacctggtggggttgctgggctactgcgccgaccagagccaccgtctgctggtgttcgagttcatgcccaacggcagcctcaagagccacctccaccggcgcgcgctggcgccggcggagcagccgccgccgctggactggcagacgcggctgggcatcgcgctggactgcgcccgcgcgctggagttcctccacgagcacagctcccccgccgtgatccaccgcgacttcaagtgcagcaacatcctcctcgaccacaactaccgcgcccgcgtctccgacttcggcatggccaagctcggctccaacaaggccaatggccaggtcaccacccgcgtcctcggcaccaccggctacctcgccccagagtacgcgtcgacggggaagctgacgacaaagtcggacgtgtacagctacggcgtcgtgctcctcgagctgctcactgggcgggtgcccgtcgacacgaagcggccgccgggacagcacgcccttccgcggctgacgaaccgcgagaagctcgtgcagatggtggatcctgccctgataggccagttctccctcaaagatctggtccaggtggccgccatcacggcgatgtgcatacagacgaaggcggactaccggccgctgatgacggacgtggtgcagtcgctgatccccatcgtgaagagcccactcatgtcctgcacctccacgccgctgaggcccgcgcacgggcaccaccacgtcgtctacatgagcccgagcaggggctcttccaacggcgaggactcgaaatcctctttagctttgcgcgttggacggattggtcactttgtcaagatcttccctggggttgagcatggatggaccgtaagatacaaggatgacgatgccgctgctgtcaagagcgccgaggaagccctggcggacatgattgactggtttaataagaacctgaagtgaatttgacatatccgctgtccacgatcggtttgtgtattgctcatgtttcatcgcaagcatcctgaatttacggttgagtagccttcccattatgtttgtgctagtagtgtatatgctttgcttgtgttaggaatttgctttgtgtcaacctgaacttccacttctgtaataaaaatggatgggcgagcatcttctcggtttggtggtcaaaaaaaaaaaaaacatatcattttgttacatcgaacttttgaaactttgcacaaaaaaaaaaaaaaaaaaaaaaaaaaaaaaaaaaaa

SEQ ID NO: 54382 - DNA, 487 bp, Oryza sativa
  Clone ID: PAT_MRT4530_56492C.1
aacagcaaacctcccttgggaaaaggggagggggaagggggaaaaacagttcccaaaaacaaaaggttttcttacgggaacaaaattcaaaagccctgggaaaaccgttaacctctccaatttttatttaaaagggaaaaagggggtaattgttttttttgctacaaccaaattttttgggggagggattccagcccggggggccttgggctaagagatctttgatcaagtggcccttgggatccaaagacttttttcggaaaagaggggaaacaaaatggggctggggggatctcgaaattgtaaaactaaaggggccctttcaattttggggaaaactcttttcccaaaagggaaaaaataggagggcggaaaacaacaggaggccccctgggggggcgcaagacttaaaaccaaaaacccccttagggtatgggggacctgggggcccaaccatattcaccgggcctttaaaaactgggggaaa

SEQ ID NO: 54383 - DNA, 324 bp, Oryza sativa
  Clone ID: PAT_MRT4530_56493C.1
atgcagcaggagtcaagcagcgggcacagcaccacaggtaaagaaagggaggaaaactggaaaagaaaagcaaagattccaacatctctgcctcttttccctccttcctctgtccggcgttcgattttctttcataaatcctcgcatcccgagatggctgctgccgctgctcttcttcagtctttcgctactgttgcttcggttcagaccgtcgacgggagctcacacttgcccatctctgcaaacaatggaatagacaatcacccagtaagatcacggttcaaaaagaaagaatcatacaacagggtggtattacgcgattaa

SEQ ID NO: 54384 - DNA, 174 bp, Oryza sativa
  Clone ID: PAT_MRT4530_56494C.1
atggcgccagccaccggagaaagaggcaccagcggcggagttggcccgacgatggagcggaggctcgaggccaaagctatcggcgaccatgggagggcggaggaggcgccgatggctacggatgacctctcccttgactttcccgaagaagcagcagttggcgatgcgcggtga

SEQ ID NO: 54385 - DNA, 353 bp, Oryza sativa
  Clone ID: PAT_MRT4530_56495C.1
ccatgcgtttttgtctcaatctaactccactcatgatatatacctgatgtgtctgaacggacatgcatgtactatagttgctctgctaatgtactaccatcagcttttagcattttgcatcacaaaatatacctatggactatgcaatacgattctctattaaatggttatgatgacttgcgtggaatgggactcccacacttgtgggagggcagagaaacaagctagatagcttagaaacttttaaagaagctacaggttgcatatagcatcgtaaaggaacatatgaaggtctattggtcggatcgatatagattttcatgccaacctgttggcagagatcattttgctaa

SEQ ID NO: 54386 - DNA, 2034 bp, Oryza sativa
  Clone ID: PAT_MRT4530_56496C.1
tttttttttttttttttgtacgagactttttttaatagtagtgatttaggttaatcatatagtaatactccatactccagcgtagttacatggactaaacaaagatatcccccaccattagccaaagctgcaaaaagaaagaggtacagctactacagtaatctgtttctacgccgcagcaaacatgcagcaggagtcaagcagcgggcacagcaccacaggtaaagaaagggaggaaaactggaaaagaaaagcaaagattccaacatctctgcctcttttccctccttcctctgtccggcgttcgattttctttcataaatcctcgcatcccgagatggctgctgccgctgctcttcttcagtctttcgctactgttgcttcggttcagaccgtcgacgggagctcacacttgcccatctttggcgcttggttgacgacgtaggcggcgccggcgaagtcgcaggtgccaatggtgcggccctttcgctggtagtagtcgttgaaggcgtaggaggcgtgggcgaccatggtgttcggctcgaagcacgccgcgccgggctggatggccttgcagtccgcgccgcccggcccgcacgcgtagtccagcgccttctgcagccgctcctccccggccatggcgttcgccacgcaccacgcctcaccggtcgacgtcgccttcacgccgccgcctgcgccggccggcgcattgccggcgtttaccccgccgttgtcctgccagccgagcccgccgttgtccttgccgctgctgccgccgccgccagcggagttgccgccgaggacgaactcgacgtcgtagaccttctgctggttcgggtagaacacgccgtagttgcgctcggaggtcggtccgggcttctggttctcgttgaagagagcgaagaggtacacgtccatgtcggcgtcggggcggcgcggcgttccggcgttgccggagaggacgcggcgcaccaggttgccgttgtaggccgcggcgttggccgccgcggcgccggtctccttggcgtcacccttggacggccacccggtctccgacaccacgacgcgcacggcattgtagttcccaagcttgctcaccgcggtgaacacggcgtcgagctgggcgtcgaggaggctgtagtacttgaggccgctcccggagtcgagcacgccggcgttggggcggaacagcgcgtagtcgagggagatgacgtcggcattgccagagtacgcgaagaacgggtacgcgttcaccatgaggtacgagccggtctgcgcgaggaagtcgagcatgggcttcatgaccgcctgggcgaggtcctcccggaacacgccggccgacggcgggtacgagccggcgagcgcggtgagcgcgatgggggacgacaccttgacgggcttgtcaaggctgagcctcgccagcgcggcgtgcacgttggtcatcgccgggacgagctgcgccgtgaggttcttggccgaggcgaacacctcgttcccgacggcgatgccctggatctgcgtggccgggtagtacgctgcgacgttgcggcgcacccaggcgagcgcgtacgacgggcgcgacgccgcggcgagcagctgctcgttgggcagcgcgaccaccaccttgatgccggtgttggccagcgcccgcagcacggtcggctcggtgtcgtacagcttcacctgcgcgatgccctgctgcttcatcagctgcaccaccgccgccgggttgggcaggtcgttcgccaccctcccatagttgatccccaccgtgcccgcctctgaagcggacaggaagagcagcggcaatgcgacggcgaggatgagggcgcggaggcgcccgggtagagccattttgctgctcttgctgctgctcactgctgcgcgggcgcgagaggcagcagagcaagacggcgacgagtcgtgtccaggcgtccgcggacgcgtgggctgcaaacaatggaatagacaatcacccagtaagatcacggttcaaaaagaaagaatcatacaacagggtggtattacgcgaat

SEQ ID NO: 54387 - DNA, 313 bp, Oryza sativa
  unsure (1)..(313): unsure at all n locations
  Clone ID: PAT_MRT4530_56497C.1
tggtttagacggacgcaccagtgcttgtgggatcgggcggacggccggtgaacatgtcnnnnnnnnnnnnnnnnnnnnnnnnnnnnnnnnnnnnnnnnnnnnaattcgccctatagtgagtcgtattacaattcacttgccgtcgttttacaacgtcgtgactgggaaaacccttgcgttacccaacttaatcggcttgcagcacatcccccctttcgccaactggcgtaatagccgagaaggccggaccgatcgccctttccaacagttgggcagnctnnnnnnnnnnnnnnnnnnnnnnnnnnnnnnnnnn

SEQ ID NO: 54388 - DNA, 990 bp, Oryza sativa
  Clone ID: PAT_MRT4530_56498C.1
atgtcgtattacgtagatccttattccaacgtaccccaataccctctatatttggtctacggttatccactgtcgacagtggcgcgccaggtagggggacttggtgcacaaggttctactactatgtcatcaagcttcgtcgacgatagcgtcaaccccggtatcaaccaaggagtttctacttcaacaatgctggtgtggactcaagtcggcgaaattgtcttcccggtctacaccacggtaccaatctcgactggtccatcaatgaccggaaacgagaacaccgtggttacaaccctggatggctccatatcgaaggatcctcccgcagaagtggagaacggaacatcaacgacatccgagcccgagaaggatcctaatgcggctaaatcttgtccctccgacgagaatcacgagctgacaaggacaacttccgaggcaacaaggtcctggtgtcctattcacaaaaccagaaaacacaccttgcaagcttgctgggtttctcttgacgtacaagccaagatccatgcctgcaaagagcgtggaattcaacgtacttctccaacccgtgatgtctattgtcctatccataagacgaagaatcacgacctttcaagctgcaaggttcttctcagcaccatgaggacgccacctcctagggtccagcagtcacaaatctcttctagagatgcggacagggaacgaggagcgacagctacctcagatcgattcgttggactaatcgacatcgatcctcacgagccgtttgttctacacttgctcgaagaccaggcctcatcgtcaacgagtacaccacacgatgtattcgctatcgatgggaccagcacatctgcgtgcgctaacgcagaagcggaggagcaagtggttacaccggcccagcacatcagggccatgaacgcaatactgagggaaaccccttatgaccccgttctgaacagaacgactacgggaatcagtggccaaccttag

SEQ ID NO: 54389 - DNA, 2253 bp, Oryza sativa
  Clone ID: PAT_MRT4530_56499C.1
atggcttcgtcatcaaatccatcaaatcttccctgctctagtgatggtgtatgcatgttatgcaaggtgcttacaacagaggtagagcagctgcgttgtagcacctgtgctacgccatggcatactccctgcctctccagcataccgccccttacagatgtggcccactgggtctgtccagattgctccggtgatgtcacagccagctacccgccatctgatgttgttcgtccggagagcagcctcatcgctgcgattcgtgtgattgaggctgatccggtgctgtccatccaagagaaggctcgtcgtcgccaggaacttcttggccatgccggtgatgcaggggctgcaataactgaagctgttggggaaaacgtagaggacagtgagagcaacaatcctttgtctatgctgaacaagaacatcaactgctcattttgtatgctgcttccagagcgacctgtcactacaccatgtggccacaacttctgcctgaaatgcttccgaaggtggattgaaaatggtaaaagagcttgtgtgatctgccgagcacctattacacaaaaagtagcacaagatctaagaattaacttggcactagtccaagctatccgcatggccaaggctgcaaacaatgctagcacaactggtgaaacaacggtttatcattataaagaaaatgaagataaacctgacagagctttcactactgaaagagcaaagagagctggaatggcaaatgcttcaagtggacaaatatttgtgactattgcaccagactattttggtccaattcttgaagatcatgacccaaggaggaaccgcggtgttcgagtcggggaccattggaaagatagaatggaaggtagacagtggggtgctcatttccctcatattgctgggattgccggccaatctacacatggggctcaatcagttgccctctcaggaggttatttagatgatgaagatcatggagagtggttcctctatactggaagtggaggaagggatctaagtggaaacaagcgaacaagcaaggagcagtcttttgatcagaagtttgagaagctgaatgctgcattacgtgttagctgcttaaatggctatcccgtgagagttgtacggtcttttaaagagaagcgctcaccatatgctccagagtctggtgttaggtatgatggaatctataggattgagaaatgctggaggaaaactggagttcagggtacattcaaagtgtgcagtgatgaacatggagaccatccaaggccattaccagatatcgaagagctgaaaaatgcaattgatattactgagaggaaaggaaacccagcatgggattttgatgcaacagatggatggaagtggatgattactccacccatcagcaggaaggctgtcgtaactggagatcctagaggcaagaaaatgcaaggagcagcaaggcatacaaataacttgtcaatgagagaaaggctgttgaaagaattcagatgctccatatgtaggaacgtgatggaagagccagtgacaacaccgtgtgctcacaacttctgcaagaaatgcctgcttgggtcatatgataatctttcccttacagaggagagaagccgtggtggtcggaccctccgggcacgaaagattgttaaaaagtgcccttcttgtccaagtgatatcgctgatttcgtacagaatcctcaggtaaaccgtgacattatgaacgttattgaatcactccaaaaagaagctgagaaggaagatcatgctagggtgagtggagaaggcagcagtgcagcacttgtagattctgatgatgaaaatgacactgcttgggagaaccaagatgatggtaatctggatgagggaggttgcaacaatcctgaggacatgataactgaatctgttgatttgaattctgttactaatgttgataatactgaaaacaaggtggaagttcagcagcctcacaagcgtaccgccggtgccgggaaggggaaaggtggcaaatgggctaggacaagctctgcaccaggtgatgcagatgccaggaatgttgtgacttcaactgaaacattggatggaatagctgctgagaatgtggctgatttagtacaaattgaggattgcactttcactggtgtggaaagagccgaccccaatgcgttagaagttgatggcaagaatatgattccagacttttcagaagctgagaaggttaaccctaaacaggatcaagaagttcttccatga

SEQ ID NO: 54390 - DNA, 487 bp, Oryza sativa
  Clone ID: PAT_MRT4530_5649C.1
ttgtttataaccggaacgaaaaagttcaaaaagcaccaaaacatgatttttggacatattggagtgtattgggtgcgttcgtggcaaaaactcacttcgcgactcgcgccgtgaacttttctcaattaatgccgatattgccactcgtgggtgcgttgtttttaaccggaacgaaaaagttcaaaaagcaccaaaacatgatttttggacatattggagtgtattgggtgcgttcgtagtaaaaagtcacttcgcgactcgcgctgcgaactttcgtcagttaattgccgatattgccactcgtgggagcgtattttatgaccggaacgaaaaagttcaaaaagcaccagaacatgatttttggacatattggagtgtattgggtgcgttcgtggtaaaaactcacttcgcgactcgcgcggcgaacttttgtcagttaatgccgataatgccactcgctggtgcagtgcttttaactggaacaaaa

SEQ ID NO: 54391 - DNA, 133 bp, Oryza sativa
  Clone ID: PAT_MRT4530_564C.1
tgcctcagcttgcaagaaattcatgcaagatcctatcgaaattgatgttgatgaggattcgaccaccaccgtccacgcactcactgaaacttataagaccgttgatggacccttgagcaaggtactgaggggt

SEQ ID NO: 54392 - DNA, 1794 bp, Oryza sativa
  Clone ID: PAT_MRT4530_56500C.1
ggagagagagagaactagtctcgagttttttttttttttttttttttttgcacagaaaaaggcaagaagcttgcatcttatatactgctccatagttacttacaagtgactcgtcttcttctgacttatatctactgaaaccaatcaaaagacaatattctacaagatcacggtaaaaacagatgatggcgcttcaagtcttgcgagacatagtgaggagagctttttgcttgcttcagttgcttgagcttagctacgctactacgagcaccagttccagcagccaatggaggacggcatcctgccggttctcctgatgtggtctgcctgctccgccgtctttgcagccgcacggctccgtttcagctccgccgcggcccgcttctcgtcggcagtgtgtctcgccgatgcgagctggctcatcagcttgtcctgcgcacgggctcgcatcctttccacgtcgacctcaatttttctcatttcagcttcgatttttgctctctgatgatcttcccatgcttggatcttaatctcttctcgtttaaatcttgctaaatatttagccttctctgcctcctcccacgctgctgcacgaatttctgttaccttctgtgtagattggtccatgggcactcctttaagcgaaagtgatgcatctttttcctcttccttgttgcttgcccatgcagcaatgttggttttaccaagctgagtgccgaggagcattatctccctcctagtcttcatttgcaattcttgttcacttaattccacgttgctacattcaccatggccaataacagcaccgattgcattggggcctattgtttttcgtggagtagttgggcgagaacaatctggactcgttgctctcaccggtgttcctgttcgggatggctcctggctcgcaataggggtcatttctgtacccatgtctctcattgacactgatcggactgttggtgggggaggtatgcatgttgtcgcgctctgaagcgtggcagatgaatcatggcgactaaaagtaacagctgaatcagctactgtaatttcttcagcaagtgcagactttgcacaagtctcaacttctggatatggatcaggtggggcccaattcaccgctttttgccacccaatttcccttttctcttggcttggatcaaccctcttagtatctatctcctctgtggcctccaacacaaccttcgtagccggcagcctcccgccaccaaagctagttttttccatcttcctctgtggcactccaccagccctaccaggacggtttgttgtcgggctggcgatccatttctgggcatcgtcccactttgatggtgcaggctttgagaatggaggaacgattgccgccgtcacagaccgagcagaggcccctcgctccttatggaactcaaagtttgaagccacactctcagagtcacaggagtcctcctcaggcacccttactcgtgaacccatggagtgggtgtcacgcgatcggtgcccactccctgtctccaacgaggatgaagattctgagatggtgctcaccacatctacatccttgtattcttcgcacatgctacctcctctgcgcgcatcggagtcggcgtcggatctgacagaggacttgggcaccgcgccgtactcgtcgtccacctccccggcgtccccctcctcctcctcctcctgccccttccgccgcttctccacccccagcaacatcgcgcgcagccgcttcggcgagaacccaccgccctgggtggggaacggcttctcgatgcgctcgtactccat

SEQ ID NO: 54393 - DNA, 592 bp, Oryza sativa
  Clone ID: PAT_MRT4530_56501C.1
ttggtctccccctccccccgagctccccggcctcccctgcatgcggctgttctgtccacctactccccccccccgctccagactgattgagccgcagccccgcgcgccgactgtgccgtctctgccggccacgccacctgcgctgccgccttgtccgacgtcgccctggccccccccccgcgcccccccagactgctgcgcctgtgcgtccaccgccggcgccgccgctcgtcggccacgctgcccgcgtcgccgcgccgaccggcgggcccctggttgcgttgccggcgccaacatatatatatccaccatcttcaccaacattcatcatgcatggagaacgtgaagcgaagacgacgagacgtaccacaagcagcttaatcggaggttctcctacagatgtagatctgcggaggtaattaaatgggagtctttcgagaccccaggaaccagaagaccacaccgctggatgtccaagatctgtccaacgacaggcaatggcgcgcgtattttatattatacatggaaactgtatcttgttaattcaattcaataaagatcatgtgtttatgtgtcaaaaaaaaaaaaaaaa

SEQ ID NO: 54394 - DNA, 222 bp, Oryza sativa
  Clone ID: PAT_MRT4530_56502C.1
ccactaaaatacaatcacaatcttttacattggggtatattaaaatgtgggtttacccctcaaacaaattatttaatcataattacaactatattctccttttatactgacatccatcattttaattactacacatcaccaatatttttttaattcttaaacaatcaaatatattaatacaaattcttaaaaaaaacacattttataaaccttatcttaatc

SEQ ID NO: 54395 - DNA, 366 bp, Oryza sativa
  Clone ID: PAT_MRT4530_56503C.1
atgaaggcggatctgggtgccaacggtgaatcggaagggtgggcggcggcggttggagggatgacgtgtgtcggcgggggagggacgaccacacaagcggtggaagaattggagctgggcggcagcggtgtgagagacgacgggtggctccgctatgagcgacgaacgccgaagcagcagaacctgctggatctgggcggcagggggatggcatgcggcggcagtgggacgaacgaaggggcaagcggctacgttggggattttggtggagcgacgaggagcagggtgagggggaaaagaaagcatgagaacatgagatcatcgaacagcctggtgttacaatcatcagaaaaagcgcagatctga

SEQ ID NO: 54396 - DNA, 104 bp, Oryza sativa
  Clone ID: PAT_MRT4530_56504C.1
gcacgaggggtgatgtcatggtgcagtgtacgccgtgcaagtacacgacgccgctccaggcctcgtgcgccggggtcgccaccgtgtaccagccgggatgcacc

SEQ ID NO: 54397 - DNA, 357 bp, Oryza sativa
  Clone ID: PAT_MRT4530_56505C.1
atgaaggcggatctgggcaccgacggtgaatcggaagggtgggcggcggcggttggagggatgacgtgtgtcggcgggggagggacgaccacacaagcggtggaagaattggagttgggcggcggcggtgtgagagacgacgggcggctccgctatgagcaacgaatgccggagcagcagaacctgctggatctgggcggcgggggggaggagggggtcgatctgggagggggcggtgtcagggatggcatgcagcagcggtgggacgaacgaaggggcgagcggctgtgttggggattttggtggagcgacgaggagcagggtgaggggtactactcgtccatgggtgaacagtaa

SEQ ID NO: 54398 - DNA, 1248 bp, Oryza sativa
  Clone ID: PAT_MRT4530_56506C.1
cgttcgttggttccgctgctgctgctgctggcggcggcggcggcggcggcggcggcggcacctcgagccccgtccgcgcgccgtcaccccacgctcgcgtgcccgcgtgctgccgccgtcgcgtcgcctcctcgcgccacgccccgccgcgctgtgcatgccgccgtcctcgccgccgtgtgcgtctcggccacgccgccatcctcgccacaacctccggccccgtccgcgtgcatgcgctccgccgccgccccgcctgctgcccccacctcccctctcccttccgcacccctcacctcggttgcgccctccctgctcccctcattcacgcgctccctcgctaaccctaaccgcgctgcctcaaccagtcaccgccgccgccacctcgccctgtgcccttgccaccgcaatctccgctccgctccgctccttctctcccatcgctccctctctccccgccctctctccagccgtcgcctcaactcgtcgacgccgtcgactcacctcgccagaacagctgaacagcgacggccccattgctctcggcgccgcatcccgcccctccgccgtcgtcgtcacccgcgatccctcctcccttggtacgccgccggacggtttccgttgcgccgtcgccgacgatccctcaccgtcacctgcgatcaccacccccgccccctgccatccgctggtcctcacgccgaccgctgatggtcctcccctccagtaaagacccatggacgagtagtacccctcaccctgctcctcgtcgctccaccaaaatccccaacgtagccgcttgccccttcgttcgtcccactgccgccgcatgccatccctgacaccgccccctcccaaatcgaccccctcctcccctacgctcgccctccctctctcagccgcctctcgccctccctaaaacagccagccgccgctcgccgtccgtgagacccctgccgcccagatccagcaggttctgctgcttcggcgttcgtcgctcatagcggagccacccgtcgtctctcacaccgctgccgcccagctccaattcttccaccgcttgtgtggtcgtccctcccccgccgacacacgtcatccctccaaccgccgccgcccacccttccgattcaccgttggcacccagatccgccttcattcccgcaatggccagctacgggggtggctacaatggcgacgaaggcggcaacggccacgacgacgacgtgtacggccacgacggctgcaccaagg

SEQ ID NO: 54399 - DNA, 921 bp, Oryza sativa
  Clone ID: PAT_MRT4530_56507C.1
atgtgggcaaatcctataggtttgggtagcctcatgtggttatgttcggtggagtatcctttggagtgtctggtttttggtggcgatacagagctgcaaccggtcagaccgagccaacggcggtctgaccgagccgtggacggtctgaccggccactacactacggtctggttggagggtctcatgacataccgccaacactatgctttcctacacaatgatagagaagctcctgtcataatcagtgacaagctctctgaagatgagactcaacgtcttctcaccgtgttggaaaatcattgttctgttcttggctattcgcttcaagatctaagggggattaatcctgtactttgcacccatcgtatccctattgaccccgagagtactccttcaagggaacctcaacgacagctcaataatgcgatgcgagaagttcttcctcctcctgtggacatgaaagggatccgcagcttcttgggatacgccggcttttatagaaggttcatcaaggacttttctacaatcgcccgacctctgaccaatctgctagccaaggatgcgccctttgagttcgatgacgcgtgcctgaaatcttttgaaatcctcaaaaaggcacccgtctctgctccaatcattcaacctcctaattggactatgcccttcgagatcatgtgtgatgcaagcgatttcgccgttggtgcggtcttgggccaaaccaaggataaaaagcataatgcaatctgctatgctagcaaaactctaaccggagctcagttgaattatgcaaccattgaaaaagagctgctcgcggttgtttttgctttcgataagtttagatcttatttggtgggagctaaggtgatactacctccgtcccaaaataagtgcagccatagatatccgtgtttagcgctttga

SEQ ID NO: 54400 - DNA, 2090 bp, Oryza sativa
  Clone ID: PAT_MRT4530_56508C.1
gtcccgagtacgtgttactccaacatttccatatgggtctggataaggagtttgcattctatctggacataaccgccgggggatcgttcatgcacaaaacgccgtcggaaggaagaacaattttggatcatcttcatgatgcaacacgatgaaccccagccggaggcatccgtgtccaagatagaggaacctctaatgatcgagccactctctgaaccatccacttctgctagctctattgatgagaagtttcctgaacaaccgtctgtcgagaatgaagaaattcagactctggatcgtgccactattctgttcagggatggttttgaccaagactataacaacgttagtattctctacagtccaactgtcggggccaatctcatctccgagtcttttgcattcgcttatttaagcgatatgacagtgacctcgacagacaaattctttaagcatccgaacggaaatatcattgaaggatttgggattgtacaagatgtgcatgtctgctttgaagacagggaggcgatattggatttccacatctttgaaattcaagactttgacatcctaatcgggctacccattgagttgcttctcatcaacacaccccgattagatagcctcaaaataacgttgggagggaatgaattttccgttccattctcgcgggcaaggattgccttgaccaaccctctcctagaaattgagtcagcgaaggagattaccgcagttccccctcacgagtctcctaaggcccttctggaagatgaagtccccgatatcatcaaggaagaagcagatcccagtgagactctcgatctgccaattatggaactgccacctcgacctccgcttgagcttaagcctctacctccaggcctacgttatgctttcctacacaatgacaaagaagctcctgtcataatcagtgaaaagctctctgaagacgagactcaacgtcttctcatcgtgttgaaaaagcatcgttctgttcttggctattcgcttcaagatctcagggagattaatcctgcactttgcacccatcgtatcactattgaccccgagagtactccgtctagggaacctcaacgacagctcaataatgcaatgcgagaggttgtaaagaaagaggtatcatcaaattcctatccatccgaaggaccgatgtccttcggactgtgcaacgcttctgcatctttccaaagatgtatgatgtctattttctcggacataatcgaggacattatggaagtcttcatggatgacttctctgtctatggaaagaccttcgagcttcctcctcctgtaaacatcaaagggatctgtagcttcttaggacacggcggcttttatagaaggttcatgaaggacttttctacaatcgcccgacctcttaccaatctgctggccaaggatgcgccctttaagttcgatgacgcgtgcctgaaatcttttgaaattctcaaaaaggcactcgtctccgctccaatcattcaacctcctgattcgactctgcccttcgagatcatgtctgatgcaagcgatttcgccgatggtgcggtcttgggccaaaccaaggataagaagcatcatccaatctgctatgctagcaaaactctgacaggaggtcagttgaattatgcgactatcgaaaaagagctctcgcggttgtttttgctattgataagtttaggtcttacttggtgggagctaaggtgatagtctatactgatcatgctgctttgaagtacctgctcactaagaaagatgctaaaccgcgtctcttaagatggattttgctgctccaagaatttgacttagaaattgttcgcgactccaacccgtggtatgccaacatagtgaattacatggtatccaagtacataccaccaggggagaatcaacggaagctgaaatacgaaagtcgccgtcatatatgggatgagacatacttatatcgggtttgctccgatggcttactacgaagatgtgtgccgactgatgaaggacttaagatcatagagcgatgtcatgcctcaccttacggtggccattatggtgcattccgcacccaggccaagatt

SEQ ID NO: 54401 - DNA, 357 bp, Oryza sativa
  Clone ID: PAT_MRT4530_56509C.1
atggagaatttgagttgtttgatcagctcgccattgccaatgccaatgccggagtacgagctggcggcgtgcagtccggcgtcgccgtcgtcgtcggcctcgtcgacgtcgacgccaccgtcgcctgggggagaggcggcggcgaggtgcggcgagaagcgcgggaggggcggcggtgggggtaggcacccgacgtaccgcggcgtgcggatgcgggcgtgggggaagtgggtgtcggagatcagggagcctctcaagaagtcgcgcatttggctcggcacgttccctacgcccgagatggtagcgcacgcgcatgaactcttcgctctagttgtcaatatgattatatcactatga

SEQ ID NO: 54402 - DNA, 672 bp, Oryza sativa
  Clone ID: PAT_MRT4530_5650C.1
atgggcaacagcggcaaggcggcgctcccaggcggtggcgcgtcaattccaggcgtcgacgcgacgggcggcgaggaggtggtaggtggtggcgcagggctcccaggcggcggcgtgtggctcccaggcggcgacacggtggtcccaggcggcggcgcgtcggcagcaagcgcggggctcccaggcggcggtgcggtggtcctaggcggcggcgcgtcggcagcaggcgcggggctcccaggcggtggcggcgcggcggtcccaggcgtcgatgcgacgggtggcgaggaggtggcaggcggcggcgcatcagtcccaggtggcggcgcggggcccctaggcagcggcgcgtcggcagcattcgtccgcatggtggtcccaggcgttgacacgacgggtggtgaggaggtagcagccggcggcggcgcgtcggcagcaggcatccgcacgacggtcccaggcatcgacgcattgggggagagaataaagcacttacatccggaaggagagttctccattgaactggcaacaggaggaacggtgctggccgtgctgccgacgataacaagcaggacgatgaccagcgacaggcgggatgacatagagcaatcttgtaggcttgtcgacattaatttgaccggagctaccatcccctgcgcttcgaaggcctag

SEQ ID NO: 54403 - DNA, 449 bp, Oryza sativa
  Clone ID: PAT_MRT4530_56510C.1
ttgttttcagagaatataattctgttcacatttacatcacagccatgacatttacagccagagcatactgcttcgcactaataaccaccattcatggtaagtgtacactgaaaaaagaaatctaaccaaagttcgtgcagatggttggcatgatatatttaccaacaaccatcagatattctcatatacagatcaatgatcgcttctctaactagtacaatgctgcaagactgcaagcaagtatcaatatttcacaagctatactttagcattccagagctgacttagctctcctcttttcgcacctagcgtgacaatagttcctagtgttgatgggactaggtagaggagagctggctgtccactcttcattaggtacaggccaacatatgtgcatgacaaaccgaaagcgtaaccgatcattaagcagaagaaatagccgtcagtca

SEQ ID NO: 54404 - DNA, 657 bp, Oryza sativa
  unsure (1)..(657): unsure at all n locations
  Clone ID: PAT_MRT4530_56511C.1
ggggggggactnnttctttctnccaggagcgggagggggaaatccaaaatnaaaccccccaaaacctttttttttnnnnccccnaagggggaaacnnnnaaaaaaaaaaaaaaaaaacaacaccccttttctttttttttaacccagactcaccaacccggggggtttcaatataaattnttgggcgggcccgggggggggggggggggtaatatttggggggggaagggggggggggcaaaaagagggggggggggaaaataatatataaacccctttagagggggggggngcccctctttttttttttcttgaggaaggcggtggggttcctcttccacaaaanaggagaggttgggggagggaaaaagggggggggggggggaaaaaatattcccgggggggggggggccccccacaattgtttatttaaaaaaatggggggggggggggggggggcggccccgggggggggggggggggggtagaatatccccccccctggggggttcggggggggggggggggactcggcaaaaaatatttggacgggagccccgggcgggggggggggggggcggtctagggccgggggggggggggggggggggggcagcgggggttaggttccaccttcttgggggggggggggggggg

SEQ ID NO: 54405 - DNA, 275 bp, Oryza sativa
  Clone ID: PAT_MRT4530_56512C.1
cactgtagatgtgtgcgataccgaaaacaatatgagctttaccccctagggatgtgtactccagatatggagtgcccccgataatgcgaggacatgtgctaggatgtgaaatggtgatatgtggagaacctgtagtgatgccggccgtgaggtagtgataatatgagaaaccacctaccaggtgatggacacttggtggtgattctattcgatatcagtactaaataaaggttaccaaatttcttaaaaaaaattaaaaaaaaaaaaaaaaaaaa

SEQ ID NO: 54406 - DNA, 243 bp, Oryza sativa
  Clone ID: PAT_MRT4530_56513C.1
tctctcctacttcgtcttcccccaattcaagaagcggaagagagagcgcggcggcggtggagagaaggttctagatcgctctggaggcggcgtgatctgggggcggccgctctgtggctactgcaccgagggatcccggcgcctgcagcggcttcgcaacctcccccggcgtggatgtcgccaacgtctcattctttcaatcttcttcacctcgcacccgggtggtcacctcgggcgcttcgt

SEQ ID NO: 54407 - DNA, 165 bp, Oryza sativa
  Clone ID: PAT_MRT4530_56514C.1
atgtcgaccatcaccggccgctccacgccgcccatgacaactcacccatggggaagaaataaggtaaggaagggtgaaagttatacccaacaacagtatatgcatagtatggagaacgttgaaaccaaaatgtacgatgttgatattcgatatgatcccagataa

SEQ ID NO: 54408 - DNA, 708 bp, Oryza sativa
  unsure (1)..(708): unsure at all n locations
  Clone ID: PAT_MRT4530_56515C.1
ctcctctcggctctcttatctcacccttcgtttcgctcgtctccctcccgccgcagcaggtacgcgacgcgagctctcgtcggctgcgatgttgtgcgtgctgtttacngggtgacngggtcggactagccggcgcgtgggctcgacgaggcgctgctccttcgtctctcctggtttctgatttttctcacccttcgtttcgctcgtctccctcccgccgcagcaggtggggggattcgagtgttgggaggtttgcatgctctgtggtggcggtagagttggtggtggtggtggatacagatggtcatggatgctggggtgcacgacgtgtgcacgatgctgcccggatccaagcgcgacgcgcacctgccgctgccaatctacccccaaatcgccgccgccaatgggttcgcgacggcggaggagttcgacccgctgctgttcctttcgcccgatgcggtttgcggcggcggcggcggcgactacctgaatattgtctccgcgcagcccatctcggcggcctccaccaaccgcgcgtcgccgccgagagatgtctcggtctctgcttcggcggcgtcgtcggcggcggcgcagcatgacgactccgaggctttctcggatatcgtcctggggtacatcaaccgcatgctcatggccgaggacatcgacgagaagttcgagcactacccggtgaacgccgatgatctg

SEQ ID NO: 54409 - DNA, 2865 bp, Oryza sativa
  Clone ID: PAT_MRT4530_56516C.1
atgaagcaggcttctccggcgacgtcttcccctcgagttccgttgacggacgaggaaaggaaggcgccactgctgcctacgccgccaacttcatctcaagctgccgcggcggaaggcggaaacaaattggccagtggccgactgcaagctcatgaacaccggggaagggtactggggatgaacgcaaccctaggcccgactccggtcaagggtgcgtatgaatctccttccacatctctgaaaaattttgatcaatttgagttggggggtggggaatttgatggggatcagtttgggcgtcagtataatcacagggttcccaagttagatttccctaagtttgatggaacagacccagaggattggaaaatgagatgtgaacattattttgatgtgaataatacttttccagggttgtgggttagaatagccacaatttattttttggatagggcagcttcctggttacggtcttctaaggctcatgttagatttcctgtgtgggagaatttttgtattgctgtgtcacacaaatttgatagggaccaacatgaaactctcattagacagatggatagtattaagcagacaggaacagtttgggaatattatgagagatttgatgaattaatgaatcaattgctgacatatgatcctgttttgaatatgcgatatctaacacatcgttttactgagggactgcgtcaagaaatcaggaatgcagtgctgctgcaacgtcctaaagatttggagaatgctttggcagtagcaatgttgcaagaagaagtgatttctgagacaatgacagtgtcagttccaaatctgaagaaaagtgatggtggaaatttgcagattcggccaaatgtcgcattcaaaggagcattaccattacccttacctccaaaccttggaagtggctctggtgttttgaatcgatcagaggatcgtaagtttcttgacaataccaagactggtaccagtaatgataaaatttctacactgaaggctcagcgtagagctcaggggttatgttacatatgtgcagagaagtggtctccaatccataagtgtgcaaacactatacaactgcatgcagttcaagaattgctcacagttttgcaatccgatttgctctctgatcagggtatttctgacgaaagtgatggtctggacagtcctggattgatgtcaatttcagttcaggctataaatggctttgaaacagtgggctgtatgagaatgttgggatatgttcagggtaaagaagtgcttatattggtggattcaggtagtacagcaagttttattagctctaagattgctcaaaccttgcaaggagttgtaactcttgaaccaccagtacaagtgaaagtagcaaacggttccatacttacttgtcttacttcagtaccaaggtgtgaatggatgacccaaggatgggtgttttatactgacttaaaggtgttaaatctgggaagttatgacatgattttaggcatggactggttgatggctcatagtcctatgcaggtcgattgggttaacaagctcttgacagtttcctggagaaaggaatccattacattacagggaattttgtcagaaactgaacagtgttctcaactctcttctcaacagtttttggagttgaaggatagacaggccatctctcacctgattcagttgtgcactctgtcagaatcttcaaacaaggagcaaattcctgtggaaattcaacaagtgctagcagaatttggacaggtgtttgaagaaccttctggattaccaccgtccagggtttttgatcatacaattccacccatgccaggagctactccagtcaatgtgcgtccctaccgttatacacctgctcaaaaggatgtggataggattttcacaagcaccctgtgggctactctattcaagttggctggtacacaactccggttgagttcttcttatcatcctcagactgatggacaaacggagcgtgtgaatcaatgtcttgagactttccttcgctgctttgtgcatgcttgtccttctcagtggagtcgatggctggctctagcggagtattggtataatacttccttccattcagccttggggaccactccatttgaagtattatatggacataagccacggtattttggtttgtcagcaaatgcagcttgtcagtcgactgagttagctgactggttacatgaaagggagcagattcagagtttgattcgggatcatttgttgcgtgctcaagctcgtatgaaatttcaggctgatcaacatcgctctgaaagaacatttgttgtcagcgactgggtttatctcaaattacagccggttgtgcagcagtcagtggtcactcgtgctaatcgcaagttggcttttcgtttttatggtccttttcaggtgctctctcgagttggtgaagtggcttacaaattggctttaccagctaccagtcttatacacccggtggtccatgtctcacagcttaagaaagcattggtgccaagtgaggtggtgtattctcaattgcccagaattcagtccactgctggtacgtcagttgttccatcgcaagtgctggatcgtcgcttcattcggaaaggatccaagatggtggagcagttgctggttcggtggtctgtagatgatccgcatgtggtcacttgggaaaatgctcaagaacttcgtcatcgttttcctgactctgaagcttggggacaagcttcaactgaaggaggaggggatgtcacagcggcaacatctgtagcagggagttcaaagcagaagccagcggcccagcctgtgaatcggcccagaagggagaagcagccaactcccgtttccctgtaa

SEQ ID NO: 54410 - DNA, 613 bp, Oryza sativa
  Clone ID: PAT_MRT4530_56517C.1
gtaccaatatgacatgaacacaccaggttctccagggcaacttcgtattgcctcaacacgagatctgaatatgaacatatcagtttccaatacaaacatgttatcacaagcttatgctagctggaacaatattagccttggcaatgagttatacaggatggaaacgtcttctactagtgaaaggtcgattcttgatgtgcacgaaagaagaagttattatgttatcccacaaaacaaacttggccaagacatatacattagaaccactgaatataggagttcagatgttacacttctgtcatctggggatgataggtctataaaagttccagcttcaagggatcttctggattctcatttaaaggggagatctgttaggttatatcgcttgatggttactgctattattgccaatgctgagcaacaaagtgctcgtacctgtgctgctgctggagaccaatcttcacaaaacataagaaaggtggaatggaatgaaatgttcttctttaaagttgaaagcgaggataattatgttctggaatttgttgttcttgatgctggtggaggttgtagttttgatgtgcaacacatttacttttctttattttcttga

SEQ ID NO: 54411 - DNA, 1527 bp, Oryza sativa
  Clone ID: PAT_MRT4530_56518C.1
atggaggagcagaacattgatttcggcaaggtgttgatggagatccaggagtccttggtgacgctgaatcgtgctcaaggcgaaactcaagcagcgctcgtcaagctagatcacggagtaagcagttggagacctcaagtagaagcagcagttcaggagctacatgaggaagtcggcgatcttcgtcagcaactggatctcgtcggcaaaatgaagcaggcttctccggtgatgtcttcccctcgagttccgttgatggacgaggaaaggaaggcgccgccgctgcctacgccgccaacttcatctcaagctgccacggcggaagggttgtggattagaaatgccaccatttatttttcgggtagggcagctttctggttacgattttttaagggttatgttagatttcctgtgtgggagaatttttgtattgctgtgtcacacaaatttgatagggaccaacatgaaactctcattaggcagatggatagtattaagcagacaggaatagtttgggagtattatgagagatttgatgaattaatgaatcaattgctgacatatgatcctcttctgaatatgcgatatctaacacatcgttttactgagggactgtgtcgagaaatcaggaatacagtgctgctgcaacgtcctaaagatttggagaatgctttggcagtagcaatgttgcaggaagaagtgatttccgaggcaacgacagggtcagttccaaatctgaagaaaagtgatggtggaaatttgcagattcggccaaatgttgcattcaagggagcattaccattaccctcgcctccaaatcgtggaagtggctctggtgttttgaatcgatcagaggatcgtaagtttcttcacaataccgagactggtaacagtaatgataaaatttctacactgaaggctcagcgtagagctcagttcaagctatacaaaggctttgaaacagtgggctgtatgagaatgttgggctatgttcagggtaaagaagtgctcatattggttgattcaggtagtgcaactagctttattacctctaagattgctcaaaccttgcaaggcgttgtaactcttgaaccacctgtacaagtgaaagtagcaaatggttccatacttacttgtctttcttcagtactaaggtgtgaatggatgactcaaggatgggtgttttatactgacttaaaggtgttaaatctgggaagctatgacataattttaggcatggattggttgatggctcatagtcctatgcaggttgattgggttaacaagctcttgacagcttcctggagaaaggcatccgatacgttacagggtattttgtcagaaactgaacagtgtttccacttttttttcccaccgtttttggagttgaaggaaagacaggccatttttcacctgaatcagttgggccacatcagattttcagacaaggagcaaattccagtggaaattcaacaagcgctagcagagtttgcacaggtgtttgaaaaaccttttggattaccaccg

SEQ ID NO: 54412 - DNA, 3212 bp, Oryza sativa
  unsure (1)..(3212): unsure at all n locations
  Clone ID: PAT_MRT4530_56519C.1
atggaggagcagaacattgatttcggcaaggtgttgatggagatccaggagtccttggtgacgctgaatcgtgctcaaggcgaaactcaagcagcgctcgtcaagctagatcacggagtaagcagttggagacctcaagtagaagcagcagttcaggagctacatgaggaagtcggcgatcttcgtcagcaactggatctcgtcggcaaaatgaagcaggcttctccggtgatgtctttccctcgagttccgttgatggacgaggaaaggaaggcgcgccgttgcctacgccgncaacttcatctcaagctgcacggcggaaaggtgaaagcaaagtggccggtggctgactgcatgctcatgaacaccgggaaaggtactggggatgaacacaaccctaggcccgactgcgggtcaagggtgcgtatgaatctccttccacatctctgaaaaattttgatcaattttagtttgggggtggggaatatgatggggatcagtttgggcgtcagtataatcacagggttcctaagttagatttccctaagtttgatggaacagacccagaggattggaaaatgagatgtgaacatcattttgatgtgaataaaacttttccagggttgtggattagaatagccacaatttatttttcgggtagggcagcttcctggttacgatcttctaaggctcatgttagatttcctgtgtgggagaatttttgtattgctgtgtcacacaaatttgatagggaccaacatgaaactctcattaggcagatggatagtattaagcagacaggaatagtttgggagtattatgagagatttgatgaattaatgaatcaattgctgacatatgatcctcttctgaatatgcgatatctaacacatcgttttactgagggactgtgtcgagaaatcaggaatacagtgctgctgcaacgtcctaaagatttggagaatgctttggcagtagcaatgttgcaggaagaagtgatttccgaggcaacgacagggtcagttccaaatctgaagaaaagtgatggtggaaatttgcagattcggccaaatgttgcattcaagggagcattaccattaccctcgcctccaaatcgtggaagtggctctggtgttttgaatcgatcagaggatcgtaagtttcttcacaataccgagactggtaacagtaatgataaaatttctacactgaaggctcagcgtagagctcaggtgttatgttacatatgtgcagtgaagtggtctccaacacataagtgtgcaaacactatacaactgcatgcagttaaagaattgctcacagttttgcaatctgatttgctctctgatccggatattttcaaaggaaatgacggtctggacattcctggattgatgtcaatttcagttcaagctatacaaaggctttgaaacagtgggctgtatgagaatgttgggctatgttcagggtaaagaagtgctcatattggttgattcaggtagtacaactagctttattacctctaagattgctcaaaccttgcaaggcgttgtaactcttgaaccacctgtacaagtgaaagtagcaaatggttccatacttacttgtctttcttcagtactaaggtgtgaatggatgactcaaggatgggtgttttatactgacttaaaggtgttaaatctgggaagctatgacataattttaggcatggattggttgatggctcatagtcctatgcaggttgattgggttaacaagctcttgacagcttcctggagaaaggaatccaatacattacagggtattttgtcagaaactgaacagtgttctcaactctcttctcaacagtttttggagttgaaggatagacaggccatctctcacctgattcagttgtgcacactatcagaatcttcagacaaggagcaaattccagtggaaattcaacaagtgctagcagagtttgcacaggtgtttgaagaaccttctggattaccaccgttcagggtttttgatcatacaattccactcatgccaggagctactccagtcaatgtgcgcccctaccgttatacacctgctcaaaaggatgagaatagggtgaaacaactatttgcttggcctcacttgcgcactacagttatgcagtttgttactgcttgttctgtttgtcaacaagccaaatcagaacatgtcaagtatctaggaatgttgcaaccactgcctgtacctgaacatgcttggcaagttgtttctttggattttattgagggcttaccaaagtcagctaccttcaattgtatcctggtggtagtcgacaagttttccaagtatagccattttgttcctctttctcaccctttcacagctatggacgtggccgaagcttatatgcagatcttcacaagcaccctgtggactactctattcaaattggctagtacacaactccggttgagttcttcttactatcctcaaactgatggacagacggagcgagtgaatcaatgtcttgagactttccttcgctgctttgtgcatgcttgtccttctcagtggagtcgatggctggctctagcagagtattggtataatacttccttccattcagccttgggaactactccatttgaagtattatatggacataagccacgatattttggtttgtcagcaaatgcagcttgtcagtcgactgagttaattgactggttacatgaaagggagcagattcagagtttgattcgggatcatttgttgcgtgctcaagctcgtatgaatttcaggctgattaacatcgctctgagagaacattttctgtcggcgactgggtttatctcaaattacagccgtttgtgtagcagtcagttgtcactcgcgctaatcgcaggttggcttttcgtttttatggtccttttcaggttctctctctagttggtgaagtggcttacaagttggctttaccagctaccagtcttatatacccggtggtccatgtctcacagcttaagaaagcattggtgccaagtaaggtggtgtattctcaattgcccagaattcagtccactgctggtacatcagttgttccatcgcaagtgttggatcgttgcttcatttggaaaggatccaagatggtggagcacttgctggttcggtggtctggagacgatccgcatgtggtcacttgggaaaatgatcaagaacttcgtcgt

SEQ ID NO: 54413 - DNA, 486 bp, Oryza sativa
  Clone ID: PAT_MRT4530_5651C.1
atgtttttgaccggaatgaaaaagttgaaaaagcacgaaaacatgatttttggacatattggttgtattgggtgcgttcgtggcaaaaattcacttcatgattcgcgcggcgaacttttgttaattaatgccaatattggaggacacgggtgcgatgtttttgaccggaatgaaaaagttcaaaaagctccaaaacatgatttttggacatattggagtgtattgggtgcgttcgtggcaaaaactcacttcgtgattcgcgcggcgaacttttgtcatttaatgctaatattggcccacacgggtgcgatgtttttgaccggaatgaaaaagttcaaaaagcaccaaaacatgatttttggacatattggagtgtgttgggtgcgttcgtggcaaaaactcacttcgtgattcgcgcggagaacatttctccactaatggcaatattggcatatattggctcacacgggtgcgatgttcttggcc

SEQ ID NO: 54414 - DNA, 294 bp, Oryza sativa
  Clone ID: PAT_MRT4530_56520C.1
atggaggagcagaacattgatttcggcaagggtgttgatggagatccaggagtccttggtgacgctgaatcgtgctcaaggcgaaactcaagcagcgctcgtcaagctagatcacggacaactggatctcgtcggcaaaatgaagcaggcttctccggtgatgtcttcccctcgagttccgttgatggacgaggaaaggaaggcgccgccgctgcctacgccgccaacttcatctcaagctgccacggcggaaggtggaagcaaagtggccggtggctgactgcatgctcatga

SEQ ID NO: 54415 - DNA, 2418 bp, Oryza sativa
  Clone ID: PAT_MRT4530_56521C.1
acgacgaagttcttgatcattttcccaagtgaccacatgcggatcgtctccagaccaccgaaccagcaagtgctccaccatcttggatcctttccaaatgaagcaacgatccaacacttgcgatggaacaactgatgtaccagcagtggactgaattctgggcaattgagaatacaccaccttacttggcaccaatgctttcttaagctgtgagacatggaccaccgggtatataagactggtagctggtaaagccaacttgtaagccacttcaccaactagagagagaacctgaaaaggaccataaaaacgaaaagccaacctgcgattagcgcgagtgacaactgactgctacacaaacggctgtaatttgagataaacccagtcgccgacagaaaatgttctctcagagcgatgttaatcagcctgaaattcatacgagcttgagcacgcaacaaatgatcccgaatcaaactctgaatctgctccctttcatgtaaccagtcaattaactcagtcgactgacaagctgcatttgctgacaaaccaaaatatcgtggcttatgtccatataatacttcaaatggagtagttcccaaggctgaatggaaggaagtattataccaatactctgctagagccagccatcgactccactgagaaggacaagcatgctacaaagcagtgaaggaaagtctcaagacattgattcactcgctccgtctgtccatcagtttgaggatagtaagaagaactcaaccggagttgtgtactagccaatttgaatagagtagtccacagggtgcttgtgaagatcctatcacggtcagaaatgagtgactgaggtaatccatgcaatttatgaataaactgcatataagcttcggccacgtccatagctgtgaaagggtgagaaagaggaacaaaatggctatacttggaaaacttgtcgactacccccaggatacaattgaaggtagctgactttggtaagccctcaataaaatccaaagaaacaacttgccaagcatgttcaggtacaggcagtggttgcaacattcctagatacttgacatgttctgatttggcttgttgacaaacagaccaagcagtaccaacccgcatcactgtagtgggcaagtgaggccaagcaaatagttgtttccccctttgaatagtaccaaggaagcttgaatgaccccccactggggcagtatgccaggtagccaaaattttttggtgaagtaaagtaatggtacctatccacatcctggttctggaaaatagcactccttttagagtaaagtttgggaccgcagctgcactgatgcaaagagtttgaactttacttaaagcatcagggtcaaaatcataaccagcaatgacttcctgaatccaatctggaacaacaagcaattttgttaaagccttatgctgccatggggtggtaagccgttgatcatccagaaaagataaactcctatgatctgtacgaatgaaaaactcagcatgttgcaaataaggatgccaatgttccactgccagcatgattgctaaactctccttttcataggtagataatccttgatgtcgagtacccaaagctctacttaagaaggcaattgggtgattcttttgcatcgaaacagccctaattcccttgttagaagcatcagtttcaaccacaaaaggttcattgaaatcaggcatagctaagacaggagcagtgattaaagcttgtttaagagcctgaaaagcttgttcagtttctgcagtccacacatagagcttctcttcatcagttgatactccattagggctaacaatatgacccaagtaggctaatctctgttgagcaaaggaacatttgctctttttcaccttaagttgatgtttagtaagaatttgcaagacagcctgaagatgtttaacatgatcaccaagagtcttactgtaaatcaagatatcatccacaaacaccagaaaaaacttgcgcaacaaaggagataggacattgttcatacagccttgaaaagttgctagagcactagtaagaccaaacggcataaccctgaattcaaaatgaccatgatgggttttaaatgccgtcttatgttcatcagctcttaaatccagcttagtaaaccaatgagccccatcctttttcttgactaacaacattggggatgaaaatggactggaactcggctgaatgatacccttggttaacatttccttgactggcatttcattctcatccttttgagcaggtgtataccggtaggggggcacattgactggagtagctcctggcatgagtggaattgtatgatcaaaaaccttgaacggtggtaatccagaaggttcttcaaacacttgtgcaaattctgctagcacttgttgaatttccactggcat

SEQ ID NO: 54416 - DNA, 279 bp, Oryza sativa
  Clone ID: PAT_MRT4530_56522C.1
atgggggagatgaactgggtgagcaggaagatccatctctacaacgtcaccatgggcctctacatgctcgattgttgtttccctttaactggagtagacataatggtgctgattctgctctggttcatctgcttcaatggctctcgctttgccagtgacgtcttcgagagtccatctttcgcaattacagtaggttcctggcaaagtgaaacccttctaaatataaaaatagtggatgtcctggagcttgttgtaaatgaattagaagtaaagggataa

SEQ ID NO: 54417 - DNA, 1460 bp, Oryza sativa
  unsure (1)..(1460): unsure at all n locations
  Clone ID: PAT_MRT4530_56523C.1
ntgcccccgctccccacctcgacccgctccacctagggtttcagcccacgcgtccgtgcccgcgtccgcccacgcgtccgcccgccgcgagcccgttctcggcagcggcttcccgttgcgcgcgcgtcccatcctcgccggcgcttaggcggcatcccgactcgcccccttgaaggaggagcccttagaacttgggcacctcgatggccgacggcggcggcggcggggaggccgggtccggtggctcggcgccggtctgcagcttcgtgaggaagccgccgaagaacatccggaagcgcccgaccgcgcccgcgggctccgacgacgacgacgaagacgggtccggcgccatcgccgccgcgcgcgccaagaaggcgccgtcgtccaccagcaagctcttcttctcctccgcggacggctcgtcggagccccgccggttccagtacgagtcgtcgcggacgatccaggcctccaccgacagccgcgccaccgccacgctcgagacggagacggagttcgaccgcgacgcgcgcgccatccgcgagcggcagctcaagcaggccgaggagtccctgaagaagaacccctccgctcctgcctccagctccggctctggctccggggaggtgtacaaggggatccacggctacacggattacaaggccgggttccgccgggagcacacggtgtcgtcggagaaggccggcgggtcgcacgggccgctccgcgcgtcggcgcacatccggctctccgctcggttcgactaccagccggacatttgcaaggactacaaggagacagggtactgtggctatggcgattcctgcaagttcatgcatgacagaggggactacaagtctggatggcagatagagaaggagtgggaggaggcggagaaggcccgcaagcgccgcatcgctatgggtggggatggtagtgattacgaagcaggggaggaggatgacgatgatgatgaagaagcgttgccctttgcctgctacatttgcagggagccttttgttgatccagtggtcacgaaatgcaagcactatttctgcgagcactgtgcattaaagcatcactcgaagaataagaagtgctttgtctgcaacaaaccaacactcggcatcttcaacgcggcacaggagatccgcaagaagatggcacaagacaagaagcaatagtgcccactgacagttgaagaatgtgacttgtacgttagagagttgaagaatctaaatgatgtggaattttagatgacaaagaaaactaccaattagttttgcattctgtttatgtaacaatatctgctagcctactctcacttgctcggttcagctcagccttttgtatggcaaatgtattgcttctgtgaggatgtgaattgtgcagagcccaaatagatgaggcaaacataaaaggttcttgatttccttatcaaaaaaaaaaaaaaaaaaaaa

SEQ ID NO: 54418 - DNA, 811 bp, Oryza sativa
  unsure (1)..(811): unsure at all n locations
  Clone ID: PAT_MRT4530_56524C.1
acgcggtggcggcgctctaaacttgtggttccccgggctgctggttgctagctccaaccagattttaactaaggaggggtaaacaaagacctaggcctatgtacaccatgtccaaaccaaggatttaacaggtacggaaaaaattactcggagaatatccacaggtcacagacctaaaatcaatggccgatatgggccgataatcacgctaaatcaggcaatctaccgtctaacgaatccggagcacacccctcacctttccagcccttagaatgaacattccatgctcattactctcagcgtctccacagttatgacactctcacactcacctcaaagatgaaagggacatcagcaacatcggcagttgtagttatgaggaaacggtctcctgctggccaacggataatctgtcagggcctccattactctcagcaacagcatctttaactccagaatgattgcccggaccatctagctcgtctcctgaactgacttcttcagattggtcagatgggggcacatacaccaggtttagcaaggagtcgccacaaccacctaactcgatggaagggcaactaatgctgccatcctcatgggctgactcttgctgaagcaaccgttggttaaatttgtcttcaggggtggcggctgagatattcccgtcacgtatcttctgacagcaacttaagcacagcttaaaaggacatctttgggcagcttctcaggaatcggtgcacggagngcttacagttattgcagtcgagtgatcncgctttgctcatcagctacctggactcggatcatctgg

SEQ ID NO: 54419 - DNA, 565 bp, Oryza sativa
  Clone ID: PAT_MRT4530_56525C.1
ggagagagagagagaactagtctcgagttttttttttttttttttaaagaaatccgtattacattgaccacaaataccgaaggtacaagttattgccaaatcaaacaagaataccataaccctcatttgtcatgctaagcaagcacacagaacctgtcaactgtcaagaacacaaagatcatccgagcacgatgatctttgctgaaaaccatgttcttggactggtgagaataaaacaccacgcgtgagcaaacacatgtctgctcgagtccacaccaaaggcaaactagcaaagtgatcaaatcagaaattcaaactaccgaacatacgcagacgagcaaatcttacatctaaatttatattagcacccattgcagttgtaccgctgtagtaagtctctctccagaagctagttgatctcagaatccccatgttctttcagttccagctgatcatctgatgcagggcagtcaaattccatatctgcaatcacttcgttaagatcaccgactccagcagaagcattaccagatgacatccgcttggatgacaaggctttactgga

SEQ ID NO: 54420 - DNA, 336 bp, Oryza sativa
  Clone ID: PAT_MRT4530_56526C.1
atggcgaagaccaccagagcgtggaaggcgcaggccgccagcgaccgcaaggacaaggcagggcagaaggctgcggaggacagctttcagtgctcctgcggaagattctacaaaggatctaccacaagggagaacgagcatacgcagagatgcctcgccaagcggaaggaggtggcggccggccgaatggcggcggaggcagcgaaggaggccgccaacgagccggaggtgcagacctccggggagaagatatgggcagaggcgaaccccaccggcgcagatcaagttgccgtgtgctcaatgattccctctgatttgggtcacgggtgcaggtga

SEQ ID NO: 54421 - DNA, 1053 bp, Oryza sativa
  Clone ID: PAT_MRT4530_56527C.1
atgagtcctcggcagctactctccgtgctgctgatctcgctgctgtccacccatccgcctaccggcgtttcgtccctctccttcagctatgacttctcctcccagcctcactacaacactaaagatctcagcctcttctacctgaagacgaccacaagcatcctcgatctccatggccgcctccatggagacagtactactaccgtgtggagcaaaggaatccggagcgtcggcagggtgcttcacacgcagcccgtgctgctctgggacaacgccaccggcgctgccgcgagcttcaccatgaccttctgcctcagaacgcagcagcagaccggcgccggcgccggcggctctcctcctcgcatgtctgtgttcctcgtgccttactacccgtcgagcaacagaaacagcagaagcgttacaacggacggcgatgatcagattgaggaggtcgagttcgagactacactaatagcacggtcgtcgtcaatgtcacatccatcgtcgtctacaagctgcagatcatcaacaccaccgtggtcactggccggagacaccaaccacggatcggccggcggcggcgaaggcacagtgttcgtgcatattggatacgaccacagaacgcaggtgctaacaaaatctgtccggatcggcggcgcgccctgcagaagcatcaactcgactgttgatctgaggagaagcttgccgagcgaggtggccgtcggcttctcgtcgaccaccggccacccgattcagctgcacaacatactgctctggtcgttcaattccacgctagaaacgaagacacgttcttcccctttgacgcagcctgatgaggagactctagttcatcaggcaccggtaacttctaacgagagacgatcctttgtttcctggaagcagctgctggtccgtttggatccttggaaccggtccgtggaattgggtttggggttccagttcttcgagcggagttgggttcggctaaagttggtgctgaattctaatttcaacatatctctagagtatggcatcggaaacgagtgggattag

SEQ ID NO: 54422 - DNA, 1335 bp, Oryza sativa
  Clone ID: PAT_MRT4530_56528C.1
atgcctcgaccccccgccgctacgagttccgaggaggagatcaagaaggaggtggcggccgtggacgtcgtcgtcgccgcaccggacgacgatgtggccgccgatcgggaggaggaggaggaacagaagaagaggaagcggaggaaggagaagaagaagaggaggaggagggcgccgagcgaggaggaggaggccgcgctgaggtccgtgctccgctgggcgcgccgcggcgaagcgggcgatgaggaggcggacgggcagcgccccgctgcgaccgggaggcggcggccgcgcgtcgcggttgagctgcacgcgcactcgacgtgcagcgacggctcgctctcacccgcggcgctcgtccagcgcgcgcaccgcaatggggtgaaagtactcgcgctaactgaccacgacaccatggccggcgtccccgaggccatcgaatctgcgaagcagtgctccatcaggatcatacccggtgtcgagataagcgccatgtactcaccaagtgatggaataggagccgaggaacccgtccatattctcgcgtactacggtagtctgggccctgcaaaaccacaagaactcgataggtttctcggtagcatcagggatggccgctatacccgtgcgaaggggatgctgctgaagcttcggagcctcgacatgcccatggagctcgaagacgtgtgcaccattgcaggggatggagtggctccaggccggttgcacgtggctcgcgccatggtagaagctggatacgttgagaacattaggcaagcttttagcaggtacttgtatgacggtggacctgcttatgccactggcaatgaaccagcaggggagtctgtggtgcaattagtttgtagaaatgggggtgtggcagttttagctcatccatgggcactgaaaaatcctgtggctgtgataaaggatttgaaggctgctggcttgcatggcattgaggtttacagaagcgatggcaagctatcaggattaagtgatctggcagatacatatggtcttctgaagattggtggttcagactaccatggacgagacgacaaggatgaacctgacgtaggaagtgttgatcttccggtcttggctgtttctggatttcttgatgcagctcaaccaatctggcacaatgctaccaaggaaattctggcaaatattactgaaagggcacctaatggctcaaagggactccaaaggactaactctgcaaaagatttatgtaacttgcgtcttctttcttcagacctggaggtaacagattctacggaggttgaggtcctccaaacagaactttcagatgttgtcctcagtaactga

SEQ ID NO: 54423 - DNA, 604 bp, Oryza sativa
  Clone ID: PAT_MRT4530_56529C.1
cggcgaccggcgacccatccatcagcaacattgattggcgacgggtatcagaggcgatctcggcgtgcggccacctcgtccacagcacccgagtccggcgagaggacgaacgagaagagacaatggctctccaatcttccatggatttgctcggagctgcgtggatttgaagcatcgtcaaccaaggcctacgtcgggctttcatggcggcggagccatccttggcgccagtacggcgtacatcatcaacccaacctcaaacgccggtcgccgatgatgcatctgccaggaaccgtaacgttgctggagtgctgggcgttctcatctggccgggcgcggcttccgcctcacgacgccgtcaatatcaactcactctcgctacgctatcgaccacctcgtcgggcatcctaattaggaggaggccgtcatcatgccgccctgccggagcgcgccgaggatcgccggagctaccgccaactgctatgacttccatctgttcccatgccgggagtcaagcatcacgcatagtgtcgaaaccagcagatgacgatggaagccagtatagctgcagcacaggaggaaggacgacgggaggacgacgagc

SEQ ID NO: 54424 - DNA, 960 bp, Oryza sativa
  Clone ID: PAT_MRT4530_5652C.1
atgaccagccaccgacgccgcaccacctcgccgtcgccggcgcaggcgcagccactggaagacgacgacctcctctccgagatcctcctccgcctcccggcgaagccgtcctccctcccccgcgcctccctcgtctgcaagcggtggcgccgcgtcgtctccgacgccgtcttcctccggcgcttccgatcccaccacgggaagccacccctcctcggcttcttcaaggtcagctacagaaatcccatcttcatccccacgctggacccgccggaccggatctccgcggcgcgtttctccctgcagctcccgctccccggtggcggcggtggcagccccccggtttttggtcacttttaccatatgttcgcattccgccacggccgcgcccttatctacgaccggagcttgttgcaaatcacggtgtgggatcccgtcaccggcgaccggcgcgccgttgatatccccgagccgttcggtcgccggccggcgtacgtctccaactgggcgatgcgatgcgtggatgggcatgtgcacggcggctgccactccagtccctttgaggtggtggtaataggcttcaataagtaccggaggcggcttttcacttgcgtttactcatccgacaccggcaattggggcaagatcgatgtgctaccagaaatgcatggcgatggaggtgaccagattgcaccagcagaggatggtgggcttctcttccttgctgtgcgggattttagtctcaatctatggaagcataagatcaatagtgacagtgctgctgctggatgggtgctggagaaaactattgaactggacaggctccttcctttcgaaccaaggcctgatactgatacaccggcaccaatgaatattctgggctttgctgaggaacataatgtggtatttctggcaacagctattggtgtcttcatggttaatctggagtctgcaatttaa

SEQ ID NO: 54425 - DNA, 763 bp, Oryza sativa
  unsure (1)..(763): unsure at all n locations
  Clone ID: PAT_MRT4530_56530C.1
ccggccgggatactactttcctctctctctccctctctctctctatgagtaataacgcttcaaagggcgtagctccaatgagtggttctgaatattcaagttctgactcagaggcgactctggatgacattcctcctatagtgattgatgcagatttagaggaagaggaaaatatgtctgatatgtcatccatgttgaatcttcaaggtccagataagcttggcaataatcaacctttggatattgtacctttgaactccattcccttcaggcaagaggtggcttttcaccaaaaagtggattcgagtaaagaagaggttccggttcctcaatggatgaaacaactcgataactacaaagatggggactggacagtgttccttcaaataagggatgatggacataaagattggttctactatcatcagaaatacaaaaaacagttacggtccaggtcagacgttaaactatttttgaaaacaaccctagtcaacgggacagatatgttcaaaggacaaaagctacagaagaagaggacaatggattcctatggcgaacgtagtggtactgaagctagtgttttcctttcacccattattttgaaatcaggaggaagtaaatccaacaagggagaaaagaagaataccagttctaagaaaagcaagaaggccttgagtaatggagattaccctgtgatgccgaaagagctgactctgcctcatggntttgtgtaatttcgattcaaactgcatatgccaaaagc

SEQ ID NO: 54426 - DNA, 510 bp, Oryza sativa
  Clone ID: PAT_MRT4530_56531C.1
atggcattcatgattcatggccgtccctccccctgcgagattcccccactcacttgctcacacaccaaagaagctactggggcagcccattcactgcaccagtgtagtagcagtgctgcagttgctttgaacactcatctcctcaccgtgtttgttagagctcaaaaggatcaagagaagatgagggttcctcctcttcgtgccaccacggctctcctggccaccctcctggtcgccgcctcgttccaggatctcaccgtcgctgcagacggcggcggcggcgtggttccggtcccggatagcgtgtgcgacgccaagtgccagaagcggtgctcgctgaaggtggccgggcggtgcatggggctgtgcaagatgtgctgccacgactgcggcggctgcgtgccgtcggggccgtacgccagcaaggacgagtgcccctgctaccgcgacatggtctcccccaagagccgacggcccaagtgcccgtttaaagaaaaagttgggaactaa

SEQ ID NO: 54427 - DNA, 849 bp, Oryza sativa
  Clone ID: PAT_MRT4530_56532C.1
atggcattcgcggatcaccacctgcacatcccggacaggttcgtccgcgccgacgaggtcccggcggccggcgaagtcgtcgtcgtgggcggcgacgacgagagcagcgaggtgccggtggtcgacatggcgaggctgctcgatcttgagcacagggaggaggagatcgcttggcttggctctgcgtgccggagctggggttcttccagcttttcgacagatttatctgctattacgcgagttcataatttttcagttttcaagttgctcatctaccaaggatcattcagggattcaatcgacaagtacacagtggagatgtcgaatctgacaatgcgactgctaaggtttatggccagcgaccttggtgttgagcaagaaccgctgctcgccgccttccgcgggaagcggcagagcactgccctgcaccactaccctccttgccgccacccggagaaggtgatcggcatcgcgccgcactccgacggcttcgggctgactctactgctgcaagtcgatgacacgccgggcctgcaggttagcaacggcggccggtggcatccggtgcggccgctgccaggtgccttcatcatcaacatcggcgagaccctcgaggttctcaccaatggcctctacaggagcgtgttccatagggtggtcgttgacactgagagggaccgggttacagttgtggtgtttcaagacgtgtgtatcgatggagtgttgaagccactaccggagctcggcgagccgcgatatcatgcgatcggcaagtcggagtatttcaagggccacacaacagaagtagttggtcagggggaaaggttcatcgacacccttaagaagtga

SEQ ID NO: 54428 - DNA, 1159 bp, Oryza sativa
  Clone ID: PAT_MRT4530_56533C.1
tcgacccacgcgtccgcccaccaccctcattccctcaagtcccaagatcgaacacctcgtgtccatggcggcggcgaagcggcgagtgcgcgacgcggaggcggacctgaacctcccgccgggcttccgcttccaccccaccgacgaggagctggtggcgcactacctctgcccgcgcgccgcgggccgcgccgccccggtccccatcatcgccgagctcgacctctaccgccacgacccatgggacctcccccaccgcgccctcttcggccgccgcgagtggtacttcttcaccccgcgcgaccgcaagtaccccaacggctcccgccccaaccgcgccgccgcctcgggctactggaaggccaccggcgccgacaagcccgtgctgcacaacggcaggacggccgggatcaagaaggcgctcgtgttctaccacggcaagcccccccgcggcgtcaagacggagtggatcatgcacgagtaccgcctcgccaagaagggcggcgccgccgccgccgcgggcgcgggcgcgctcaggctggatgactgggtgctgtgccggctgtacaacaagaagaacgagtgggagaagatgcagagcaggaaggaggaggaggaggccatggcggcggcgcagtcgtggggggagacgcggacgccggagtcggaggtcgtcgacagcgacgcgttcccggagatggactactcgctgccggcggcgtcgttcgacgacgccctgctgcccaaggaggaggcgcgcgacgacgactggctcatggggatgagcctcgacgacctccagggcctcggctcgctgctgcaggccgacgacctctccatgctcgcgccgccgccggcggcgaagacggagccgctcggcgcgccattcttctgagctctctctctctctctctctctctctctctctgtgactgcaccactgtatataaattcagagttttcagacatgttcagtattcagagttctcaggcaagttcagaattcagagatggttaaggattagtggcttatgagcagtatgatatgcaggttagtttctagtttagcagtgttactccagattggagatttgattaatgatttgattctaattaatgtagtatactgagtgttactcaaaaaaaaaaaaaaaacaga

SEQ ID NO: 54429 - DNA, 681 bp, Oryza sativa
  Clone ID: PAT_MRT4530_56534C.1
ccggccgggatggccgtccctccccctgcgagattcccccactcacttgctcacacaccaaagaagctactggggcaggtgtgtccattgaattgaattgaattgaaactattgatgaatgaattcaccagccagctagaaccttccttgaaaccagccataaatcacacccattcatctctctcaactctctgcagcccattcactgcaccagtgtagtagcagtgctgcagttgctttgaacactcatctcctcaccgtgtttgttagagctcaaaaggatcaagagaagatgagggttcctcctcttcgtgccaccacggctctcctggccaccctcctggtcgccgcctcgttccaggatctcaccgtcgctgcagacggcggcggcggcgtggttccggtcccggatagcgtgtgcgacgccaagtgccagaagcggtgctcgctgaaggtggccgggcggtgcatggggctgtgcaagatgtgctgccacgactgcggcggctgcgtgccgtcggggccgtacgccagcaaggacgagtgcccctgctaccgcgacatggtctcccccaagagccgacgccccaagtgcccgtgagcaacgagagatggctggcactgtgacgatgtgtagccgatccgtggtagtagtgtgattgatagcgttgggatcgatct

SEQ ID NO: 54430 - DNA, 197 bp, Oryza sativa
  unsure (1)..(197): unsure at all n locations
  Clone ID: PAT_MRT4530_56535C.1
cggctgtacatttaaactcaaccatgggcgtgacgaagaggccttcaattgtatgatgatcctcncaagagctntataatcggataatgaactcctttngcaagtaccaacatctactctcaccaaccttaataatcctcatcattattataataaactctaaccatttccattactcaaactttattaaattttat

SEQ ID NO: 54431 - DNA, 411 bp, Oryza sativa
  Clone ID: PAT_MRT4530_56536C.1
atggcgatggatctcggggcgtccaacaccgacaccgcagggatgaagaagttatctcagcgacaagacggtgtcccaacgcgtggggtaagtgttgataagtccggcgtccggtgtcggagaaagtctctcaggagacaacgacagtggtcggattggggccgagtggcagcaacacatggtcactatgagaaagtgggtgacactgcccccaggcaccagttctcattccccaaggccctctccagcgtcctcggcacaaagcgaggaccatattgcgaccagcgtgtcgcctgcgaccgccgcaacgcccgctccgtccaccgtcctcgtgacatctccgatcttgtcgccgcccgctgctcccttgtcagaggaggaaatgctggcggaggcctggcgccttcttga

SEQ ID NO: 54432 - DNA, 946 bp, Oryza sativa
  Clone ID: PAT_MRT4530_56537C.1
ttgtcgcgtgggcatttttcttctatcttgcatcatcacacgaagtgaactgcgtgatcgtcggagacatcgaatcaaagctctcgcccattctgcttgctgccctgatctccttcaaattctagcccaaagaatggaggaccagatggctaaccttcgcttgactgacttcgagttcttcaggatcatcctgcccggatcctccaaaacgaaactgaagctgccttacaagttcgcgagggagcttggggaccgagagctccgggaggcgaggctgcgggtcgccggcgaggggcggcgcccgtgggacgtgaaggtgttcgacgacgacgtcagcggcgacgtgtacctgggccgcggctggcaggagttcgcccgcgcccacgacctgcgtgacggccacttcctcgtcttccgctacgacggcgccgccgcgttcaccgtcaccgtcttcgacgagaccatgtgccgccgcgactaccgccgccaccacgacgccgccggcaccggaagcagcagcagcagcgacagcagtgatgcggcggcggcggtggcgacggcggcggcggagggggtcggcgacgtggcgctgtcgcagttcgccgtgacgctgcggcagtgcaacctcgaagacaagcaggcgcagtacttgaacgtgccgatggagttccaggaggcgcacgagtacgcgaggcgggagaaggtggtgctgcggatgcgcggggaggcatggacggtgaggctgaagcacagcaggcgggagcgcggccagcgcacggcgttccggtacgggtggcaccggttctgcgtcgacaacggcctcgccgtcggcgacacctgcttcttccgcgtcctccgcgagggcgacctccgccgcggcggtgccgccgacgaccacgtgctcaaggtcgccgtgcgcaaggccgacggcaccaccctcgagtga

SEQ ID NO: 54433 - DNA, 728 bp, Oryza sativa
  Clone ID: PAT_MRT4530_56538C.1
cgaggtggtggccgcgccgtaccacctgctcgacgcgctgcggcattacctgccgtcgaacgaggcggcggcggcgctctacagcctcccgtccaccccgacaaggctatcgccggtgacggtcaccaccgcctccggcgccaccgtcaccgtcgagccgctcgacctcgggctcatcgaggaggagcaacccatggagagggtggagtccgggagagctctccgggagaaggtgttcgagcgtctcagcaaagaagccaccgtgtccaccgacgccgccgccgccgccgccggcgtcgcgcccgacgtcggctgggtatccgacctcatcaactgagcaaacccaacaaggcggcagccatggctgagtaagaattttcctcatgcctccatagtggaagcagaaggtagcaggaagagaaggaaaaaaaaagaaaatggaaaagtttttccaaccaaaaaaattctattatttttttattttagtttcttgcttgttagattctcctaatccttgtacatatgttcatcatcatcatctaccatcctatgtgaatattcttggatggatgttgggggggccagggaggcaggcaaaggcaaaggcaggatttgttttggggtttttctcagttcagttcagttcagtccagatggtggtggccatggctgcagctgcagtacaagaagaagaagatcagaaatggatcaagatatgtggttaaatc

SEQ ID NO: 54434 - DNA, 2843 bp, Oryza sativa
  Clone ID: PAT_MRT4530_56539C.1
ggagaggaagcacggatgtatttacaagtctgcatcttacattgttctaggtttctctctaccaatacaggcaggtggctgaaagaatgatgctagccagagcacaaaacccaaggttattgcaaaaagaaaacctcacaggattgtgcggccgttggtctttctcttggcctcctcccatggcgcctgtgcagaccccatgtccagctctcctccaaccatcaatgccgggaggccaccatttgcagtggagccacccatggtccctccaatgccaagcccaaggaagtccagagtggcaggcttgggaccgtacagtgccgatggtcccatcatcaagtccggcaaccctgaattcccagtgtcataggtgagaccaaggccaagaccgccaggtagcatcggcccaggctccatttccatttgctggttgctcctatggtgccactgttgtacactgttatcggtgaacattcgatgtggcagcttggctggcggtggcggctgtgggacgttatccatgaaccttccttgaggcggatgaggatgcggatgtggatgtggatgtggatgagatgttgttggtgtgttaccagtagtgaacctcccttgggatagcttggatgggggagacgatgaggtggaggcggcgagcccaaactccttcaggaaagatgagcttgattgcgaagcaccaacctcagcagccttctgcaggagagcggttgcggacatgtgcggtgctggaggtggagcaaaggagcaggggtcacttgcatttgtctgtgggaagagagaagacggcgcaccaattgcaaggcagaggaatgtgggatcgacgccgatgagatcgcggagggatctgctttggggagtgctgctcgttgtgaccgacgcaaacagaccagcgaacgtgctcgtcgtcgtagctggagcgatagcattggtaacgctgcttcccgtgccgcagctggtgctgctgccatctgtgccaatggcctccgagggcgagggaaggaaacaaggcagcatcggagtgtcattatccagcaggtttgagtcctccagttcagcatctttgtatcgatccacttcctgaaagcaaacctcctcatctcgctcatcttccacctctatcttggcaatcactgctggcttagcaaccacctcttgctcatccacatttggtaccactgccaccaccggctgaggatgctcctgcagtatcggaggcggcggcggcggtgatggagcgcactgctgcggcacctccgccaccgcctggctgggctgcggctcatcgacctcggccacaggtgaatcctcattctcctccagctccttctccttctccttctccttcacctcctcctccttatccttatccttatccacattctcctcggcctccaaatcaggcgggcgaggcgacggcggcgcaggcacggcgagcaccctgcccgtctcctccacgagcgcgccgcagaaggcgcgatgcgtcacgaagctgtccctcctggtgaagagggtgccgcagtcgcagcggtactcgcgggtgccgcaggtcttggtgtgcgccttgaggtcggcctggacggcgtagcgcttgccgcagcgctggcatgtccagcgcttctcgccgtgcttgcggcagaagtgcttcttgatgccggtgaggtcgccgagggcgcgggtggggttgtggtgcacgcagccgggctccgggcagacgtacacccggcggcgcggcggcgccgcaccggggccgcgctgccgcagccgccacggcaggttgtggccgcggcggtgcagctgcaggttctggtctcgctggaaccccttcccgcacacctcgcacacgaacctgttcgtcgccagcagcgtccccggcgacagcgcgatcacctccgcgtccggatctggcgttccggggagattcctcttcttcttgaccaccggcgccgcccccgcccccgccggagccggctccaccgccggcccgggctccccctccgtccccgtccgattgggtggcatgacctccatccgagaatctttcttttgcagaagttccgtgcacgcgggtaccactcccgccgatgctgctgctactagcgtccaagaagcaagctgcctcgagcataaaagctcgcgtcacgcctttgcaacgcagcccggacggtgggggcgacaccgagttattggtccccccaacttcaagtaggggagcaaatgaggcggcggcggcgggtctgcagctagatttctcatcatcttgaccggtggcaccgccgtcggtgcgccttggctggacgccgcagtaggcgccgctgttgccactccggtcagtgacgctgccagctgctgctgctggtgctggtgctgttggtgtgacatcagcggcttaatctggtcatgctggtccccatccctgctaatcccgaagaacgccgccgcagctgcagccgatgaattcgatgccatcacctcccaaattttcccaactcagccgcaggagcagaaaatttccttttctgttgcccccgttggattgttcctcggattggcagcagtgttcttcttcttccttccttcttcccccgtggctcactctctcttctctctcccctactgctgtgctcttcctgctagctccccaagaagaagatagaacaagaagtggagaggagaggatggaagaggaaggctaacaagcgttgttgtctcatttctttcatttccttgtcatacttttctttctctctctctctcttctcctgctcctttccttccacgctcgtatatggcccccctctctccctaaagatattttatagaaattc

SEQ ID NO: 54435 - DNA, 488 bp, Oryza sativa
  Clone ID: PAT_MRT4530_5653C.1
atgtttttgaccggaaggaaaattttcaaaaagcatcaaagcatgatttttggacatattggagtgtattgggttcgttcatggcaaaaactcactacgtgattcacgcggcgaactattgtcaattaatgccaatattggcacacgagggtgcgatgttttctactggaatcaaaaagttcaaaaaacgccaaagcaagatttttggacatattggagtgtattgggtgcattcatggcaaaaactcacttcgtgattcgcgcggcgaacttttgtcaattaatgccaatattggcacacgagggtgcgatgttttctactggaatcaaaaagttcaaaaagagccaaaacatgatttttggacatattggagtgtattaggtgcgttcgtcgcaaaaactcacttcgtgattcgcgcggcgaacttttgtcaattattgccaatattggtatatattggccccacacaggtgcaatgtttttgacc

SEQ ID NO: 54436 - DNA, 636 bp, Oryza sativa
  Clone ID: PAT_MRT4530_56540C.1
ctagaatcgggcggcagcggcgccgctcccggccgccgccgccgccgcctcctcctcctcctcattatcatcatcgtcctcgtcgtcctctgcgccgctggccgccggatttttcacagttgttagggcaagctgagtggcttcaaaatttggatcatccacaacataggaagcaaggtgggcgtcgtcgaccttgaagaagagaacgccgtcgatctggacgacgacattgtccttggtgatggcgagttggtcggggatggggatggcctggatcttgagcgagtggacgtaggcgatgcggtcgacgacggggacgagcacgtgcatcccgctgccgagcgtcttgtggtacttgccgatcagcgctccaccacgatcgccttcttctccggcacggtggtggtcaccccaaagttcaccggcggcgtgctcggcgcgtcgcacatgcgggtggaggcggcggcggtggcggagctgagagagtgggagaagacgaggagctggatcgctgggccggcggaggatcgccggagacgaaaaggcatcgccatggtcgcgacgacggcgagagaagacgagggggtttctgggaggaggaattgtagacttgtagccttctggaaggcgtggtaa

SEQ ID NO: 54437 - DNA, 2319 bp, Oryza sativa
  Clone ID: PAT_MRT4530_56541C.1
atgggtcagtgcgccatgtctcccgcacgctctggcaccaccgccggcagcggcggcgggccgacgccgtcgtcgtcgtcgtcgcgatccgcctccaccatcgtcgccggcacggccagcgggtaccacctcctcaagatcgacgactactcgcgcacccgggatctcttccccaccagcactgccctcaagtcccgcgctttcaccatcggcggccatcgatggcgcatccaatactaccccaacggcaacacgcccaactgcggcgattacatatccctcttccttcatctcgacgaggaagtaaccagggaagtgtacgcgcagctccagtttcgtctgctcgacgacgagttgggtgacaaattaccgccgccgccgccgccgccgtcgctggatgcgaacaagttcttcagccatgccagttgggggcaaccaaagttcatcaagaaggaggaattggagaaatcgaggcatctcaagggcaattccttcaccgtccggtgcgacgtcgtcgtcatcaccgagttcgtcgcgaaggatatgcccgaggcggcgaccgcgacggcggcgagaagaagaacccctgcgaggggaactggaagcttcgtcagcgtgccgccgtccgatcttcaccggcatctcggtgagctcctcctcggcgagaagggcgccgacgtggtgttcaaggtcggcggcaagaccttcaccgctcaccggtgcgtgctcgcggcccggtcgccggtgttcggcgccgagctgctaggctcaatgaaggagagccgcaggaaggccgtcgtccgcgtcgtcgacatggaggcgcaggtgttcaaggcgctgctccgcttcgcgtacaccgactcgttgccggagatgaaggagaaagacgaaggcgccatgtgccagcacctgctcgtcgcggcggacaggtacgccatggagaggctcaagctggtgtgcgaggagaagctatgcgagcgcatcgatgtgagctcggtggcgaccgtcctggcgctagctgagcagcaccattgtgatggcctgagaaatgcgtgctttgatttccttagctctccagaaaatctgaaagctgccatggccggcgacggcttcgagcatctgagtaggagctgcccttctcttatgacggagttggttgccatgctcgcagcagcagcaacaagcgacgggcctactttgccgccggtgatgagccatggagcattgtctccgacaaccgccgccgccgtgtccgcgtccgccatcgtcgccaatacctccagagggtaccactacctcaagatcgacggctactcgcacaccaaggccacgcccaccggcgaggccctcttctcctgccagttcgccgtcggcggccaccgctggcgcatctgctactaccccaacggcaatgtcctggaggccgcggactacatctccatgttcctcgtgctcgacgagatcgtcgtcaggaacgtcaaggctcagttccagatttgcttcgccggccaggttgagaagcaggcgccgtccttggcatggaagaccgttcgagcgttcaataagcaaacttcttcgtcttcttcctggggttaccccaagttcatcaggagagaagatttggagaaatcggagtatctcagggacgattcgttcaccatccggtgcgacatcatcgtggtcgacaattaccgtgccgaggacgccagcagcggcgctgccggcttcgtctccgtgcccccgtccaacctccatagccacctcggcgacctcctcaagaacgagaagggcaccgacgtagtgttcgaggtcgccggccagaggttcacagcgcaccggtgcgtgctcgcggcacggtcaccggtcttcaacgcggagctctttggcatgatgatggagagcgacaccaccaccaacgatgccatccaaatcggtgacatggcggcgccggtgttcaaggcgttgctccacttcgtgtacaccgactcgttgccggagacgatggaggagagggaggacaccatgtgcgagcatctgctcgtcgcggcggatcggtacaacctggagaggctgaagctgatctgcgaggaaagattgtgcaagtacattggcataggcacggtgatggacatcctcgcgctggctgatcaacaccactgcaaggggctgaagaaggcgtgcttcgattttctcaggtcgccggcgaacctgagtgccgtcaccggcagcgaaagcttcgagcatctgagcaggagcttcccctctcttatgaaggagcttgttgacattctaggaacttcacataattatgcttggtga

SEQ ID NO: 54438 - DNA, 725 bp, Oryza sativa
  unsure (1)..(725): unsure at all n locations
  Clone ID: PAT_MRT4530_56542C.1
ccagcgtccggatcaatagagctataaggtcaccctggtactgttaggcatttaggccggcttgccattggtcaagaatctagaggcattaatcccattcccatattgttggatttttaggtctaaaatatgaagagaaaaaatggtcttgctcttgaacaattgttcatgaattctaaatcagtaattcatgagtcccttgcctcaaacactgcacaattttcaatcatctatatatttcacatattgccactcttatgtgttgaacaattgtcaaatactcctttttgtcctataatatgagggattttggctatgcatatagccaaaatctcttatattatgggacggtttagtactttctatttgtacaattagtagtttaaatcaagtatataattatatgaaattatacctaattcatgttacataatttgtagtttagtactatgtgatacatgctaaaaaaattactccttcacatttcgaatacccaacctaaaaatcctaggcccgccactgcatgggatgggagcagattagcttttccggatactccctctcggtttgccttggntnttttttttcttacttcccattgggtactgcacaatttgtatattggattttacctgttttagtcagtcaaacatttatacttaaaactatatcaatacaaaagctttttaagtactaaagntatttttgagatatcaagtattagc

SEQ ID NO: 54439 - DNA, 807 bp, Oryza sativa
  Clone ID: PAT_MRT4530_56543C.1
atgggtatcactggccactgggtagtggctgaagacatcgttgctgataggggatcccaacccgtcgctgcctcccgtctcttgcgagacatcgacggaaacgtcggcaaagctagggccgaccagccggcgtcgtactccctcctcacattcaccgcgccggcgccccctccgcctcctccctccaccaagctcgccgcctccgcccagcgccgagcgccggcgccacctgctgcctccaccgcgcagcgccccatccgcctcctccctccaccgagctcgccacctccgcccggcgccgagctcgcctcctccctccaccgagcgccggcgccgcctgctgcctccaccgtgccggcgccccctccgcctcctcccttcaccgagctcgccgcctccaccctccgcctcggcgcctccagcctccaccgcgccagcgccgcttcctgccctcacggctccaccgcgccggcgccgcctcctgcaccgcgccgggcgccgcctcctccctccacatctagccggtcggctacatcccggaggctgaagttgaagtggctgtgtgcgccagttgtgttcgatttgccgatttcctttctagatcgtgccgaggacactgctgccccaaggccgtggtacaaaggcagcaggaggcacgtcgggttgctggtgacgtgcggctgcgaaggcaaaatcccgagctgccgcgccaccgggcagccgctgcgtcgaggcgccgcagcgcacccgctgcgccagggagccacagagaagccgctgcgccgggagccgctgacccgcccttga

SEQ ID NO: 54440 - DNA, 2327 bp, Oryza sativa
  Clone ID: PAT_MRT4530_56544C.1
cttctcctgagaaaaaaaaatatcgcgcacgataatattttctcgccctcgcaccccgcttgcctttcctaattctgcgagatcgaagacctagagggcggcgctaatggcggtggaggaggcggcggagagctgcggaagccacgcggcggcgtcggccgctggtcgtcgtggtggtggaggcggcggcggtggaggggccacgtcgtcgtcttcgtctgcgtcggccggggcggcggcggcggcggcggcgcggaagcagcagcagcagcagcgccacaagctggaggtgtacactgaggtgctccgccgactccacgacagcggcgtccccgaggcccggcgcgagggcttcgacgacgagctctggaaccacttcaaccgccttcccgcacgttacgccatggatgtgaacgtggagagggcggaggacgtgctgacgcataagcggctcttggagcaggcgaaggatccggcgcagcggccggctttcgccgtgcgggccgtgcaggtgtctccaattcttgatgggaatcagactgatgctgattcaaacactgcaggggaggaggttgcttcaaggctgttgaacagacaacagagcattcaccctcctcctgcctttggttcatctacaaatcttgaggcccttgctcttgaggctagcaagtcccaaggacaagaccatgatagcacctcagataatgtcaattacagacccatgcatgaaatcaccttctccaccattgacaaaccaaagcttcttagcgagctcacatcgctgcttggcgaacttggtctaaacattcaagaagcacatgcgttttcaacaaatgatggctactcactcgatgtctttgttgttgttggttggcatgatgaggaaactgaggatttaatagaatcagtacggaaagaaattggcaagattgatgagacgcagggatggtctacaactcattcatggtcttctccagttgaaaatatgcagattggggagaattcagcagctgaccatgttgaaatacctagggatggtgccagtgaatgggagattgatgtaaagctactcaagtttgggaataaagtagcatccggatcatatggtgatctttatcggggtacatattgcagccaagatgttgctatcaaagtgctcaaacctgagaggataaatgcggacatgcagcgtgaatttgcccaggaagtatatattatgaggaaggttcgccacaagaatgttgtacaatttattggtgcatgcactaaaccccccaatctatgtatagtcacagaatatatgtcaggtgggagtgtttatgattacctgcataaacataaaggtgtattcaagctccctgctttacttggagttgtgatggatgtttcaaaaggcatgagctacttgcaccaaaacaatattattcatcgagatttgaaaactgctaatctccttatggatgaaaatgggacagttaaggttgctgattttggtgttgcacgtgttaaagctcaatctggagtaatgactgctgaaacagggacatatcgttggatggctccagaggttatagaacacaagccctatgatcacaaggccgatgtttttagttttggaattttgatgtgggagctgctcacagggaagattccttatgagtacctgacaccattacaagcagctgtaggtgtggttcagaagggattacggcctacaataccaaaaaatgctcatgcaaaactttctgagcttcttcagaaatgttggcaacaggagcctgctgaaagaccagatttctctgaaatattagaaactcttcagagaatagcagaggaggttggtgatgagcatgatggaaagcacaaggagaaaatactgggcggactattttcagctttgagggggcgtgggcactaaatggtgtgggaatacatgttttcattccatatggaagggcctgagaaaaagatcagcgtcagttccttggcaggtgcagcgccacattgagattagactgctgcagtcgacttaatgagcaattttcagatgcaagtccatcaaggtgttaactgttgtcatactatttttttggtgtacaacttccgggttccattacagctgtaacataggaagagttgttgtgaagtgtacattattgacctgattcttctactgacgagttgtaacttgtagttgaataagaagccagatttagggcgtgcattattctcccagatcctaaaaataagctataccaatctttctacttccctctgcttacgttttgtcctgaattctttttcgacaaaaaaaaaaaaaaaaaaaa

SEQ ID NO: 54441 - DNA, 339 bp, Oryza sativa
  Clone ID: PAT_MRT4530_56545C.1
atggctgccattaccgccggatgcgctgcagggggtgtaaatgcgtgggaggaattggccgaggacactgctgccccaaggccgtggtacaaaggcagcaggaggcacgtcgggttgctggtgacgtgcggctgcgaaaataaatcacatcacataggagatgagaggagagggaggggtgagagggaggccagcgctgctcctcgccgccgtggaggtcccgagctcagggcaaaatcccgagctgccgcgccaccgggcagccgctgcgtcgaggcgccgcagcgcacccgctgcgccagggagccacagagaagccgctgcgccgggagccgctga

SEQ ID NO: 54442 - DNA, 601 bp, Oryza sativa
  Clone ID: PAT_MRT4530_56546C.1
cttccttttcacattcaccgcgccggcgccccgggcggggtttacttgaaccaagggcgggggactccacccagcgccgagcgccggcgccacctgctgcctccaccgcgcagcgccccatccggctcctccctccaccgagctcgccacctccgcccggggccgagctcgcctcctccctccaccgagcgccggcgccgcctgctgcctccaccgtgccggcgccccctccgcctcctcccttcaccgagctcgccgcctccaccctccgcctcggggcctccagcctccaccgcgccagcgccggttcctgccctcacgggtccaccgcgccggcgccgactcctgcaccgcgccgggcgccgactactcccttcacatctagccggtcggctacatcccggaggctgaagttgaagtggctgtgtgcgccagttgggttcgatttgccgatttcctttctagatcgtgtttgatttgcttctttttttttttgtctaagtagtgctcgatttgctggtgagtggtgacatcaatttgcagtgtgttgtgtatggcctaattgcttaattcatttatcttgtaccaattttttgctgat

SEQ ID NO: 54443 - DNA, 239 bp, Oryza sativa
  Clone ID: PAT_MRT4530_56547C.1
ttttggggtttttaatttttttttttttttaaaaaaaaaacttcgtggaatatatatcctgtttttattccggttttcatattttccatgtgaggtagaccctggcaatgtacactgatttgaacatatattttgaggcggaagaaaaaccctacacccttgttgatttgcttggcaactgtctaatcctacagggaaacacacaccacatattgcaaaatcatctaaggcaagagatt

SEQ ID NO: 54444 - DNA, 258 bp, Oryza sativa
  Clone ID: PAT_MRT4530_56548C.1
atgacttcgaccataataattaccagcggcggtgatcgcaaggctacgagaatgatggtgaccccaaccacgtacaacgatgaccgcgaggggtcatccacatactgtggtggtgggtataacaggttgccagatctggcgattgcgattggggaggggggatgggggctagtatgcagctccaattctaggagctcaggtgatgacgacggatctggcaaggagctcatgatggatacggggagcaacgactactag

SEQ ID NO: 54445 - DNA, 1024 bp, Oryza sativa
  unsure (1)..(1024): unsure at all n locations
  Clone ID: PAT_MRT4530_56549C.1
tatatatagggattgattgcgtaccactcgcaggccggccngctacgtgcgcggcctcctcagatcaattcctccctgaccctcctccggccgcctccgcctccgcctccgctcccgcctgctgctccggcctccgcaccaaaccctagccctgggccatcccctgcccgccgcgagatgcgccgccgccctctggccccctgatcctcaccctcctcctcctcctcctcacaaaaattacctctttactaggcatccaatcaatcaaaataattctggaatcagaatgcatgttgtataatagttttttctgttgatattttctcatgtttattgcgaacataatattccattctcaagaaagcacttggcaagcctcttttttttttagagagagagatggcacaaccacttgttaattttacttcggatactcttgcaggatcatccataccgtcaggatttgttctatgggtcatgaaagatattcctcatcggcagacagtagaaaggcccacacaatcaagagttgttattttgttcagggatagaccatcccctacacaggatccacaatggaggactgccgttacatcctctaacaaggccctcaagtcaagccctatttaaccagaagacaaaccgttgatgtggaaacttcagtctgtttaatctgctagaattttaccaatgcgtcatttgtgcactggcatctagtagctttctgacaggttgttggtacaaagatggatatgtaattcctacttcaaggaaactttagtgatcagaaaagaagggaattacctgtgaatgtagcatggttctccaatgagtgcacagtatgcgtttatccattagaattaactctgggtaaggctttaaggattaacaaatgtaaatagccatagaaatgagagtttttcatggtttggctggctgttcattcagattttccccaccgtcacattagcttcctcaactcattttagttaatagaactggcaaagtaaggtttcagcttgtc

SEQ ID NO: 54446 - DNA, 166 bp, Oryza sativa
  Clone ID: PAT_MRT4530_5654C.1
atggcaccgcgaacagcggcgcggacggtgtggacggccctgtccaaggataagcccgccacgccagaacacatctgggggaggacgcgcacgccgtggtgcaaacacagccgctgccgttgcgaggccgccgcgcgcacgcaagaccgcgccaacgctgccgcac

SEQ ID NO: 54447 - DNA, 1215 bp, Oryza sativa
  Clone ID: PAT_MRT4530_56550C.1
atgtggccggtcagaccgtgctactctgcaacggctagaaaactagccattgaagagctgtcagagggccccatcggcctggccggtcagaccggcattgagtgggcggtcagaccggccacggctcggtcagaccgccatcggctcggtctcactgactacggctccatcggctctgtatcggccaccccaagcagcaccatcccggcctccaaggggccgaccgccttcttgcggctggtcagaccggccagggcacgccggtcagaccgccactatgtggctggtcagaccgccactgactggagcgaccgtgtaatttttgatgtaactggatggtcggggtcagtgcacgaccaccgggttctgctaagtccaataaggaagtatcctgatcagttccctaggctgccaccaggtgaatggtgcccgagggcatcgctgttactagcaccggagcggagcaaggttttcaccccagagacctgtcaaccaaagcatccacaacggaagctccgaaatgccacctgcataccgaaaaagtacctgcattattcacaccacctgcacgatgacaggactccacaccacccgaccccgactaaggatgcgccagatctggacctagaggagccagatccgaccgtcctccttgcaccatcgtcgccagccgacgccacgagggtagcatcgggcgatggaggccaccagtgccgcacgatccttccattgctggatgccgtgctgtcgccggatccgcgaacaacgccaccgccatcgccgtccctgctgccatcaccatccccgccaccatcggctaccgccgtctggagcagctcgcctctaccaccgccagatgctgcgccgtcgccggatccgcgcaactccgccaccgctattgccatccccaccaccatcgctattcctaccgccgtcgctctccacgccgccggctacgccgttcctgtccccgccagatccggctggagcggagcggatctggtggttattgccgccgcctctctgggtgactccctaggtcacccgagcgtgcgagagagaggggccccgccgccactgtccttgtggccgtgcgccagtagccactcgggcggcagcgaggcggaggagggagaggaagtctcatccgaatttcatgaatcctacgtctacatcctcatctgcatgactaacgaacgggtccttggagtttga

SEQ ID NO: 54448 - DNA, 748 bp, Oryza sativa
  Clone ID: PAT_MRT4530_56551C.1
cccacgcgtccgaaaaaatattgttcaaatagcaatggaaaaaatatatgcatgggaagatatatacgtatatgaatttgaaacatgggaatttttttaagatatatgcatatatatgtaaaccctactttattcatcttacatataacaaaacattactactcacacataataaaggatggaaatatcacatgaataattattattctcacttaaaattaacaaatatgtaaaaaaacaaataaatcaataataataataataattttgaggtaaaacttcatacctctagtttggaaaagatcaatataaaattaatttgtaaaatttaaatattggttgttgcttataaaaaacaaacaggatgtgtcgtaggcacatgccagttttcagttacctttaatactagacgtaacaaaacatttaatcccatacgtactgtcacaaataaatcctttgatcctacttacaaagcattgtcgcacgttgctaaatatagtgcccgatcgatagatgcagtctggtcattggagttcccaaaatcaaacattcgtcagatatagagcagtggctaatgcaaaatcaaacatttgtcagatatagagcaattaatggctaatgcagttttgggaaccatagctgcataaaagggggcggctccatcgttttgttaaaataaaagctatttatggtattataataacatatccatccactggtcatcaaagcaataatagatttatcgatc

SEQ ID NO: 54449 - DNA, 966 bp, Oryza sativa
  Clone ID: PAT_MRT4530_56552C.1
atggttcgccagacgcaaaggttgaaattaatctcaagtgatcgcaaagatgccctgatccaaatccgcaagcctgcgaagaaactatactctcacatgggctggatcattagcatcttcaaaaggaccagactgcacccgtacggggagaatcaaacggtccatgatgctctatgccgatcggacggtattccctacacgggaactgaagccattcacggtaggatagcgattttggtcgaggggcgacaacatccatatcgacggaaaggaaacggccgaaccacccaaaaggccaacatgaatcacatgccgcgacgcctcgctccaaaaaccgcacaatcccgtaaggcggccgacccccgcgtccttggtgcatcgaacccgctccaagtcctgtacctcgccgtacgtcagctccccccttattttagcccccggctcgatcgcaacttcacatcgcgcatccactccacaccacacgcttcactggttccgagcactcgccaccgatacactccagtggcagccgagctagccgagagccaagcaacttgccgtggccaataagctcccgtgagctgacgtctcgtgctcgacggctcggcgctatatataaaagcgtagtaagctggtaaaaaattcacaaggccacgcgcatcttgtctcggccaaaaaaaagagagcgcacacgcggttgatttgtttgaccgacgcgcgtaggcggaggcggcgagctagcggggccggcgggcatgtcgtggtccgagacagacgccgcgctgttcgcggcggtgctggggcacgacgcggcgcatcacctggccaccacgccgccgcacctcgacgcgccggaggggtcgccgtcgtcggccgagctgcaggcgcgcctgcacgaactcgtcgagcggcagggaggggcctggacgtacggcatcttctggcaggagtcccgcggcgccggtg

SEQ ID NO: 54450 - DNA, 193 bp, Oryza sativa
  Clone ID: PAT_MRT4530_56553C.1
acaaagaatgccttttttataattgcaatagagtatttatacaggatcataaattattaatcaacatcccaagccccctgtatgaataaaccgcttgggcaaccctttgcctagccgcccttctaagaaaaacgctgacatggcacctaaccagggccagggtacaagcctccccaatcgatgctacgtctgt

SEQ ID NO: 54451 - DNA, 302 bp, Oryza sativa
  Clone ID: PAT_MRT4530_56554C.1
tcggttttgtcgatttctttgcacaccacccagagagcctgcacatggtttgcttgctctttgacgacgtaggcatcccactcaactacagaccacatggagtgactatggtgcgaacacactacactactagtcaataaaggattcgaaagtcctcactcttgccaatattccacatggaagctctaccctgtggtcgtcagaattgcctgtatggatgaatgaacgctatagaactgtatggacgggcaaccttgccaccagcccatcgccacagataggatctttgatctgaatttcta

SEQ ID NO: 54452 - DNA, 544 bp, Oryza sativa
  Clone ID: PAT_MRT4530_56555C.1
ggtagaactatgactatttatcactatgcatacttagatgtacttaaaattcatcctatggtttcttttcagagttttgtagtaaagaactagatacatatgcaaacttaacccagattcataacctactggtttcacatgctattctacaattcaaatgattaataatttatgatggttcctctattaaatccgggttgattttcaatatttttaaatgaaatcagattcatatacacataccctaaccttccaagaatatgcacagctcagattttactttgtttgtatgaccaaaatctgaaagttctatattttttaagtgcacatgcatgatcaaccatctgaataaaattcatgtttttctttactaatttcctgttcctggttacttgccacccctaccttacttatgttggttgatggtatgttgaatccaatttttaatgaaaattatatcttgttattgtttaaataattggtgagtatattgtcctaatttttttattcattttccttttattttggatatggatatattttt

SEQ ID NO: 54453 - DNA, 567 bp, Oryza sativa
  Clone ID: PAT_MRT4530_56556C.1
atgaatagatctgctcttccccaggcctgtcaacgtggcaaacttgagacgcctagaatgccacgcaagaggacaaaatctagacaagagtctaactggaatggacctcacaacggcgccttcaaaaaggttactacgccgatgacgccgctgtcgtctgccttacgaaccagggcgtggttttcacctgaggaatctaccaaggagggtggaaacaccacggcatcccaccctacaaacaccttcgacgcacggccactgaccaacgcccctcagtcagctggcaagcaagcaggaggccaccttagggggccacccctacgcttcattccacagatcccggcaatgttgccacctcgccgctacacgagaggaggggggcggaagtcgacggacacccggtcatcgttgaagccataccctccctcccataccatagccgacaacatcatcctccgttcaacgataggagaggggctgtcaccacccacaaccgctcccttccatcgccgcctcctgccactgcctagcctcgctggcaagcaagcacacgaggaaaggaggtag

SEQ ID NO: 54454 - DNA, 317 bp, Oryza sativa
  Clone ID: PAT_MRT4530_56557C.1
cttattattattcatccatactcgttgcttctctgtttcgtttccttgaaacatacgtagggcgactgacccggacgctgctccgtcttctgcggggctaccggagataatggatggccgccgccagccaccgactgaacgctgggtccgccaaggagaagaccaggttgtctgacaagaagatggagctgtcttagccggagaagggctgtcctgcacgccaagaccaattgtgatatcatgcgccgactggcgggtgtgccgcgtcgatgaccatcctactggagccacgcgaggtgctgacctcacgggcatcg

SEQ ID NO: 54455 - DNA, 1468 bp, Oryza sativa
  Clone ID: PAT_MRT4530_56558C.1
ccggccggggcccgcatcatgaaaagcccccctctcctctcccctcctcttccccctcccgtccgcaccactccacgccttcctcctcttctctcgcagtccactcgctggtctctccaattcttggcttctttgctctgctggattagcagcagctgctctgcttcttgctctgcccttgtctttgggctttcagggcggtgtgctgaggccgagcggtttgggcggtctcaagaatcgcttgtgcgtgcgggggagttgtcgtgggaggtggggatggagaggtacgaggtgatcaaggacatagggtcggggaacttcggcgtggccaagcttgtccgggatgtgcggaccaaggagctgtttgccgtcaagttcatcgagagggggcagaagatcgacgagaatgtccaaagggagattatgaaccacaggtcactgaggcatccgaacattgttagattcaaggaggttgtgctaactcccacacatttggccatagttatggaatatgctgctggaggtgagctattcgaaaggatttgcagtgctgggaggtttagcgaggatgaggcaaggttcttcttccagcagttgatttcaggagttagctactgtcattccatgcaaatatgtcatagagatttgaaactagaaaatactctcttggatgggagcatagcacctcggctcaagatatgtgattttggttactcaaagtcctctttgttgcactctcaaccgaaatctactgtcggtactccagcttatatcgctcctgaggtccttgctagaaaagaatatgatggaaaggttgctgacgtttggtcatgtggagtaactctatatgtgatgcttgttggtgcgtacccctttgaggaccctgacgaaccaagaaacttccgcaagacaattactcggatactaagcgtacaatacatggttcctgattatgttcgagtttcgatggaatgcagacatcttctgtcccggattttcgtggcaaacccagagcaacgaattaccattcctgagatcaagaaccacccatggttcctcaagaacctgccgatcgagatgactgacgagtaccagatgagcgtccagatgaacgacatcaacaccccgtcacagggcctggaggagatcatggccatcatacaggaggcgcggaagccgggtgatggctccaaattctccgggcagatcccgggcctagggagcatggagctcgacgacgttgacaccgacgacatcgacgtcgaggacagcggcgacttcgtgtgcgcattgtgacgaggccgtgaacttgctttctcttcttggagtgtgctgctccttttgttgtgctgctgttcatttctgagagctccattctgttgttgtgtcagtgtttgtaaacgaggtgctgtggataatctgaactcttttatatgttggtgttcttagctgaaaaaaaaaaaaaaaa

SEQ ID NO: 54456 - DNA, 1373 bp, Oryza sativa
  unsure (1)..(1373): unsure at all n locations
  Clone ID: PAT_MRT4530_56559C.1
ctgcaggaatggcgaaagagaaagagagagcaacgccccaaccaccaccccctctgcccaggccccagatccctccaccccatcgcacgccacaacataacataacaccgcaaacacgcaccctcccaacagacacctactagggtccgccccccccacctacactccgctgcgcagccagcttcgctcgcccgctacctcactcactctcgggtgagcgcggccaccgctgccggcgacgaggtagggaggaggaggagggcaagatgttcgggcgggacccgtggggcgggccgctggagatctcgaatgcggactcggcgacggacgacgaccggagccgggacctggacaggggggcgctgatgcggcagctggacgagacgcagcagagctggctcctggccgggccgggcgaccaggccggcaagaagaagaagaagtacgtcgacctcggctgcatggtcctcgaccgcaagatcttcatgtggaccgtcggcaccatcctcggcgtcggcctcttcatcggcttcgtcatgatgatcgtcaagctcgtcccccacaagcgcccccctcctcctccccccgaccagtacacccaggccctccacaaggccctcatgttcttcaacgcgcaacgatctggtccgctgccgaagcataacggcgtcagctggagggggaattcttgcatgaaggatggcctctccgacagcaccgtccggaagagcttggtcggaggcttctacgacgcaggagacgccatcaagttcaactaccccatggcctggtccatgaccatgctcagctggagtgtgatcgagtacaaggccaagtatgaggcgatcggtgagctcgaccatgtcaaggagctgatcaagtggggcacagattacctcctcaagaccttcaattcatcagccgatactatcgatcggatcgtcgcacaggtgggtgtaggtgacacctcaaaaggtggtgcccaacctaatgaccactactgctggatgaggccagaggatatcgattaccccagacctgtcactgagtgccactcttgctcagatcttgcttccgaaatggctgctgcccttgctgcagcttccatagtgttcaaggacagcaagacttactctgacaagctcgtgcgtggcgcaaaggccctgtacaagttcggtaggctgcagcgtgggagatacagccccaatggctctgatcaagcaattttctacaattccaccagttactgggatgagtttgtgtggngtggtgcgtggnatgtactttgccacagggaacaatacatnacctatcggttgcaacagctnncgggatggcaaagcatgctggagcatactggctcgatagtccga

SEQ ID NO: 54457 - DNA, 219 bp, Oryza sativa
  Clone ID: PAT_MRT4530_5655C.1
atgggggagaactggctccttggttacaattctctccttcggaaggtgcaggctgccgccggcagcggcatctgtggcgaaggatccggttcccaatgcgccatcgtcctcgtagatgtcgagctccgctcaattgcagacaatgtagggggctctgctgtgaatgagggtccgcagctccaggtatggccgaaggtggtcaccggatgtgagatgtag

SEQ ID NO: 54458 - DNA, 2079 bp, Oryza sativa
  Clone ID: PAT_MRT4530_56560C.1
atgggggtggcgccttctaagattgaggatgatagggccctcgtgttatgccaggagaggaagcgtttcgtcagagaagcaatcgacggaagatgcgcacttgcagctgctcactgtgattatattcggtcactgagagacactggctttctgctaaggaaatgttttgaacatgaagcatctgaagaatcgataccaaataataaatcgccgtcttcttttcaggccagtcatatgaaagctgccatgaattccattagaacttatctggagaaggtggcaactcctgtgacagtgactatggtcagtgcctcatctcaagatcctactggtacttcaccattggaccattttgaccaaattcacccaggtgacaaccagttttcacctaaagaaaaggatagatctggccaatgtttggacaaggtggatgatcctagacccttcctagaggagggaatcccagagctcgaagaggaaggggagagaactccttcgaatgaggaggatggttttgcagaatcaaaagatgattttgcaaatgaggaagagaatttctctgaatcaaatgatgctttcctcagtccatccattgaaacgtttgtgccagtgtcaaacagcaacgacgtgtctgataaaaatagttcaacagacaaggcacctgagcatcatggtcatggaagtgtggcatcaaaagatattgctttaccaaatactggttgccaaaatgataacccccaaaatgagaggagaatgactgacattcacacaaatgaaaattatagcaattctgctgtgtccccagttaatgtcgtaccaccttcaggtgctgcctttcctatggtctcaaaggaaccgtatccttatttaagcatatctgtgaagggcctatatacaggcatggtagagattgagagattattttccagagcttgtgattcgggaaaagaagtcacaagggttctcgatgaagataaattacagtttcgcgccctactaccacaagaaacagcgcgtggatcagcatcatctagttttctgtcaacattgtttgcctgctgcagggaggatgtccctcttcctgaaactccttctcaagctgaggtaaaataccttacctggcataggtcagtgtcttcacagttgtcgctgtctagaaatcctcctggggctattactgtcatgcatacctcaacactagataaactgtatgcatgggaggaaaagctttatgatgaagtcaaggtcaacagtgccatatgcaggagatatgatgagaaatgcaagcaactgagagaccaggagtcgagagggaaaaatcaaattcttgttgattttacccgcgctactgtaaaggatttgcattccagaattctagtggctattcagaaaatagacttcatttctaagaacatagaagacataagagataaagagcttcaaccacagttggatgaactaatcagaagtttaactaggatgtgggaaacaatgcttgagtgccatcatcttcaacttgcaatcatgaagctagtatccagcaaacggagtgtaaaattatcatttcagtcagagtctgaatgccaagatgcccttctcctctcagctaagctaattaaattatgttcagacttccaaaactgggtggcatcacacaaggtttacctgtctagccttaacttatggctgcacaagtgcatgaaaccgctgaagaagaggaagggctccaggaagcaaaatgttgttgatgtttctctaacagaatgtgctgttgcacccatatttacaacttgcgaaatctggattaaattaattgacgatttactgaccaatgagttggtgaaagccattgaaaatctcgttgcagatgtcggccgttcctttccgcaccaagagcaggtgctaaatggtgaaacaggaggagaaatcctgagaaataatgcccctgctgatgtacagtcaagtctgatggcattcttagagaagcttgaagccttttcagcagtttcactgcagaagtatattgatctgcagaaaaacatcgacgaggcaaaggataggttttcgagagaagattaa

SEQ ID NO: 54459 - DNA, 261 bp, Oryza sativa
  unsure (1)..(261): unsure at all n locations
  Clone ID: PAT_MRT4530_56561C.1
cctttctttctttttttttttttttacttaaatccttctgcgtcgggggtaaaatcggaggggcctttncctctttcatttaactaatatcaaaacactcaaaccccctaactgcattattcaaactcttgacttgctttgcaaaatcaatcccactaacgaattatcatacacggtgttacctaaacccctctttggggatttatttccataacataactactaaccccgtaataaaaaaaaaaaacaattccaagcacc

SEQ ID NO: 54460 - DNA, 1144 bp, Oryza sativa
  Clone ID: PAT_MRT4530_56562C.1
ggatccccgggctgcaggaatcggcacgaggagaaatctgccgtcgcgctctcgttgtctcctccgctccttgcgccgccgccaagacgagtcgcggctgaacaggggagcgccgggcggcgagctccatctggcgagcagagcagagcagcggaggggaggggatcctggaatcaggacatagatggatccagaggtgaaggactcaaggccatcgaggtctcccggcgaaccaaatcttttcctgcaatggggcagccggaaacgactccgctgtgtcaagacgagggacgacggctcgccatcacctgcgcggaccgatgttcttaggcgcaccataccacgagtgaatcgcccgcttggcggtgatgttgccccgtttcgttcgccgcggcgcccgagcacgctgaaccgaaggaaaaccgagccatttgtgagcgataacaggcactccatgtcactctcgccagagaaggatcgatattactccactaggggttctccattcccattcgagggaaatgggtttgattttggtggtggaatggaagaaaagggaaccacagcactgccaaggttcttcatttcattatccaacaaggagaaagaagaggacttcatggcaatgaagggatgcaagctcccacagaggccgaagaagaggccaaagttgatgcagaagtgcttgcttatggtaagtccaggagcatggctgtctgatttgtctcatgagaggtatgaagttagagagaagaagtgcgctagaaaggctgctgaaattgagcattttgtggggagggccgagatggtggtcgtgggccgtaattgggagcccatgaagagaaacccggcctgccacgggctgcctcgatcaatgccgccgcaggaatttgggcctccatttggcctaccacgtgacaggccgagttggagcccaactgttcagccatcctcggccatcgggaagtccgtcgatccatggcaaccgctcgccggaaagtccgtcgtctccggcaccggcaagtgtacgccactccgtcatcattttgcttgctacacgtccaagacaggaactgcttggcatgtgagcaccaccaaggctcctgcagtgtccgggtctgcgagtgcatcatctcacttctga

SEQ ID NO: 54461 - DNA, 2849 bp, Oryza sativa
  Clone ID: PAT_MRT4530_56563C.1
atgacaccgacggtcctcatggagtttgggcagcaaaggcagattaagcggggctacgatgaaatggcgttccggggcatggcgtcagcggcgccacggggttacgcggagaccgttggcgagtcggagggcgcggcaggcagccccgttcgtgttgactccgaggactcttcggcccccaagcgcaagtgcatcagcctaaacagcgacggcttcgatgtcaagcgggagattttcgtcccagccaagatgtcctcctccgagaggaggcatctccggaagaggttccgcacagagcttgattcggtccggaatctcctcaagaagccggagtttgctgtccctgtccctgtcaatagagctcccgcgctctcgtcctcggctgcccctcgaggtaagaagggacagcgtggtaaccatgtggtccgtggtgccaaggggcgtttcttgcctacaaagccccgacctgaggcttccacggtgttgactgaggatgcgatttttaagcaatgcgatgctattctgaaaaagctgatgactcagaaatgtagtaacatattcgactccccggttgatgctgttaagctgaatattccagattattttcaaatcatcaagaaaccgatggatcttggaactatcaggaataagcttgactctggttcctacacgagtccatctgaatttgcagccgatgtacggctgaccttttcaaatgcgatgacttacaatcctcgtgggcatgtagtgcatgattatgccattcaactaaacaagatgtttgaatcaagatggaggacaattgaaaagaagctggcttccattgccacagaggcgcacgtcgaggttgacagggctgactcaaagaggaggaagactccccctgtggactgcagtgaggtgtcaacagagtgtgtgaggccaacagagtctgttagaccaacagagtctgtaaagccaaaaatgacattcgaggagaaagaatcatttgggaactgtttggcatctttgtctgaggatccggaggtaccttcacacatcattgatttgttgcagcaatgcattgacaacaacacagatcagcttggtgatggagagatagagattgatatccatgctgtcagtgatgacctactattcgagttgaagaaacatgttgacaagtatttgcaagagagagagcagagccagcaggcaaaatctgagccttctgagaatgaggctgctaatgtatctggccttagccactcctctacaaatccctgcaaaggtggtgatccagttgaggaggatgtagatatttgcgggaatgcatcccctatattgatagaaaaagatgcacacaacaatcctaacaagtgtggtagcccaagtagttccagcagtgactctggatcttcttccagcgattctgagtcgggcagtgacagtgaaagcgaacaagaaaaaggtggtagcccaggaaagccgaagggaagtaagagatctgaacaactggtggagcaagaaaagagtgatgttataagtccagtcgatgccatccgtcctgctgatgatgtggagctccgtgagcaggataacgagtcaaagcctgccccagagggggagaattcaaaacccgacaggcaagtctccccagacaagctcttaagagcagccctccttaggagtcgttatgctgatgtgattgttaaggcacaggggattctcagccagggtggagacaaacaggaggagctggaaaagctccagaaggaagagaaagcaaggctgttggctgaaggaaatgcagctatggaagctcgaagagctgaagctgaagctgaagccaagcgtaaacgggaccttgagagggagaaagctcgccaggccctgcaggagatggagagaacggtggaaatcaatgacaacctccatctaaaggatttggaaatgcttggaacggcaaccacagaacatattgtgagttctgttgatgagactagtcctgagcattcccaggatggcatgcccagttttcttcctggatcaggcaatccattggaacagctgggactcttcatgaaagcagatgaggaggaagaggaagaagatcctagcagtgtccccagcactaaagatgcagaggaaggagagatcaactagtcccagtgcttgtgggctagttgctgaattagctgtgcatatggtagacgctccttccttctgcttccaaactagctcgaacaaggccctcaattttgatgctgctggatgtcgtaaattatgcgcctggagtatcgcggtaacctgccctacaaatcatcatatgtgcttggaggacggcacagccataatggccgcgacttgcggtactccgagctgttgtcgggtgtatgtatgtagccatctttgaagtgccatggccaggccgcaaggtgggtaagcaatgagaggaccaaatggttctttgcacatagtgaattagtgatccaggtgctaaagctcccagcggcaaaaggtgttgcccagcggcttatagatttttcgttcgttcttctctagttttgggtttgtccaattgcttcctgctgtaaattcgaattttgatgtagtggaggaagcgatagttgtttgctgggcatatgggcaaataggaaaaagcttctgcttttcttgtttacagggaaaaaaaaaagaaaattcatgcgtcttttagcgcaatttgttgtctcctgtcagatgtttgtcgactgtttgttgtggatgttcaatattctcaatacacaagatatttcttgtctttcctcaaaaaaaaaaaaaaaaaaaaaaaaaaaaaaaaaaaaaaaaaaaaaaggagggcctcgtgc

SEQ ID NO: 54462 - DNA, 358 bp, Oryza sativa
  Clone ID: PAT_MRT4530_56564C.1
atgggtggatctgaatctggaagcggacgaggacgagaggggagagagaagaaggggggcggcagcgtgggaacgtggtacccctgggagtgcgggaccagctcggtcgcgcagaccggggttgcggaaccgaacctgtcccacggcactgctatgcaggttggtgttgcacgcgggactgaccgctggcctggccggttacgcagaacggaggcgcacttcggtctcgcagcccaaaacgcggcaccaagccggtcccgtggagcatcggtgccacattcctaccgcgtgggatcgcactactactccgcacctccattccgcgagaccacaccgaacgttgttttgtccaccaaaa

SEQ ID NO: 54463 - DNA, 379 bp, Oryza sativa
  unsure (1)..(379): unsure at all n locations
  Clone ID: PAT_MRT4530_56565C.1
ccgcccagcgtccgcccatcgtggctnnggaactngggtgatgaataaatgatgaactcagatgttcttctgtttaaaaaaaaaaaataaaaaaaaaaaaaaaaaaaaaaaaaaaaaaaaaaaaaaaaaaaaaaaaaaaaaaaaaaaaaaatattacataacaaccccataaacaatccaatgggcgggggggggggggtagctccactcccnctcnttttacaacttctcccacagaaaaaaaaactgaaccntcccctaaataacccncctctcctgcaaatacccacctttgtcccctcgtaataatattcccctaggcccccaccttttctcccttcccatcagttgcttcaccctccatgccgattcccactct

SEQ ID NO: 54464 - DNA, 2205 bp, Oryza sativa
  Clone ID: PAT_MRT4530_56566C.1
atggagtttgggcagcagaggcagattaagcggggctacgatgaaatggcgttccggggcatggcgtcagcggcgccacggggttacgcggagaccgttggcgagtcggagggcgcggcaggcagccccgttcgtgttgactccgaggactcttcggcccccaagcgcaagtgcatcagcctaaacagcgacggcttcgatgtcaagcgggagattttcgtcccagccaagatgtcctcctccgagaggaggcatctccggaagaggttccgcacagagcttgattcggtccggaatctcctcaagaagccggagtttgctgtccctgtccctgtcaatagagctcccgcgctctcgtcctcggctgcccctcgaggtaagaagggacagcgtggtaaccatgtggtccgtggtgccaaggggcgtttcttgcctacaaagccccgacctgaggcttccacggtgttgactgaggatgcgatttttaagcaatgcgatgctattctgaaaaagctgatgactcagaaatgtagtaacatattcgactccccggttgatgctgttaagctgaatattccagattattttcaaatcatcaagaaaccgatggatcttggaactatcaggaataagcttgactctggttcctacacgagtccatctgaatttgcagccgatgtacggctgaccttttcaaatgcgatgacttacaatcctcgtgggcatgtagtgcatgattatgccattcaactaaacaagatgtttgaatcaagatggaggacaattgaaaagaagctggcttccattgccacagaggcgcacgtcgaggttgacagggctgactcaaagaggaggaagactccccctgtggactgcagtgaggtgtcaacagagtgtgtgaggccaacagagtctgttagaccaacagagtctgtaaagccaaaaatgacattcgaggagaaagaatcatttgggaactgtttggcatctttgtctgaggatccggaggtaccttcacacatcattgatttgttgcagcaatgcattgacaacaacacagatcagcttggtgatggagagatagagattgatatccatgctgtcagtgatgacctactattcgagttgaagaaacatgttgacaagtatttgcaagagagagagcagagccagcaggcaaaatctgagccttctgagaatgaggctgctaatgtatctggccttagccactcctctacaaatccctgcaaaggtggtgatccagttgaggaggatgtagatatttgcgggaatgcatcccctatattgatagaaaaagatgcacacaacaatcctaacaagtgtggtagcccaagtagttccagcagtgactctggatcttcttccagcgattctgagtcgggcagtgacagtgaaagcgaacaagaaaaaggtggtagcccaggaaagccgaagggaagtaagagatctgaacaactggtggagcaagaaaagagtgatgttataagtccagtcgatgccatccgtcctgctgatgatgtggagctccgtgagcaggataacgagtcaaagcctgccccagagggggagaattcaaaacccgacaggcaagtctccccagacaagctcttaagagcagccctccttaggagtcgttatgctgatgtgattgttaaggcacaggggattctcagccagggtggagacaaacaggaggagctggaaaagctccagaaggaagagaaagcaaggctgttggctgaaggaaatgcagctatggaagctcgaagagctgaagctgaagctgaagccaagcgtaaacgggaccttgagagggagaaagctcgccaggccctgcaggaggctagtgaaaaaaactgcatttactggtgtcgagctttctttttcccgctaaaatttgagtggtttaacttaatgcagatggagagaacggtggaaatcaatgacaacctccatctaaaggatttggaaatgcttggaacggcaaccacagaacatattgtgagttctgttgatgagactagtcctgagcattcccaggatggcatgcccagttttcttcctggatcaggcaatccattggaacagctgggactcttcatgaaagcagatgaggaggaagaggaagaagatcctagcagtgtccccagcactaaagatgcagaggaaggagagatcaactag

SEQ ID NO: 54465 - DNA, 274 bp, Oryza sativa
  Clone ID: PAT_MRT4530_56567C.1
cagcaggatgggaggccggccagtggcggcccggcgcggggcggcggcctcaccctccccccatccagatccagctggaggggaggcggcgggatgggtggccagccaacggcaggatgggaggctggccggggccgggttacaaaccggggttaaagagggtttctccagcagtgtcagaggacatggatccgattgttgggcgcggtctcctccatccccgtgcgccggtttccgcctatgaccgccaggcaccgcatcctccatcccctga

SEQ ID NO: 54466 - DNA, 164 bp, Oryza sativa
  unsure (1)..(164): unsure at all n locations
  Clone ID: PAT_MRT4530_56568C.1
aaatataaacnacaacttgagaggtttttaaatagaccgagagttacacaccacacatatcatcatcttcttacctaatttttaacttccgaaccactatactcctaaaactcattacaacacaccaacaaaggtaccaatgttactgaattcaccatacaacc

SEQ ID NO: 54467 - DNA, 198 bp, Oryza sativa
  Clone ID: PAT_MRT4530_56569C.1
ggcctcacgtggaaggaggaggaagaagagaggagaagggggaggaaggggagaggagaatggatggaggaggctaaggctgagagggataaggctgatagcgaagggatggagaggacggtgggatcgaagggacaagggataattaatgagataggagaggacggtggactggcgcacggttcggttgacttttga

SEQ ID NO: 54468 - DNA, 116 bp, Oryza sativa
  Clone ID: PAT_MRT4530_5656C.1
attcaaacaagcctaagctccatcatgattgctgaaaacagacatgaagccagtacacgggctacaaacaaaagatctatgagttacaaaagagcggcaatgaaacaacgaatgcc

SEQ ID NO: 54469 - DNA, 188 bp, Oryza sativa
  Clone ID: PAT_MRT4530_56570C.1
cacaaacaccctcgctctctatttgaattagaaggtgcggtactaatcgacgttaaggtgccacttcatactgcaaatttctacacaacacccaggcagtctacaaattaattcacttcaaagcagcccaataactggatttcagctaatacaacaaattaaactaaaaacaacgggaactaaggatc

SEQ ID NO: 54470 - DNA, 478 bp, Oryza sativa
  Clone ID: PAT_MRT4530_56571C.1
gctgcgggtgcaacacccaatcgcccgcctccttcccacgccaatgcaggtccccggtccggcgagcagggagcaccaccagcacgccgtcggcggcggcggggtgaaggtgaagttcatcgagacacagttcgtcagctccgacacggccagcttcaaggccgtcgtgcagcggctcacgggccagtccgcgccctcgccttcggcgccggcgacctcggcgaggccgagcaggccgcgcgcgcgcgccgcggtcacggcttgcccggcggccgccgtggggtgggcgggcggctacggcggcggcagcggcctgatgacgatggccgcgccggtgaagcaggaggcggcggcgccgcctcccaaccttgaggatctccacgagctccgcgacttctccgacctgttctacccgaccagcgccggcggcggcgggcggcgcgtcgacggcggtggctacggctacccgtactactga

SEQ ID NO: 54471 - DNA, 703 bp, Oryza sativa
  Clone ID: PAT_MRT4530_56572C.1
ctgcaggaattcggcgcgagggagagagagagaactagtctcgcgtttttttttttttttttttgtctttttggtaacaaagcgatgtcctggattaatacattcatattcaggtagcaaacataacaaagctgcacgaaagcagtcatctcaacagacacaactaaaaagaaggggggaaaaaacagaaatcgtaatccatttttcgatgaaaagaacagcagagagctgttatttatcatcatacatcagtcgaattcaagtgctaaagcaatgtcaatgaaagctgaggagcagttaagctaaagcagcaagtgctaaaatcaagctgatagttaggtcccctacagatcgtagttagcactggggctgcccatctttacgcctccggtgatttaacctgattcctcaacctgctggaacgccggactggggtggtcaccgcctcatcatccttgtttctcttcttggcagggatcttctcgtaggtggtgaaactaccataggacgatgtgggttgcgcggcagaatccctcctggacactggatcaaggctcaggctctcgtcctccttggcactcttcctcctgacatagccagaagacaagctgctgctatacatcgaagcgccggagccgccgccgaatctctcggtttcatctgccacaggaggagtctgaagctgtgaacccttcacacgaag

SEQ ID NO: 54472 - DNA, 2360 bp, Oryza sativa
  Clone ID: PAT_MRT4530_56573C.1
atgcagatcatgaagattgatgatggaaggccttaccatagtaatgtttttcatgagcttgtatccaatggcggccctaaagtagatggagaaattgaaagagaaactaaacaacatattttgcttgatacaatggtacaacaaaccaatccatcagaatatagttttatgaaggccgggcaacaaaatgtagataaagccatccagatacggcctgaggatgtttcttatgacaaggatgttgtggaaatcaaattgccagatataatggtctcttctaattatggcgttcagtttgttaaggatgtctgcattgatgagggagtacttgctgatcagaaggctatagcagaaaaggtgtcactgaacctgaattcttcaaagggagatacaaatggtattcggataaaagaaacagcagatgaacctgcaaaatctgttaatgatttaaaatcgcaaatagttgtcctgcccgaagcatgtgttactgatggggatactgtggaacaaaatcatccttgcaaattgcatgatctcgaaggcaacagtagtgtagatggattgactgttgtaaatgttgagaaatcgacgcccaaacaattagtaagtaatgacaatgcagaatattgccaacaaatgggtgcagatgtttctgagagcagtgaaaatcatgggccaaatctcaatggagaaccagttgatcagccacgcgtccgtgattcccatgaaactggagctagtattgcatctgcgatcactaacgtcaatggtttatcagttgagtcaactgctgatggccactctggggtggtgactgaagatggtgtttctggtgtggcactaaataagacagaaatcaaccaaattaatcactataatcccttcatcgcatatggatcattagaggacacgtgggaacccaagtactccctacctacaattgttgatgatgtttattcagtgccctgtcctgtcgaaaagacagacagttttagtgatatcgtctatggtgcactgcgaggatttaattttcttgaaactggtgaatccattgcagaagacagtacattagattctgttgtagaaaattcaagtatgactgatgtccaagcatctgaagaaaaagatgaagcaagaagtgatgacattttgagtgatgagagaaaaattcctgttgatcagagaagtcctgttgaaaattcagacagtttgagtgatcctgttgacagggcacttagttctactgaaacagatggagcgagaaatgaagacagtagattagactctactgaagcaagtccaagtaggtcgtatgtccaaccttcggaagatagaaatgatcaggtggataatttcgtttatggaattagaactgatgcagcacatgggacgagttcaggtacatctccgttaactggtaagacagagcctattgatgcgaaaagtgagaatgatccaaaatgcgagatcgatagtgtccaagacggacatgatttcaacccaagagaagcaaacgatggcacaaatataagtgaggacaacaaagatagtaagagttccacacggcaaacaggaccagtaactgaacaaaatgaacctgacagtgcaaagatgacaatgcaaacagaacctgtagctcaacggaatgaacctgacagtgcaaaagtgaccatgcaaacagaatctgtagctcaaccaaatgaagctgacagtgcaaaagtaacagctcgaaatgttatccgcaatccctttgagtcaagtttttctggacctagcattatatcaggtccactaacaccatcaggtcatataccttattctggaaacatttctcttcgatcggatagcagcacaacaagtactcggtccttcgcatttccagtgctacagacagagtggaacagcagccctgtgaagatggcgaaagcggaccgcaggcgcttgagacgggaccgaggttggggttatagaatcctctgctgtaaattctgaatctgcatgctcccgcatatcttttctttttgagatcagctcttcgcgtcgcgcccctgagctcgtcgtggtagccgtgttaaattcattcaaaatgttgctcatttctcccctttccccaccacccctcctcttgctgcccccctccctccatgtcctgctctctcttttttttactcatctatagcaggttaatggcttgtctggattcggtagtggcttgtaatttgcattgagagtgagaaatgaaggtatacttggtgaaaagtattgtagctgatgagcatccctggagactgtaaaactgaaactggactgtgttaccctgttcagatgaaaacaaaaaaaaaaaaaaaaaaaaaaaaaaa

SEQ ID NO: 54473 - DNA, 255 bp, Oryza sativa
  Clone ID: PAT_MRT4530_56574C.1
atggcgatttggttggattgtgtcgggcgcgctgtgttccgatccaaagcgaagtgggttggcagcagggtttataatatcgtgagaggaacggaaaggattatgccacgcctttcgatcgtcacccgtgaagaacacgagggcgtctccagcgcctggacgtggacaacaatgaacacgacgacgatcgagtcgatcgacgagctcaccttccctgggcgcggcctcggcggcaacgatcgcgaggctgagtag

SEQ ID NO: 54474 - DNA, 1098 bp, Oryza sativa
  Clone ID: PAT_MRT4530_56575C.1
gtgttataacatccttgagtacaaacgccatcatttttttcaaggatgttataacacactaaccttaagagatgcatgcgcagaaagaaagtactgtactgccaattaccaaacctttactacagtattgtattggcttccattgaccagtccgacaaggagaggttactcgtcggacaaatcgagccacgagtcgaactccggcgacccaaggtccggcagcccatcgaacacgccgggcggcgagcactgcatcagctgcacggtcgagacgcccgggttgctgctgctgctgctgccggcagcagtcgccgtgtccgaaccgtgcccctgaagcgcgccaccaccgtacccacgcaccgcgggcgacgggttgaccgcgtggacggggatcctacgaggcagcggccggaagatggcggccgccgggaagccggtgagctcctgcaccatggagcggaagctggacacgtcggtcgccaccacggtggtcgacgagcggcgcgacgtcgacgccgacgggcgcggcggcggcgccgccgcatgcctcttcttggcggcgcgctgaggctgcgcggccgcggaaacgacggcggcggcggcggccttgccagccggctgctgcagcctcccgacggcgtgatggtcagggcgccccgagacaccgatgcacggctggtacttggcgccgaacgcggtgtgcgttggcgccgtgcattcgtggtcgcacgagtacattggcttctcgtgacagaggctcaatagtgtgtgtaggtttgccagtggaatagctcttcggtgattatcccggtagtatattctccaggcagacgatcttttgggccaagcagacacataaagtgatgttttttctcctttttgttgcacttgatatagttccattggccatttctttctagatatgaactcgatgacaggtagttcatatgatttgcggtttgcggatgctgccctctcgtgtgaccacgctgctagtggattcccaagtagcgggttaacttgaccttcaccccatgtgacatcaacgtggcgcttatgtggcactaaaatgaaaacaaatctaaataggatccacat

SEQ ID NO: 54475 - DNA, 415 bp, Oryza sativa
  unsure (1)..(415): unsure at all n locations
  Clone ID: PAT_MRT4530_56576C.1
tttttaataattcttcttttttttttttttttttttttggtttttttttattttttttgggggtttcccccccctcccatnggggggcaacaattgaaaagcagggctttcaacaaaggcccacatgaatacaaagcaatccatccaccccaaaaactaccgattcaatggccgaaaaaaaagccggggggaacccgaagggcccattggaagccccagcaacgtggccttcgagaggatgccccacacccctagaaaaaattaaaatttccaaggggaaaagcaaattttgcccgaaaaacaagcttttaaaggcccgtttacccaaagcaagccttaggggcccccaagggaactgcaaagtccaaatagatggggccaaaaaaggccaaacccaccaggggagtcaagagga

SEQ ID NO: 54476 - DNA, 518 bp, Oryza sativa
  Clone ID: PAT_MRT4530_56577C.1
catctcaccaccggcttgcttccgtcgcagccgactggtgttcttgcctacacggttggttggtcataccaccgttgatgggcatcttcatcatcaccgaccagttgtctcatctgctgccgactggtgtcttcatctatatggttgattggtcacaccaccgttgataggcatcttcatcatcatcgccggctcgcctccgtcgccgctgactggtgtcctcgcctatacggttggttggtcacaccaccgttgatgggcgtcttcgttttcactatcggcttgcctctgtcgccgccgattggtgttttcacctatacggttggcggactccgccatcgttgatgggcctcgttatctacaccaccggcttgcttccgccgtcgccgactggtgtcttcattgttattgatggacgactgttcccacattggtcacccctacatggtgcgccaactgtcgaaataagatttcggcaatataaaagtgtgatctgccggttagtccggccagtccct

SEQ ID NO: 54477 - DNA, 180 bp, Oryza sativa
  Clone ID: PAT_MRT4530_56578C.1
atgcagcacgagggccacaccgacaccagcgctccgccacacaccgcgcttgcaggtgagcacaacgtggaccacctcgtggttcatgtcgagcagggcgtcacggagcgcaggcgggggcctgcgtgcctgggcctgtggctccgcatcgttcccgcactcatcgtcgttgcagcatga

SEQ ID NO: 54478 - DNA, 209 bp, Oryza sativa
  Clone ID: PAT_MRT4530_56579C.1
ccaaagctaattaaggaaacataaaaatcacctttcaacagggatgtatcggtgctgtgtgtttttttggggggggggggaaaaaccgaggggggggataaactatatagggggggctgacaattgacgtggaggagaatttttgtactggaaataaaaaccctaagatacacgcgtgaagttgaggaggatccaaaatattaggggct

SEQ ID NO: 54479 - DNA, 2316 bp, Oryza sativa
  Clone ID: PAT_MRT4530_5657C.1
atgcctcgtcagcacgcgccggcgttcacgccggaggcggcgtcggcgtcggccaccggcggggccggggagcggcagagcctcccggcgctgcaggcgaagatgaagcgcgacccggaggggtacgaggaggagctccgccagctgcggcgccacttcgagtcatcggtgttcctcttccggcagcaggcggcactggcctccacgtcctcgtccggcggcggaggggaggtggccaaggagctcggcgacctcgcgctgttcctcgcccacgtcgcgcccttctacccggacgacctcgctgacttgcccgaccagattggtggcctgcttgacaccaacgcgcgcgcgctgccgtccgggctccgtgtgcacctcgtgcaggcgctgatactactggtgaatcggaagattgttgatctggaggacacaatggagttatttatggagcttcaagttataggggaccgggctgtcaaaaaactagcattctcacatattgtacacagtatcaggagaatgaatcagacccacaagaatgaagccaggaatcgtaaactgcaaaacatccttttcacattcctacagggcgaggaagagtcgagagcaaagagggcctttactattctatgtgatcttcaccgtcggagggtctggtttgatgaccgcacagcaaatgctatatgcaatgcttgtttccatggttcttctagaattatgatagccgctatttcattccttcttgggtatgaaaacgttgagcaagaagatgatagtgatgcatccagcagtgaagatgaagctcaaaaccctcaaattattcttagtaaagaggatgtttacaaggcaaatcacaagggcactgctgctactaagaaaaagaagaaagctaaattgcagcgtgtgattcgtagtatgaaaaggcaacaacgtaaatccactgaggacactggctccaattattattcaccactgacgtatttaaaggatcctcagggttttgctgagaagctcttctctcggctccagaaatgcaatgagcggtttgaggtaaggatgatgatgttaaaggttatagcgaggactattgggctgcatcacttggttttgttgaacttctatccatatcttcaaagatacgttcaggtgcctcctgatgcagttgaaccactgtttaagcagatagtaaatcaatttgtgcatgatcgttctcgcccagagttgatgaatgaagatctactccaggaccttgttttatacaaaaagtcccatgaaaaagctgtttccattgccgctcgttctctaattactttattccgggagatctgtccttctctgctagtcaagaaagatcgtgggcgtcctgctgatccgaaggctcgaccaaaagcattcggcgaagcaactatcgcttctgatgtgcctggagctgagttgctagatgaagatttttcatcagaaggggaaggctcagacgatgagtctgatgcttttgattctaatgatgagaaagagttgcaatctgctcgtggtactaaacaaaatttggatggttcgtctgaagcaaacaagcttgacacagatgaaggtatgaaagaggaagatcaactatctggggatgaagatgatacagaggaactagatgaggatcaagacatctctgacaatgatagtgaagaaaatgatgatgagctagaattggactctgatatggatgaggagaatgatgtatctgaatctgatgatgatgaggaactcagtgagaaattggatgattctgatgaaggctctgatcaggatgatgacagtgaccaggatgataagtcaaaaaacagcagtcgcaaggcaaataagagaaagttgagtgattatatagggcaacttaatgctgcagatgcaagccttcgagctctgaagaagttggcaggagccaagaaggctgaagcttcgtgcgatgaagctggtaaaatcttatctgatgaagattttaagcgtattaaggagctaaaggcaaaaaaagaagcaaaactggctctggcacaacatggactcggcaagggccatgacacaaaatcagtaacctttaaaatgccttcttctgatcagcttagtctgaaacgggttgacccatccaagcttgaggctcacataaagagaaagcttacgaaagaggagagattagaaatggtgaaggctggaagagaggatagaggaaaataccaagcaagaacagctgtgaaacagaaaaagttgcttttattccttctctacttatatgcttctcattgcgttttagaccggtggcttgagcaatag

SEQ ID NO: 54480 - DNA, 308 bp, Oryza sativa
  Clone ID: PAT_MRT4530_56580C.1
gtccacttcgtcggcggcgaccaccccggagcataccggcggcgagggggaggaggagaaagctccccgaggaggaagaaggccgaagctgcctcaggtcgccggaaccctaggattccccggcggaggtggaggcgcggagagggggcgtcctccagatgcggccgtccgggatttgaatggggggcagatctccggggcgaaggaggcttctagaagcgggctgagttgaaaacctagggttaggtttggtggggttggagctttcgtgcttggtaaccgggatgggtcggagctcgcgaggtgga

SEQ ID NO: 54481 - DNA, 600 bp, Oryza sativa
  Clone ID: PAT_MRT4530_56581C.1
ccggccggggagagccaaactatcccacccccaacccggtaagctctgctctgttcacctcgtcggccggcgccgccgcgtgtttgctgcttgcttcccgtcccctcgtcggagaggatgctggcgacggcggcgcggtgggcggcgaagaaggggaagccgaagatggcgccgatcgagctcccggcgccgccggagcaggcgcagtccatcacgcgcaccatcttcgacgtcgtcagggagcacggcccgctcaccatctccgacgtctgggaccacgtcaaggacgttgggctgaggggcctgacgagcaagaggcagatgaagatcatgatgcggtggatgcgggagaagcagaagctccgcctcatctgcgaccacgacgggccgcacaagcagttcctctacaccacctggttcaccaatcccaagaacgcgccgcagaggcccaagagagatcatcatcggcagcagcagcagcagcagcagttcaggggagagcctcgcaaaccatgaaggacgggaccggaagaacaatgaagctgatgaatgcaaagcttgccatctgccgtccagtgagattcttcgcacttgtgcttc

SEQ ID NO: 54482 - DNA, 294 bp, Oryza sativa
  Clone ID: PAT_MRT4530_56582C.1
tcacctctttgggcccaatgggcagtgtattaagttgggtccattagggacacgtcgtagggtgagagaacgaccccagcactcctgtggtcgtcctcttcctcttcttatagctttctccgccgccaagaataatcgggttttgtttagatcaaagtatagcgtcgctactttgccgagttgatcccgtgatcgattagattgccggattgcctcgtagttgggctgatcgtgcatccgtcgagattcacgaccacctctggagttggggtaacgattgctaaggcgcaacat

SEQ ID NO: 54483 - DNA, 453 bp, Oryza sativa
  Clone ID: PAT_MRT4530_56583C.1
atggcgccgatcgagctcccggcgccgccggagcaggcgcagtccatcacgcgcaccatcttcgacgtcgtcagggagcacggcccgctcaccatctccgacgtctgggaccacgtcaagatggaaactgtcatccctgaacgatcttgtgttcctctgattgccaccctgatcgcatgcatccctgacgagcgagaaaatctttggcattttcgtgtccaggacgttgggctgaggggcctgacgagcaagaggcagatgaagatcatgatgcggtggatgcgggagaagcagaagctccgcctcatctgcgaccacgacgggccgcacaagcagttcctctacaccacctggttcaccaatcccaagaacgcgccgcagaggcccaagagagatcatcatcggcagcagcagcagcagcagcagttcaggggagagcctcgcaaaccatga

SEQ ID NO: 54484 - DNA, 478 bp, Oryza sativa
  Clone ID: PAT_MRT4530_56584C.1
cccacgcgtccgcccacgcgtccggggcaaggttctgagtcagatgaacaccagaaacccttccccggagttgtgttgcagagtggtggccattggcccatttgcttccgccctccgccatcatgggttgagttgttggtggcggggtaggcagcaacggcaccttccgatcctccgccgccgctggttgagatgttggtggcggagtgggcagcaacgacgctttcctttcctcgtccgtcaacggaactcgaggggaaagcgccgaagaggaagcttgattcattttgccgacgaggtccagctgctgacgaagatctcctacttccgcgcgcaaatcgtggatcgccgattccacctgcggatgccatccgttgactcccgcatccagcttcgccaccacagcttgagtctccgcttgcttgttgttcaacgacaccagcgactcctgaatctcggccaaaatttttccgaagtc

SEQ ID NO: 54485 - DNA, 748 bp, Oryza sativa
  Clone ID: PAT_MRT4530_56585C.1
cggaattcccgggtcgaccccgcgtccgtccccacctccatcatgtccatgcgccaccaggatcccgtcaaagcgctgctcgcctactccccatccccacctctacatcgcctcgccgcctgatctcgctatcgacgcagatggccgctaaatcccgtcgcccatcgctatctgatcccatcgccaaggctacgagctagccgatgctgtctccatctgcatcgccgtcctcctcgtgcccacctccatcagttgcggtggctcaactatttgcgaccggggatcaagagggtaaatgtctctggcaacgaggaggaactcaatctcaggctccatactctcctcggtactattaacagtgaaatttggtaagccccaaagttatcatcggcctagagtcagtattggtttcaaaggcctggaatcggccgatgggaattatcaagtcgcccatagtcatattcttgctatattcggttatgaaaattaatctaagcttatccagaattgaccgagttcaagaaggatgcggcatggcaaattatctaataattaggaagagtttattagtttccttttatctttaggaaagtgtgtttagtgtccaataagaactttatgttttccttttatctttaggaaagtttatttcttgtccaataaggactagtatctgcctatgggtataaatatgtacacctggggttattgtaaactatctcacagatcaatacaactacttcggcgc

SEQ ID NO: 54486 - DNA, 645 bp, Oryza sativa
  Clone ID: PAT_MRT4530_56586C.1
atggctggcaggataggtggtggcatggctgccttgagtgtatcagagatcgagatagtacaagaatgtgggatgaaaattgcagaaaaatgtgatggtttaccactggcaattaaaatatggtcaaaaatgggacttcctgaagaactaaacaaggcaatatacctgagctatgaagatctgagccataacttgaaacagtgctttgtgtattactcactatttcctaaagatgaaatcattggtattgacaaaattgtttccatgtggatagctgaaggattcattggtaaagatggatattccgcacagtcagctggtctagattactacaaggagttaatcaagaggaatcttttagaacctcagaatgactactacaatgaagaacattgtatcatgcatgatgttgtacactcctttgctcagcatgttgccagggatgaagcactggtgcttcgggacccacaaaacaatggaattctctcttcatcaaaatttcgtcggttatctatatcagcagagcaaatagagtggagcaatttacagaatcagcattgtctaagaacattgatattgttcggaaacatcaagttgaaacctggcgattccttgagaattcttccatctctacggacaatacat

SEQ ID NO: 54487 - DNA, 1051 bp, Oryza sativa
  Clone ID: PAT_MRT4530_56587C.1
tctccctcttggtcactactcactccctctcctcccctctcgtccctgccccctctccctatcgtttctccattgccacagcagagaaggtggcggtgatggcatcagtggctcccgcgggccggatccggcgatggcagtggcgtcggcggctcccgctggcgaatccggcggcggcggtgtttctggcaggtggatctagcggttctctaccccctcgtcctcaccctccgtgcccaagcttctcccgcggctgcagcggtggcatcggcgctcctgcaggcagatccggcggaggtggcggcgacggtgtttccagtgggtgtatctagcggtcctctaccccctccttctctgccgcaagcttctctcgcagatcaggcggcggcggcggcttctaccttcgatccattggcgacggcgatgtcagcgagcaggcggatctggccgaggggacctgcccgccgccgccgacgtcccctcgggcggatctgctggtgttgttgattagcttctggaaggttctcaaagatgttgtcctgcctgtcggcatggctggtgaacctgcgacgcaacccgctggcccgtctccacatgaacgtcgtcgcctcccacctgcacaaatacgggctccggtacgatgatctgttcgatgcctaccagtaccatggcctcgacatcaaggaggccctggcgcggctgccgcgggaggtggtggacgcccacaaccagcggctcaagcgcaccatggacctctccacgaagcaccagtacctccccgccgatgagcaggcgatgcagacaacattaagaggctatttatctgatgcctacctatccagccaccgtgtttggcgagaacgacggcgatgggataagcctactactttatttcaagctatctggcagttttgacaaggaaatttctcctcaactaaaacaatcaatcaagatgcctacctatccagccaccttgtttggcgagaacgacggagatggggaagcctactgctttatttcagctatctgacagttttgacaaggaaattcc

SEQ ID NO: 54488 - DNA, 201 bp, Oryza sativa
  unsure (1)..(201): unsure at all n locations
  Clone ID: PAT_MRT4530_56588C.1
ttttgatctaggaaattnctataaagatagtatttgtgngtacagaattacactgttcttacatccacanatnagatggatgncagcaagaatcagcctcagaatcagaagaagancattaagggtcaagcaggaggaggntgtaatgatacacgagttcagcctagtgcanagcgagtgacctcgtaggncaagangtag

SEQ ID NO: 54489 - DNA, 209 bp, Oryza sativa
  unsure (1)..(209): unsure at all n locations
  Clone ID: PAT_MRT4530_56589C.1
tgcagctccatccnctccatccncnntcnnctccgcncgccagtccgtcctngtnatctnnaccgacccagnccacaacctcagcgacgtnttncagcagtgcttcaccaagttncccaccntcgtccngnggcttcaacaaacgntcatacggcaatgagaaattcnatccaaaggtttgnaaaattnaatagactttcngntaaatt

SEQ ID NO: 54490 - DNA, 1281 bp, Oryza sativa
  Clone ID: PAT_MRT4530_5658C.1
tcctccaccgccacccccaccgccgcagcatcgccgacgagctagcccgccgccgctcgagcgcaagttgaggagaggagggatggatcggtaccagagggtggagaagccgagggaggaggcgcccatcaaggagaacgagatccgcatcaccacgcaggggaggatgcgcaactacatcacctacgcgaccaccttgctccaggataaaggttccgatgaagttgtattcaaggcaatggggagggcaatcaacaaaactgtgatgattgcagagctgatcaagagaagaattgttggtctccaccaaaacaccaccactggatctactgatatcactgatatgtgggagccactggaggaaggcttgctcccacttgagacaacaaggcatgtatctatgataactattaccctttcaaagaaggagctggacacatcctccatcggatatcaatctccgttgcctgctgataaggttaagcctttggttgaatacgagaacgaagaagatgctccctcacctgctggccgagggagaggccgtggtggtcaaggtcgtggaaggggaagaggcagaggcacacgtggaaatggttacatggactatgctgatggtggatgggaggatgaccatgctcctcctgcatatgcgggcaacgggtacacccgtggaagagggcgtggttttaggggccgtggcaggagaggtggcggctatggagcacaacctgattatcagcaagatggaggatactatgatgaggcaccagttcacgcgccgccccgaggccgtggtcgtggtcgaggccgtgggagaggcccggtccgaggtagaggacgcggtggcaacgtcaatggcgttatgcatgctactgcagttggcgcctaagctggctgctgctattccaaagctgttgtttgttggatgcctgctccaagtatgaagatgtatcatctgtgttgtttatgggttaacaccatactctgtataagcttgacattctgttagaatgctgccggattttgatttttaactaggtttgtaggatagtctctataatgtttgtttttcttccagtagtagttgcaaactaattgtagtgttcagttggtaaaggtttagagcagtgcattctttcaatttttatataaaccgaaatcctgttgccatcttataatgtgccagcttcaaaaaaaaaaagcgcaaatgcagttggattaaaaaattttaaaaaaactcgagactagttctccctcgtgccgattcctgcagcccgg

SEQ ID NO: 54491 - DNA, 158 bp, Oryza sativa
  Clone ID: PAT_MRT4530_56590C.1
cagaggtacgagtccgagaggaccatggtaaacgaatgtgtatcccctgagcgattcgtcacttcacgggcaagatgcggaatatttgtctcatctcagagctatcatgaatattaggttttgccgaggattcaactctggcgttcagtaccggtacg

SEQ ID NO: 54492 - DNA, 2785 bp, Oryza sativa
  Clone ID: PAT_MRT4530_56591C.1
tcatccgccgcgcctgctgcgcttggtcctccggtgactgtgaagctgacgagggagaactatgtcctgtggcgtgcacaagttctcccggcgcttcgcggagcgctcctcaccaactacctcgacagcacggcagaagaaccggccaagacaaggacgactgtcgacaagaatgacaaggagatcgtcagcaacaactcggagtacgcgatgtggatggcccaggaccagcaagtcctggcctatctactcaattcgctctccaaagatgtgctacagcaagtagcgacactaaacacatctgctgaagtttgggcggccatcaccaacatgtacacctcccaatctcgagcacgcatcaccaacctcaggatcagcctcaccaactccaagaaaggatccacaacaactgccgcctacttctccaagatgaagggcctagctgacgatctggcgtcagctggcaaacccattgacgacgacgagctggtctcgtacatcctggcgggcctcgacatcgactacaacccgctggtctctactgtggtaggcagatctgatccaatttctctgagtgatttgtactcctagatggttagctacgacaaccgcatggatcatcttcaaggcggagggcagatccaatcttctgcaaatgctgctttccgtggtcgcggcaacaacaacaacaatttccgtggtcgcggcaatggaggctgtggccgtggaaacggtgggcgcggtggcggccagcaaggaccgcgtccggtctgccaactttgtggcaaaactggccacacggtgattaagtgttggtataggtttgatcaaacctaccagcctgaagagaaggttgcagctgcggcaacaaactccgcctacggggtcgataccaactggtatgtcgactgtggtgccacagatcacatcaccggggaactcgacaaactctccattcgagagaagtacaatggtctggatcaggtgcatgcaacaaatggctcaggtatgaacattagtcatattggtcattcagtaatttctaccccaaataaagatcttcatctaaagaatatcctttacgttcctactgcgaacaaaaatcttgtctctgcgaatcgcttagcctttgataatgatgcttttgttgaaatttaccccaaattctttaatataaaggatcaggcaacgaagaagctactacatcacggcagaagtaagggatggctctatcctttggctccagaacccggtggtcaaagcccaagtctgaataaaattgccttgagcattgtcaagccatcttccattaggtggcattatcgtttagctcatccgtcttttcaaattgttaatcgagttgtcaaaagttttaagcttccttgttctagtgagtccaataatgtcgaacacatttgtgattcttgtcaaagggccaagagccatcaattgccgtaccctaagtctatgagtttatccaatgttccatttgctctcgtattctctgatgtgtgggtccggcgcctacctctattggaaaacatgattactgtgtgagctttatagatgattttagcaaatacacatggatctatctattgaaaaagaaatccgatgtgtttcaagcctttcttaatttccaacagtatgtagagcgacaatttaacaccaaaatactcactgtccaaactgattggggtggtgagtacgaaaaactgaactccttttttcagaaaataggcatagttcatcatgtctcatgtcctcatgcacatcagcagaacggatctgcagaacgcaaacatagggatatcgttgagaaaggacttgccctcctatcccaagcttcggttccctttaagttctgggatgaagcatttcttactgctacgtatcacatcaataggctacctagttcagttatctcctttaaaactccctatgagcaacttttttctgaaaatcctgagttcagtcatcttcgtatcttcgggtgtgcctgctggctgaacctgagaccatacaacgcccgcaagctatctttccgatccatccattgcgccttccttggctatagcccccttcacaaaggatataaatgtcttgagatctctacaggccgtgtgtacatctctcgcaacgttgtctttgatgaaacaattttcccttttgctgccttgcatcccaacgcgggtgcccgcctgcgacgggaaatctccttgcttcccactcgactgcttcccgtcactgatcaaaggggagaaattactaatgatcatatgctaacatgttctactaatccctcttgtggtgatcaagcaacaggagcacaggtcgttggcgaaaattcggcgcaaaatggtgaaaatctggtgcaaaactcagatgaaaatcatggtgcctgaagcaagcggtgctgggcacgaggatgatttgatggctgacagcagcagcggatccgagggcagtcacagtcatgcacagtctacaccaagcacaggtactggatcccaggagcattcaaccccggggtctggccaatcaggaccgaattcagcattgtcgtcaggatcgcctgcgaccacttcatcgacacatgggaacccgacaggatcagctgtggatgacacggctggttcaggatcttctgtgcagcagtctgaacccgtcaggccgcgaactcgcttgcagagtgggataactaaggccagctggttagatgttgatggaacaattaagtattctttggcttgctctacaggtgaaccagctaatgtacaagagt

SEQ ID NO: 54493 - DNA, 516 bp, Oryza sativa
  Clone ID: PAT_MRT4530_56592C.1
atggcagcacggcgcacggcggcacggcagcacggtggtggatggcagcacggcaccggcgacggtcgtgcccgcgtccgctccccgcgcccctccgcgacctcctcgccgacttcctctctctccaccgttgcagccgtcgtcgttgaccatctccgcggtggacccgccgccgtcgacctcatctgcgcgggagagctcgggagccgccgctgccgttgctgtcctcgtcgtgctgcgccccctccgcgacctccccgcgaagcgtcctcgtcggcggcggcggcctcgctcgcgaccgtcctcgccggtagcggctatgctcgcgtccgcctccacggccgtcctcggcagcagctatgccccctccccgacctccctgcgagcgtcctcgccggcggtggctacgcccgcgcccgcctccgtgaccttcctcggcggcggccatgcccctccgcgaccgtgctcgtcggcggcggcaaagatcgatggttgtatgttgattggtttagttag

SEQ ID NO: 54494 - DNA, 1579 bp, Oryza sativa
  Clone ID: PAT_MRT4530_56593C.1
caggagtatttagagagacccacgcgtcgggcgagagaggacagtttggataggagaagagaggagagagggtgcttgctgtggaaggagaggactgacaggcttggagcaagcattccatctcagttctcatattaggtgtgaatgaccaagaaatcaacaatctcaaggagccatgagcacacagagtgtcattgctgtaaagcaattcagtggccctgacaaaatcgcacaagcatacactgttccacagccatcagctcatgtgctctccaacgctaactatgactatgatctctgtggttcaacaaatagtacctcattatcatgtgctatccaatcctcaaacattaagaccgaatcaatcagttcatctagcctgccaaagatccttccatttagtactgactcaaatggtgaaagttcactttctcgcatgtcgcaagccgagttttcggacccaattttgtctagttcttctacattttgtacaagtctgtacacctcatcaccgatgaactctggttcatgccgaaaaaccggttatttgcctttcctgccacaacctcctaaatgtgagcagcagcagaattcagctgggcaatcatccagctctctgatgctccttgatgctgatctcagaaatagtggtcatgctgatgatgaacacacagatgacctcaaggactttcttaacctctcttcagattgtagcttccatgggaaatgcagtgccatggcttataatgagcagatggagtttcagttcttgtctgaacagctcggaattgcgatctcaaacaatgaggagagtcctcggttagatgacatatacgacagaccaccgcaacttatgtctcttccagtgtcatcttgctctgatcaggaggatctgcaggatgcaagatctcctgctaaagttcagttgagttcatctcggtcttcatctggaactgcatcatgtaacaaaccaagactgaggtggacaccggagctccacgagcgtttcgtagatgccgtgaacaagcttgaagggccagaaaaggcaactcccaagggtgttctgaagcttatgaaggtagagggcttgaccatctatcatataaagagccacttacagaagtatcggcttgcgaagtatcttccagagacaaaagaagacaagaagcaagaagaaaagaaaacaaaatcagtggctaatggaaatgatcatgcaaaaaagaagagtgctcaaatggcagaagctcttcggatgcaaatggaggtccagaaacaactccatgaacaactagaggtacaaaggcaattacagctgcgcatagaggaacacgcaagatatttgcagaagatattggaagaacaacagaaagcaagagaatccatatcctcaatgactagtacaacagaaggagaatctcctgaattcgcaccgatggagaaaaccgaggacaaagcagaaacctcttcagcacctttgtcaaagtgtagaattacagatactgatgcagaatgccattcaaaagttgataataaaaagacaaagcctcaggctgatcttgaaatggtgcatgacgaataa

SEQ ID NO: 54495 - DNA, 3191 bp, Oryza sativa
  Clone ID: PAT_MRT4530_56594C.1
gatataaccaagacctagcactattcgaccaaagagctggccatgaagatcgctacaattggactgtatctgttgctgcttatggtgtgcagtgcagtccaaatcatttgcagttcattgtatggaaacgagacagataagctctcactgcttgagttcaagaaggcaatcactcttgatccccagcaagtcctgatttcttggaatgacagcaatcacttttgcagctgggaaggtgtcctgtgcaggatgaagactccacatcgtcccatttctctaaaccttacaaaccaaggtttagttgggcaaatctccccttctcttggaaacctaacattcctaaaatttctgttcctagacacaaattcattcaccggagagatccctctgtcccttggtcatctgcatcaccttcgaaccatttacttgagcaataacacattagaaggagcgatacctgattttacaaattgttctagcctcaaggccctatggctcaacggcaatcacctagttggacaattgattaataatttcccccctaagcttcaagtgctgactcttgcatctaataattttactggaactatcccttcttcctttgccaatatcacagaacttagaaatcttaatttcgcgtctaacaatatcaagggaaacatcccaaatgagttttcaaacttcctcatgatggagattcttattttgggtggcaatatgttgacgggtaggtttccacaagccatcttaaatatttctactctcatcgatctttttcttaattttaatcatctaagtggagaggtaccatccaatatcctttactctcttcccaatctacaagtacttgcattggacttcaattttcttcaagggcatatccccagctcattggtgaacgcctccaacctacgtgaactggacatatcaagtaataatttcactggggttgtaccaagttccattggcaaactaagcaaactgtattggctaagtcttgaaggcaatcagctccaaacacacaaaaaggaagattgggagtttatgaacagcttagccaactgcactaggctacaaattttttcgatggcttataatcgactagaaggccatctaccaagttcgttaagcaacttttcgactcatctccaacgacttcatttatacggaaatgaaatatctgggtttctcccctctggcattgaacacctctcaaacttgattgatttatcattaggaactaatgactttactggtacccttccagaatggcttggaaatcttaaacagttgcaaatgttaggtttatatgaaaactatttcataggatttattccatcgtccttatcaaatctatctcaactggtatatcttggactacattttaacaagtttgatggacacataccaagcttgggaaacctgcaaatgcttgaagtattaaacatttccaacaataatcttcattgtataataccaactgagatttttagtatcatgtcaatagtacaaatcgacttatctttcaataacctacaccgaaaattttctactgacattggcaatgcgaaacaactaatatctttagaactttcatcaaataagctatctggagatatacccaatgctttgggtaattgtgaaagccttgaatatatcatgttaggtataaacagttttagcggtagcatacccatttcattaggtaacataagtaacctaaaagttctcaacttatctcacaataatttaacttggtcaataccagcgtctcttagcaatctacaatatcttgagcaacttgatctgtcattcaaccatcttaacggtgaggtcccagtagaaggaatattcaagaatgcaacagccttccagatggatggaaatcagggactttgtggtgggctaccagagttgcacctacctgcgtgtcctaccgtgttattggttacatctaagaacaagaactcggttatattgaaattagtaatcccactagcctgcatggtatcgcttgctttggccatatcaatttattttattgggaggggaaaacggaagaaaaaatccatatcattcccatcactcggtagaaagttccccaaagtttccttcaatgatctttcaaatgcaacagatagattctctacagccaatttaattggaagaggaaggtttggttctgtataccaagcaaaactatttcaagacaacattgtggttgccgtgaaagttttcaatctagaaacaagtggatcgcaggagagcttcattgcagaatgtaatgctttaagaaacttgagacatcgcaatctagttcctatcttcacactatgcggtagtattgatgctgaaggcaatgatttcaaggctttagtgtatgagttgatgccacgaggggacttgcataaattactatactcaaccggagatgacggtgatgcttcaaatctgaaccacattacattagctcagaggataagcataattgtggatttatcaaatgcattggaatatttgcaccataacaaccaaggaactattattcattgtgacctgaagcctagcaatatccttctagatgacaatatgattgctcatgtcggagattttggccttgtgaagttcaggaccgattcctccacatcttttggtgattccaactcaattttttcccttgcaataaagggaaccattggatatatcgctccagaatgcgctgagggagatcaagtctcaactgcctctgatgtttatagctttggagttgttctcttggagttgttcattcgtaggcggccaatagacgctatgtttaaggatggactgagcattgcaaagtttacagagatcaacttctctgacaggatacttgagatcgttgatccccagctacaacaagagttggacctctgcctagaagctccagtggaagtaaaggagaaagatatacactgcatgctctctgtgttaaaaattggaattcattgcaccaagccaataccaagtgaacgcattagcatgcgagaggcagccgccaagctgcacataatcaaagatgcctatctcagagggaactgaagaagcagtgcagttacctcaatggttttggttttgtctgaacgcattatatattatatatagcattatactagcatgcatgtgtgcatcttgttctgttaaatagatcg

SEQ ID NO: 54496 - DNA, 1671 bp, Oryza sativa
  Clone ID: PAT_MRT4530_56595C.1
agggagccagaagtggcaacggcccggaggcggaaagaaagcaaattgctacttgagagaaataggccagcaatcacaactttcatggctattgtgcacaaggggcatgactatgtccgcagcaaaattaagtatacttatcctatttgtcgggcatggatgtttagtgctggaaagttgatattgctcttgttggcagtttggttcaactgcaacataaggggcttcgattctttgctacgcctagggacaaactcactccttacagtactttggtgcagtacactatcagtttttgcaatgattggactaaagaaaatgctaatattaatggtaattgctgctgctgtagttgcctttgttggtcttggttttgctgttctggttatcgcagtggctgcagtggtgattttgtggctgtatggaagcttttggacaacaagcggcatcataattctcggaggtgcttcctttttcctgaagcatgaacgttttgcattgcttgtcacctgcctatattcaatgtattgtgcaaaaaactatgttggatggcttgggttacttttgagcctgaacttatctttcatttcaagtgatgttcttgtgcaactcctaaagaacaatgtagacaataacaaatctgctggctcttcaaggaactctgagccagataatacctcacagtccgagtatgctcaaccatcagatcggggccctggcgatccttcaactagtggagctgagaaagagttgacctctgaagatgaagtgtctcgtttactgaactgcactgatcactattcagcattaggcttccatcgttatgaaaatatagatgtatcattactcaagagagaatacaagaaaaaggctatgttagtccaccctgataagaacatgggcaatgataaagctgctgatgcatttaaaaaacttcaaaatgcatacgaggttcttcttgattctttgaaacggaagacatatgatgatgagctaaggagggaggagcttttgaactacttcagacggtttcagagtgcttctcaaaaggtcttattaggaagtggtatttttcgacaagggtttagcccttctgaaggtgttgatgaaggaccttatggtttatcaagaagaatagcctgcaagaaatgtggtgacttccacctgtggatttatacaggaagagctaaatcgcaagctagatggtgtcaggactgcaatgattttcaccaagctaaagatggggatggatgggttgagcagtcttttcaaccagttctatttgggttgctgcacaagcctgaattgcctcatgcatatgtttgtgctgaaagcatcattttcgatgtcaccgagtggttcacctgtcagggaatgagatgccccgcgaacactcacaagccgagcttccatgtcaatgccagcttgttaaagcagaatagtggcaaggggagcacctcggcgcagaggggtggagggatccctaatggtgtaaacatggatggcggaatcgatgaagaggagttcttcgagtggttgcagaatgcactgcagtctggcatgtttgaatcgtttggcgcgcaaaacgagcccccttcccctggaagtggaagcaatgccaagggtagtaatagcagtagtaagaaaaagaagaagggcaagaagcaatgg

SEQ ID NO: 54497 - DNA, 2268 bp, Oryza sativa
  Clone ID: PAT_MRT4530_56596C.1
gttttctagcatagctatacagagcaaacgccatatgtactacttatttctgctccgaaagaagaatcgccattatcggaccttcttcagttaccattgcttcttgcccttcttctttttcttactactgctattactacccttggcattgcttccacttccaggggaagggggctcgttttgcgcgccaaacgattcaaacatgccagactgcagtgcattctgcaaccactcgaagaactcctcttcatcgattccgccatccatgtttacaccattagggatccctccacccctctgcgccgaggtgctccccttgccactattctgctttaacaagctggcattgacatggaagctcggcttgtgagtgttcgcggggcatctcattccctgacaggtgaaccactcggtgacatcgaaaatgatgctttcagcacaaacatatgcatgaggcaattcaggcttgtgcagcaacccaaatagaactggttgaaaagactgctcaacccatccatccccatctttagcttggtgaaaatcattgcagtcctgacaccatctagcttgcgatttagctcttcctgtataaatccacaggtggaagtcaccacatttcttgcaggctattcttcttgataaaccataaggtccttcatcaacaccttcagaagggctaaacccttgtcgaaaaataccacttcctcctttcttttgagaagcactctgaaaccgtctgaagtagttcaaaagctcctccctccttagctcatcatcatatgtcttccgtttcaaagaatcaagaagaacctcgtatgcattttgaagttttttaaatgcatcagcagctttatcattgcccatgttcttatcagggtggactaacatagcctttttcttgtattctctcttgagtaatgatacatctatattttcataacgatggaagcctaatgctgaatagtgatcagtgcagttcagtaaacgagacacttcatcttcagaggtcaactctttctcagctccactagttgaaggatcgccagggccccgatctgatggttgagcatactcggactgtgaggtattatctgctgatgattgtcgaaattctccaaagaagcctgatttgcctgaattttgctcagagttccttgaagagccagcagatttgttattgtctacattgttctttaggagttgcacaagaacatcacttgaaatgaaagataagttcaggctcaaaagtaacccaagccatccaacatagttttttgcacaatacattgaatataggcaggtgacaagcaatgcaaaacgttcatgcttcaggaaaaaggaagcacctccgagaattatgatgccgcttgttgtccaaaagcttccatacagccacaaaatcaccactgcagccactgcgataaccagaacagcaaaaccaagaccaacaaaggcaactacagcagcagcaattaccattaatattagcattttctttagtccaatcattgcaaaaactgatagtgtactgcaccaaagtactgtaaggagtgagtttgtccctaggcgtagcaaagaatcgaagccccttatgttgcagttgaaccaaactgccaacaagagcaatatcaactttccagcactaaacatccatgcccgacaaataggataagtatacttaattttgctgcggacatagtcatgccccttgtgcacaatagccatgaaagttgtgattgctggcctatttctctcaagtagcaatttgctttcttctattatatacatcacggaagccctaaaaatggatgcagccatgcaagctatgcacctggtcttctccaaaactttttctgcaaaaactggcattggggtttgttctatcgatgagtttttaccacatccacgccgtgatgatctcttgctatctcttcttgctttggaagtgctggatgataactcattgtcattttctcctgaattacctatatcataattggtgtccactgactgcttttttgaggctctgtcatctgatttgccagaggatgaaatgccattgcttctgttattcttcttgataccttttgttttctggccatagtttactccagaaacatttgaaccaccttgaacatgtgaacttcgattttcaccatccatcacatcactttctggtgtatttagtacctcacaattagctgcattttgtcggttaggtgaagcatgattcagaacacttttactttgacttccttttcgggccat

SEQ ID NO: 54498 - DNA, 604 bp, Oryza sativa
  unsure (1)..(604): unsure at all n locations
  Clone ID: PAT_MRT4530_56597C.1
cccacgcgttccgtaaataaaaaaaaaggaaaaaaaaaaaaaaaaaaaaaaaaaaaaaaaaaaaaaaaaaaaaaaaaaaaaaaaaaaaaaaaaaaaaaaaaaaaaaaaaaaaaaggaaaaaaaatataaaaaaagggggggccgtttttggggtttccggtttccttccccttctttgccccgtcttgggtgttttttggtgccccttattttccattttttggccgtggttttccatggcgttgcctgggtaacccttgtttttccccattttatttgctttgggtgctttcctctttttgccggttggcttgtttgcttttgggcccctctggttggcctttttggnctttgggcccccctatttggctnttggttccccccctnttttggctttttttccccggtggtttcggttgtttttcgccgtgttcttgttcccttttccggggcctttttccccgtttgttttgttttttggcttttttttttccccctgttttctgtttttccccttttttttttttttcgggttttttctttttgggttcccttttctttgttttcctggccttgggccccggttactttttttggggctttt

SEQ ID NO: 54499 - DNA, 477 bp, Oryza sativa
  Clone ID: PAT_MRT4530_56598C.1
atgctcgccgtgcgcgcgtccggcgacgaaggcgtttcaactccggagctcgaaggcgtttcacttcacccatggcctcaccgccgcgtttgctttgcttttcctccgcttcgccgtcggttcgatgcgacagccgtgacgctgctggactacggcgcgggcaacgtgcgcagcgtgcggaacgccatccgccaccttggcttcagcatctgtgacgtgcgtagcccggaggacatcctcgccgccgaccgcctcgtcttcccagggtccggcgccttcagctctgccatggacgtcctcacccgctccgggatggccaacgcgctccgcgagtacatccgtagggactgccccttcctcggcatctgcctcggcctccagctgctcttcgactctagcgaggagaatggccctagtaaagctccttttcgctctcgcctcttcgtttctttgattgctaatatgttccatttctag

SEQ ID NO: 54500 - DNA, 429 bp, Oryza sativa
  Clone ID: PAT_MRT4530_56599C.1
atgttgccgcacgcgggcatgtatggatgggggatcgagatcaagcgattcgccgcagaacggcgggcttcggccatgccgctgatcgcgcatgagacatgccaaaaaaaaccgatctgcaagcgtgcatcggagacctacgggggccttcgacgcttcatcctcgcctccgcctctgcggatgccaagatcttcatcgccatgatcgtcgccggctccgcctcgcacccaacggtggtgacggcgaccggcgacgacgatggagacggcggcgctacctcgccggagatggccggcggcgaccgggcgagactgttgttgcgactgctgccgttgcacatcggctgccatgctgtccccctgcatgctgtccccctgcgatgtgctgtcggctgcaccaggctgcaccgggctgctgtcacctcctga

SEQ ID NO: 54501 - DNA, 652 bp, Oryza sativa
  Clone ID: PAT_MRT4530_5659C.1
ctggcgggctcgcagggggagtcgccggcgatgctgcacccgaacggagacggagacggcgacggcggcgatgatgagggtgacgccagcggcggcgaagaggagcagggcggtgggattccgctgaagaaggggccgtggacgcccgacgaggacaagcggctgcgggagtacgtggaggcgcacggcgaggggaactggaaccgggtgcagaggaacgcggggctgaaccgctgcggcaagagctgccgcctccgctgggcgaaccacctcaagcccgacctcaagaaggggcccttcagcaaggaagaggaggagatgatcatcaagctccatttatggctggggaccaagtgggctaagatggcaaactctttgccaggccgcacagataatgaaatcaagaacttctggaacactagatgtaagagaattcagagaactggtgaacctctatatccgaaggagtttaatcattttaagttgacagatctggaagtgatgaactgtgaaagccctgatgaatcacgtgccaagaaacgaacaaatgaggttttacagggaaatggtcaaagttacaaagaggtttttttcgataatttcgccgctgacgggcgggcccgctccgccaccctcgctgacgggtggggcc

SEQ ID NO: 54502 - DNA, 549 bp, Oryza sativa
  unsure (1)..(549): unsure at all n locations
  Clone ID: PAT_MRT4530_565C.1
nnnnnnnnnnnnnnnnnnnnnnnnnnnnnnnnnnnnnnnnnnnnnnnnnnnnnnnnnnnnnnnnnnnnnnnnnnnnnnnnnnnnnnnnnnnnnnnnnnnnnnnnnnnnnnnnnnnnnnnnnnnnnnnnnnnnnnnnnnnnnnnnnnnnnnnnnnnnnnnnnnnnnnnnnnnnnnnnnnnnnnnnnnnnnnnnnnnnnnnnnnnnnnnnnnnnnnnnnnnnggggggggcgggttttggggaaaccaaagttaacgaccgggggctgggaaggaaaaagtttttttatggggcccccaaaataaaatcaaggggcgggggtttaaaaacggggggaggggaaaacccggggggtacccaaattaaagggcttggaagaaaatccccttttggcaggggggggaaaaagcaaaggggcccgacccgacggcctttccaaaaagtggccaaccctaaagggaaaaggggcccccccctgaaggggccaataaagcggggggggggggggggtacccccaagggggcccgttacattggcaggggcctaaggg

SEQ ID NO: 54503 - DNA, 263 bp, Oryza sativa
  Clone ID: PAT_MRT4530_56600C.1
agctgagtaagagacaatccctcagatcatgggaaagaaaaagagatgaagacgctaaaggaataggagaaagacggaaggaatgccagaaaggacagaaaaggaagagaaagaatgggagggcattgggggaatttgtggatggaatcagaggagagagctggagccttggtcctcttgggagtgtctcaagcctctttagtcaccatggagataggttgcctctggcctcagagactcccccagggcctgaggccccttag

SEQ ID NO: 54504 - DNA, 981 bp, Oryza sativa
  Clone ID: PAT_MRT4530_56601C.1
agaactcagaagtcgccggaagttctcctccccttctttcttagcgccgaagaagacgaagcagtagcagcgaatcgaacaaacaatacaaaacccacgcgacgcgactcaagacttgcacccaaatccattcccacccaccggattcgcatccgccgctgctggccccgtcgcctcgccctccgccaccgccgccgtgcttgctctcctctccctcctcctccagatcggcccgatcccctgcccaccccccctccccgatggaggccaagatcgggaagctcgtcgagtcggtggggagcttcttctccggcggcgacaccatcccctggtgcacccgcgacatcatcgccggctgtgaaagggaggtagctgaggctgcaaatgaagagcagaagagtgatagcattatgaggctgtcttgggccctcgtgcattccaagaaccaggaggatgtaaatcgtggaataggcatgcttgaagcatcattaggtcaatccaacagcccactgcagactagggagaagctatatctgctggcggttggacactacagaaatggtgactacccaagaagtcggcagcttgtggaccgttgtttggagattcaacctgattggaggcaggctttgtctctcaggaaggctatagaagataaaattgccaaagatggtctgatcggaataggcatcgccacaactgctgttggacttctggttggtgggattgcagctattgctgcaaggaagaagtgagatgatatctgcttgctgatgtagtaaccaagtagatgtttggcttgtttgttcttttttcaattcgtggtattccagtcgagaatcgccacagtaatgtgcataaaacaaattgatgaccatggtactccggatgcaacatgtacctttccttttctttggttttaaaaaaaaaaaaaacaagaaaaaaaaaattgaaactgatcaaaaacataaaaaaaatata

SEQ ID NO: 54505 - DNA, 580 bp, Oryza sativa
  Clone ID: PAT_MRT4530_56602C.1
gcacgaggagggagtatacatagtactccctctgctccgttttatagggcatatgagtttttgcagaaagagaccaagttacgagagtgcggcacgatttcttctggatatgtcccgatttcttatggatgtgtccctaattaagccttaatccaaggcatgcagaattcctggctctcctcccacagttcacacatgcatggcttgctgagtagttgcatgcagatacccaagtgttacattacatgcgatcatgcgcatgcaaaacagaagggcatcctgggaacaaatgcagctgagcgcacaatactccctatattctaggacactgtcaaaaaatttatgcgccctataaaacggcacggagggagtagtatacgacaatgcatagaaaccatgtgcattatgaactatacttttatttttcttaaatatattcaagttcaattggatgaaaatgcctgcgtatttatattcaccaaatggcgtgttacaatttattttgttgaaatttgatgcagtacctagtcctggtgcaaactctataggttgatgttcttactttgttctgacttctgag

SEQ ID NO: 54506 - DNA, 726 bp, Oryza sativa
  Clone ID: PAT_MRT4530_56603C.1
atggaggccaagatcgggaagctcgtcgagtcggtggggagcttcttctccggcggcgacaccatcccctggtgcacccgcgacatcatcgccggctgtgaaagggaggtagctgaggctgcaaatgaagagcagaagagtgatagcattatgaggctgtcttgggccctcgtgcattccaagaaccaggaggatgtaaatcgtggaataggcatgcttgaagcatcattaggtcaatccaacagcccactgcagactagggagaagctatatctgctggcggttggacactacagaaatggtgactacccaagaagtcggcagcttgtggaccgttgtttggagcgtaatagtgctgtttttgtgccatatgatgcaatggaagtcaggttgactttaagcttgtcatcctttttcactgaattttcacagccaaagttgacacatgttggctacactattcatgggaatgtttacttggtcttcctagtgcttgtattgttttcttgcctgacctatgttcacaatgcaaatgggattgaaagttttaatcttagtaggcaagaacattttcatattcaacctgattggaggcaggctttgtctctcaggaaggctatagaagataaaattgccaaagatggtctgatcggaataggcatcgccacaactgctgttggacttctggttggtgggattgcagctattgctgcaaggaagaagtga

SEQ ID NO: 54507 - DNA, 150 bp, Oryza sativa
  Clone ID: PAT_MRT4530_56604C.1
atggaaacttcggggttcggaggaaagaggccgatccgaatcgaactcgattccacgaacttccaaaacgaattagccgatgtttccaaaagagaaaagggtgtgacagctgggcggctcgaggaggacgacgaccccgacaggaattga

SEQ ID NO: 54508 - DNA, 1273 bp, Oryza sativa
  Clone ID: PAT_MRT4530_56605C.1
aaaagcatcgcactccttattctagactagtccaacaacaatttattgggggaattaccacctgatctatgcagtggatttcagcttcagaaattgctggtgagcgattcgaatcaatttacagggatgcttcctcaggagttctgtcaattggttttactgaacttcttggatctatcaagcaatcagatctatggggacctccctacttgctggtcaaatcttcaacaattgtttttcctagatttgtcaagcaatgctttctctggcaaagtcccaacctcaacaagcaaaagtcttcccatctgcaagaacttaacaatggtagatctccgggacaataggctatctgctgaaatttcttcaaggatatgggaaagcttgccttctcttaaaattcttcagttatgctcaaatatgttcgaaggatacataccctggcaactatcaaatcattctcaactgcagctacttgatctagctgacaatcaattggtaggttcaaccagcacacagcacattttgctaacttcagatcaatgatgcaacagaacaaaaggctcaacattggatcaacatatgttgcgttcacatattcaaattactttttgtccccatattctaacagaattgaactaatttggaagagcagatcttatacatttgaaagcacaattccacttctggcagttattgatttacaagcaacattttttcttatgagatacctgcagagtttgcaaaccttaagggtctccagttcctaaaattatcaagaaataatatatctggcagtatcccaaatgatattggcaatatgaatgccctagagtccctggatttatcttgcaatgcattttcaggtcatattacgaccaacatctctagcttaacatttctcagctccttacatctctctaataaccacctgtcactctgtcaggaagggcacccacaggtggccagcttgagacactgaacgatccatcaatttacagcaacgattatgggctttgtggaactgtgttgagtgcatgcccaattgaaagttccagatttggatctgaaccaaataaggatgaatttaggtctttactaagccacaatcatagggattgttattggattttggctatggtttgactcactattcttcattgatttatggaggattgcagttctaacctgcattgattatgtgcagaataagattatgcaaagaattcggtgcattggcatcgattgtggtattaacaatgtcggaacgtaagag

SEQ ID NO: 54509 - DNA, 171 bp, Oryza sativa
  Clone ID: PAT_MRT4530_56606C.1
atggatataaatcaagaggacgagagtgatgggtgccgtgacgcgcgccatggcgagagagagacgcgagacagtctgacgccgaaagcactagcattcgtcctggccgtgggtgacgaggacggcaaggctgctagcgccatgccatgcgatgacgcagcaattgaataa

SEQ ID NO: 54510 - DNA, 243 bp, Oryza sativa
  Clone ID: PAT_MRT4530_56607C.1
gtgttgtttgtcgtccagagaaaacggttagctgttgttttaagtgcaggcatgtagcacaacctcgtaaggaagatgttgtaggatattatttttgttatcatataatacataagtggacatcaggtaaagatgtgttacacctgaagtgaaaacaagatatgtggaccctgatccgatataacgatacatggcatgagacctatacctcttttcgattgtctgccgcggtacaaataaagg

SEQ ID NO: 54511 - DNA, 562 bp, Oryza sativa
  Clone ID: PAT_MRT4530_56608C.1
atggacgagctcctcctcctcctcctcctccttcgccgccgatcgccagcccgccgacgagctcctccagcacggcctcatcgtcgcatacagatggcggccgggtggagcgtgtgccccgtcggcgacgtgcggcggcacgtcgaagccgagctcgctgccaccgtgctagagtccctgacgaaggaggccgccgcgccgcccgcatgccgcatccaccccttacccctagttgcgccgcgccccgctgagaagaggagaggcctggccgcctggatggtttggttcgcaagcctaacgagctacctcgagctttcaaatgagccaagccaagctgggtttctagctcgttacgataacgagccgagccgagccagctcctatcttaacgagcttgaccgagccgagctggctcgctatccacccctagatatagtattatctatgggaaggacgaaggagtattatacgtcttttacaaaaagtactactagatggaataattctgctggaggtcatgggtggaggggtggctttggtctcaatgctggtccgagcggag

SEQ ID NO: 54512 - DNA, 760 bp, Oryza sativa
  unsure (1)..(760): unsure at all n locations
  Clone ID: PAT_MRT4530_56609C.1
cgccggccgccggacctcctccccccccccggcggcgcgcggtggaggaagccgctgccggcgacttcgcctgtaacaccgccgccgccaccgccagctcccccttctagtagtgggccacccaccggaggggggggccccagtcctcagnctcccccttcgtctcccgcgcttgcctcccaagtaagccggaacgccgccgggggacccccgaaattccgccgccccagggtttcccctcctagcgcaaaccaagaacgggcggggccacctctcccctcccccctacccacccatacccagcccgccactgctcccccggtccgtccggaaaacccaccttccccctcctccccccctcccttctccacccccccccccccacgccactctcgcaccccccccctccccgccccactacctttcccctcccgccttccgaaccttaccctctcgcgccccctgcacccctcctccccaccccttctcttcccggtctcgcctccccccgccaccgaccctctctctccatcttcccctccactgcccctccccgcccctctccctccctaccccatccccgccccttcactccctccccgctgctctcgctcccctcgccactactcgctcccgctctctccctctatccttccactctccctaccatgtcctctcgtccctcgctactctctccgcacagctcacctgccccgctctccctcacccccatccttcctaccccttgtgcgcaccaccg

SEQ ID NO: 54513 - DNA, 1659 bp, Oryza sativa
  Clone ID: PAT_MRT4530_5660C.1
atggaggaggaggaggaggcggcgaggctggcgggctcgcagggggagtcgccggcgatgctgcacccgaacggagacggagacggcgacggcggcgatgatgagggtgacgccagcggcggcgaagaggagcagggcggtgtggctagggcgggggttcgtcgccgcggcggcggcggccgtgtgcgcgtgcgtggcaggattccgctgaagaaggggccgtggacgcccgacgaggacaagcggctgcgggagtacgtggaggcgcacggcgaggggaactggaaccgggtgcagaggaacgcggggctgaaccgctgcggcaagagctgccgcctccgctgggcgaaccacctcaagcccgacctcaagaaggggcccttcagcaaggaagaggaggagatgatcatcaagctccatttatggctggggaacaagtgggctaagatggcaaactctacacatttgacatgctgcactcttgtaaatggccttgttaaaaggagtagacaaatgctttgccattattccttgtttgcagagaataacaaaaaacgatactgtcatcaggaaaagctgacatctaggccacaggataagttgccaggccgcacagataatgaaatcaagaacttctggaacactagatgtaagagaattcagagaactggtgaacctctatatccgaaggagtttaatcattttaagttgacagatctggaagtgatgaactgtgaaagccctgatgaatcacgtgccaagaaacgaacaaatgaggttttacagggaaatggtcaaagttacaaagaggtttttttcgataatttagactatagtagaccagaaaattatattcggccaaattgtgtgactccaaattctcttccagttgatgccacaagtccatttggtagtgccattgccacacaagatcagtcagtaccttttggtagtgccattgtcagtggacatccaattcttgatggcaacttctctacttctgggaccatacagaggcccatgaatgtagagctcccttcactccaatatcccaactatgactttaacaataataatgcatggtcatatcacgaccccttaggacatcctattgaccaggttgactttggctccctgagatcagaatatctctctccaaacaacaatggtctgctggatgcattggttcatggaggacatggacaaggggaacttgcaaattcccaaggatcttttgatgcttgttttcctcgtgttcaatgcaatcaagtgattcaatcgaatgctttctctctgagttcttcctttccaatcattggtgatgatctcctcgagaacagttgtcatgcttttgttggcatcaacaataatgcaagcagcctattccttgacagccaacctccacccttggtggaccctactttctggaggcacgatgtatcactagaaccgaatttgccagtttattgccagtttaacgaagaattgccgccctcaaatgagcagtttgccaaagatgcagatgacgctttcggtcatgggggtctttctgatgagaccaatctagctgctgcaggtcaaggcgatgaacatgaccttgaggacccctgggcgagcatgcccggtgcctgtgacatacctgattttccaagtgaatga

SEQ ID NO: 54514 - DNA, 468 bp, Oryza sativa
  Clone ID: PAT_MRT4530_56610C.1
atggggaacggcgatgaacgtatgacggaagccgggacggcgtgcagcggcggttccagcgtggcgacgtgttggagacagtgtaaagagaggcggctcccccgtgcgcgccgccatggttccggagtggttggtggtgacggagtggcgacgaacggggccggcagcgactccatctccagtgggagttcacacggctcgccgggcattgtcaccaccgccgtccatccatggcacacgacgagggtagtggcggcggccaccaaccctagcccggcctccgcgggatccccggcgcgtcctcctcatggattgacgaagaagatggcgaggccggcgtgcgcgctgatggcgagggaggccgagaacggcatcgatgatccaatgaaagatcaaaagcgatgtttcttccttctttcacttcgcgatctccttcgcgagagcgaaagtgctgataacgtgttgtga

SEQ ID NO: 54515 - DNA, 1947 bp, Oryza sativa
  unsure (1)..(1947): unsure at all n locations
  Clone ID: PAT_MRT4530_56611C.1
ctgcaggaattcggcacgaggcacttgccctcgcatctacgtcgcccaagcttcgcccgctgccgcacacaactccgccgacgccgacacgacgtcctctctcctttcgcctcctcatcctcctgcttccgaaatcctcaactcagattcggagctactgccgccgccgcctcccccgnttgttgttcccaagcgcccccacaaaacccccnggccgtggcggcggccgcggcagcgacgggcttcggcggcggcacgcggtgcatgaggaggagaagaaggggaaggcacgactgcggtgtcgcgatccggagcaggagccgatggggaaagtgcggctgacccgcgcctgagcgatagagattgagagatccagggttcgtgagcgagtgtgaaaaagacaggttatactgaagacttcagctggtggcgccaccaagatgcagaccagcaattttcgtaagaagaatgcagcagaggtggatttcttcatggggtatggtgatgttaatcgatacgaagttctggaggtcataggaaaaggaagttatggacttgtatgttctgcaaatgatatacatactggagaaaaggttgcaataaagaagatacacaacatttttgaacatatatcagatgctgcacgcatactccgtgaaatcaagcttctcaggctgcttaggcatcctgacatagtggaaataaagcatattatgctacccccatccaagatggatttcagggacatatatgttgtctttgagcttatggaatcagatcttcatcaggtcataaaggctaatgatgatttgacaagagagcactatcaatttttcctgtatcagatgctccgtgctttgaaatatatccatacagcaaatgtttatcacagagatctgaagccaaaaaacatacttgctaatgcaaattgcaaactcaaaatatgtgattttggcttggcaagagttgcattcactgatgctcccactacagtcttctggaccgattatgttgcaacgagatggtatagagcacctgaactgtgtggttcattttattccaagtacacaccagctattgatatatggagtatagggtgcatttttgctgaggtgttgattggaaagccactatttcctggtaaaaatgttgttcaccagttggatttgataactgatcttctgggaacaccctccttagatgctatttctcaggtgcggaatgacaaggcaagaaaatatctgacatgcatgcggaagaagcagcctgcatcattttcacataaatttctgaaggctgatccattagcattacaattgcttaggaagcttctagcttttgatccaaaggaccgtccatctgctcaagaggcattggcagatccgtacttcaatggattagcaaaggtagagcgagaaccatcttgtcagccaattccaaagatggaatttgaatttgagcgtcggagagcaacaaaggaggatatcaaggaacttatttttcaagaaatattggagtaccatcctcaattattgaaagaacacatcagtggaacagaaaggccaaattttcatcatttaagtgtggttgaccaattcagaaagcaatttactcaagttgaggaaaatctgaatggaagtggggctgctgtttcgctacagaggaaacattcttctttgccaaggtcaacaatagtgcactctgctgcaattcctgcaaaggattataaacatgtggcctcatctaatcctctccagttgctcgcgaaaacaggtcatcatgccattcctaccgtcgctctcccagaagccctttcggcaggccttcaaagccgacgcgacggattgggcatttttgggccaatccttcttcacggtttgaggaaaatcctcaacatggtcacaaccatgttcatgaagcaggctgagcacgaaaaccgtggcaact

SEQ ID NO: 54516 - DNA, 619 bp, Oryza sativa
  Clone ID: PAT_MRT4530_56612C.1
caaagtcaccaaaccaagagagagccctcggacttaccatcacccaagaactcgtcgccggccgtgaaaaagatgaaagcttccatcgacgtcaagccgccgacgggaacgcgacctcgtctacgggagctctggagcgcgctccaagcgtccccgcagccgacatcgtcgttgttccgaccgctgtagaccaagccaagctgagccgtcgcaccaacatcttctccttgaagtcctcctcaaaacccctcaagaatcccaggcaatggcgcagcaagtgcggagatcggccaccgtcttcttcacctccggtcaccgtcgccgttgccgaatccacctcctccgtccattgaaggaatcgagccgacgccgttcaaccggagtagagcgccgtcgccaagccgttccgcaagccaccgctgccgccaagacctcggcaaacctcgctagactcacaataaatgcataaacggtgaaggagtggattaggtgctaacatttctcaatatcaaggcaagtttttctcctcccatcctttgaacacattgaatcccatgatttgaggaatgacaatgtttgtttgcaaagttgcatgtaaatttagactaaatcggtattt

SEQ ID NO: 54517 - DNA, 753 bp, Oryza sativa
  Clone ID: PAT_MRT4530_56613C.1
atggcgaacggccacctcggggcatccaggacgggacgccgtcgggaggaagcgcgaggagacggagttgcaagccagcccgttccattgggtcacgacgcgcagcccaccgacatgggatcccaacaagcgagagaggaggacgctgatccgccgccgccgccgacgacgacgacgaggctgccctttctattcaacctgtcgcgcggggagctagtacggcggcagcgtttgatcgacgaggcggtggaacggctgcgccgctgcggctgcgacattcgtcgctgcaggggaggcggggtcccatgccctgaacggcggcaagctgaactctccttgatcgtcgaccatgtcaaccgcgctctccatcactacaacgctaacaatcctgtaagcacctcactacggcgccgagttcgacctgtcaaggctctgggttatgcgtccgtcagcttcagacgcgcgctctgggttcatgtcagcttcctggctcgcaggaggagcagcccggtgaagccagccgatgaagcagcagctgctgctgccgatgatgacgaatccgacgtgaaaagaggccgcaagcgacgctcccgcaacaagcgcaacagggctcctcccgagtcacccgacaagcagttcttcgccgagctacgctacgacgactacgactctgcgaccgttgtgacctgcaccatcatcgggctgggccgaagcaacctgggctggggccagtacgcccttgatctcgactaa

SEQ ID NO: 54518 - DNA, 988 bp, Oryza sativa
  unsure (1)..(988): unsure at all n locations
  Clone ID: PAT_MRT4530_56614C.1
gcacgaggctaagctttcctctcgtcgttggacgcccccatctttccctagctcgcttgtcctaatcctcctctctttctgcaacaagaggaaagtgagagctcctcttggctcgctcgctgcacgaatcagtagtccaagttggattaattaagggaggtacgtaaattagttcgaatccatccatggcgtccataatcctcgtggtggtcgtgttcgtcctcgacgccctcgccttcgtcctcgccatcggcgccgagaagcgccggagcacggccacctttagcgaggacacgagcggcaggcagtactgcgtgtacagctccgacgcggcgacggggtacggcatcggggcgctgctgctgctgctcgccgggcaggccgtcgtcatggtggtcacccgctgcttctgctgcggccgcgcgctgtcccccggccggtggcgcgccttctccggattctgcttcatcgtctgctggttcacgttcgtgatcgcggagctgtgcctgctggcggggtcggtgcggaacgcgtaccacaccaagtacagcacgctggtgattagcgggccaccgcgctgcgcgatgctgcgcaagggcgtgttcgccgccggcgccgccttcaccttcctcaccgcgctcttcgccgagctccactacctcttcttcgccaaggcccgccacgccgccgccgtgcccccgcccattgtcggcggcatcggcatgacccgcatgtagacagagtgacagacagcaccttggttctcaatccatttgccatttgcatcccccctggacttcgacgcccgcgttgataccttcgattgctctactctgtacatttcattctcattgctcagtatctgtagtatatggagtatatctgtaactgcgtggctcatgtctctgtattttggtantctagttgagtgcgttcatggtcattaattgatcggccacctgacctgaaaaaaaaaaaaaaaaaaaaa

SEQ ID NO: 54519 - DNA, 687 bp, Oryza sativa
  Clone ID: PAT_MRT4530_56615C.1
ggtgggcgcgaggtgaagggggggagacggctcaccggcggcggcggtggcggcgacgacggcgacggcggcgcaaggcggcgacgcacggcgcggcggctccggggcgacggcgcggcggcttcgaaggtggcggcgcggcggcacgacaacggcggcgcgacgacggcggcgcgtggagaaggggaagagggagaagaggggggaatggagtggggtggcgacggctatggcaatgcgacgcgcgtgcgatggcgacggcgcgcagcgcggcacgcggcagcggcgcggcgcggggcgcgaggcgcgggctcgcggcgcgaggcgacgagacggcacgcggcgcggcagcggcgatgggacgcgcgcggcgacgggacgtcgatggcgacggcgacagcggtggcgcgcggcgtggggcgggatgcgatgggcggcgacacgacggcacggcgtgaccgcaacgatgggacggcgcggcgcggcgcggtgcgggctcgcggcggctggcgacgagagaggggaaaaaggaggagctggcggcgcgaggaagaaggccggaggtgaggggcgtcagcaatctagtcgtcaccttcctggttccggaaggctcgatggagttgggggaggccaatttttggagttggaggtgtaggtggtcagcagaggtggtgggggcgatgtcgg

SEQ ID NO: 54520 - DNA, 659 bp, Oryza sativa
  Clone ID: PAT_MRT4530_56616C.1
atctcatcttctcacatgcgctcgcgcctccctgctctcgtgctgccacagcaagaagacgacggtgacggcggacaaggcggcaacggcggacaaggcagcgacggcgacggcgaaagcgacgcgcacgaggtgcgcgcggggtggattagtccgtgggatgggcacgtccgggcctccccttgccctccagcgtcacgctgccaacctcctctccgactccaacttgtcccctgacctcctctacctcaccatcgccactccagctcgctccaccctccctcccccctcccattctgcctcccctgccgcaccgcgatgggaggcctagatctgggcggaggggagacgaccggcgggtggcggcgttcgtccacctctctcccctctccaccggcgagatcgatccgccgccaccgctatcggcgcggatccggcctcgtctttgttctcatcctcggcggtttgtccatggcgagtacgacaaagggcaaggaggatggtggcggtgaccgcgaggaggaggaggccgccgcgagccggtcgtcggtggggcccaagaccatgtgcggcatgcatcgggagcgcagatctggtgccggcgacacccttgatttgcaatgtgaatttgatatgtgaatttgtatttgtgacatgtt

SEQ ID NO: 54521 - DNA, 1185 bp, Oryza sativa
  Clone ID: PAT_MRT4530_56617C.1
atggagctcctctgcgacgacctgctggactccattctcctgcgcctggactcgcccgtctgcctcatccgcgccgcctccgtctgcaagcgatggcgccgcgtcgtcgccgccgacgacgccgccggcttcctccgccgcatccgctccctccaccggccaaccgtctacggccactactcgaccggacacgaagattccatcgaagcgtatttccattcttgcagacggccggtacccttcttcctcccgtcgttgccggcatcggtctccactggccatgacttcctccgctcctaccgtgagatcctcgacagctgcggcaccctcctcctgctccggcggctgaatttcacctacaagggcatcaccgtctacgagccactcactcgccggtgccgggtaatcgacgacccgccggcgccgtggaacggcaaggagtacagagattggggcgcctacctccttggctgccgactgcccctcatcgtcaccaaaagccctaaagccgtcacaaagagagaaaagcagagacacattactactggaaagttgatgagggagattgagggcactaggagaagggagatcgctggaggagagagcagcgtggtgcaactcacttcgaggagaacaacgacggcacaccccatcgtgacggagagcagcggtgacgcccctggtaccgaggagtgcggggctgacgcgagcagggttaacgagcgcacgggggctcaaccagtggcacggccggtgatatcgatgagcggcgggcgacgaggcaccggagctgtggggatggtagtgggcggtagcccggtgttggcagcgggggcaaatgacgagattggtgaggaggctatggccggtggtggtggatccgttggcgaatccgatggtcagccgacgaggccaggcagcaatgccgcaggagatggaggagcatgtgagggcgtgaaagcagcaacagcgggcaaactgatgagagaaggagaaaaactagggtttagatctcagctgctccccgacctttatctgttggatccgtctgatctagaccccatagtagagaggaggggcgagctggagagccggattgaggtcatgaggagaggtagaggagtgggaaaggagctcaagatccagggtcgtagtgatagggagtcatccccgctcatcggctag

SEQ ID NO: 54522 - DNA, 524 bp, Oryza sativa
  Clone ID: PAT_MRT4530_56618C.1
gtgcccaaatgtcgctacttcatgtggctcgtggcccacaggcactgttggagcgcatgcatactggttaattggagaagcgcgacttggatcatctggaccatcacattctttgtgatcagcggcaagagactatttaccacattctgatagctgtggtggctcttctctccagtctaggcctgatctattccttcctctccactgaaccgcccttttcccttttagatctgttcgagctagatatgaaagtcccaaaagagaagagacatgggttcaacaccatcgtggccttgggggcatggtccatttggaaggagagtaacaactaacaacaaggtcttcaaccaacaacaccgaagttgggcggaggtcgccactgccatagcgtaggaggtcaccttgtggctcttggcaaggccagcagagccggcgctatcgctttagcaggcataggtcgtaggtcgtttctatgggattgggatttggtgacattcccccgtgacattctcggtgacattgag

SEQ ID NO: 54523 - DNA, 368 bp, Oryza sativa
  unsure (1)..(368): unsure at all n locations
  Clone ID: PAT_MRT4530_56619C.1
caaattcccatgttggtgtattcaaaccatgagtttgatcgaccccccatgagtgaggtacccagtttctcgaggttctatctgaagttgagacacctccatccccagattgcttcatactcttcaggagtttagattcgaaaataangtaatccctagttttgatcgttgttcgttcacctagctagttctacacgtcacatttctcatctccgtttatatcgtaagctcccttccgcttcattatcccaccttgtaaatgatggtacccttattcccactcccaccagattgttaaacttacgtgttactcctaataaatcagggggaaactggacctttggtctgaaaaaaaaaaaaaaaaaaaa

SEQ ID NO: 54524 - DNA, 351 bp, Oryza sativa
  Clone ID: PAT_MRT4530_5661C.1
atgccgtcgtcaaaggatcccatggaaacgccatcaggcggcaggacatccatggcaccccttccgtggaggcaaggatatgatgagtcctcccgctacaccatccatcgatcgtctcgatcgattgtcaatagccataaccatttttccaatccgactcttctcagtttgcccgccgtcgccaccaccattttgcacgagcgtgtgcgagctctcctccgcctctgcatcctgcacgcagttgccgggccgccaccctgtcgcctcgccgcgccgctgcccagcctcgccggctggtcggaaggtgtcaacggcaccggctttctccacctccgcccttctcttccctaa

SEQ ID NO: 54525 - DNA, 2095 bp, Oryza sativa
  Clone ID: PAT_MRT4530_56620C.1
ccggctgcagccccgcgccgcgggctttcctaatccgccccgcgccgccgccacctcttcctcccttgcccaagagcgatggccgcctcccccgccgccggggccgcggccgccaccgtctcgtcgttcgtctcgccgtcgtccttctcctccgtcaaggcatcgaagcccgaccgcctccgtccggcgaggagggcggcggccgtcaacgtccgctgcgtcagcagccctccggccaccgaaacttctttcaagacgaaagtaccacgaaatgccaatatggccaagctgcaagctggctatctgtttcctgagattgccaggagaagggcagctcacctgctgaagtttcctgatgcgaagattataagccttgggatcggtgacactacagagcccattccagatggccgcctcccccgccgccggggccgcggccgccaccgtctcgtcgttcgtctcgccgtcgtccttctcctccgtcaactttcgttttgaagctttcaagacgaaagtaccacgaaatgccaatatggccaagctgcaagctggctatctgtttcctgagattgccaggagaagggcagctcacctgctgaagtttcctgatgcgaagattataagccttgggatcggtgacactacagagcccattccagacgtcataactaatgccatggcaaagagagcacatgctttatccacagttgatggttatagtggttatggagctgaacagggtgaaaagaaactaagggcagctattgctgcaacctactatgcggatcttggtattgaagaaacagatatattcgtctctgatggtgcaaaatgtgacatttctcgtctgcaggtcctttttggatctaatgtgaagattgcagttcaagatccatcatatcctgcctatgttgattcaagtgttatcatggggcaaactggtttatatcaggaggatgttcagaagtatggaaatattgagtacatgaaatgcagtcctgaaaatgggtttttccctgatctgtcaagtgttccacgaacagatataatcttcttttgttcacccaacaatcctactggtgctgctgcatctcgggaccaattaaccaaattagtcaaatttgcaaaggacaatggatccattatagtttatgattctgcttatgccatgtacatatcagatgacagcccaaaatctatctttgaaattcctggagcaaaggaggttgccattgaaacagcatctttctccaaatatgctggattcactggtgtgcgtttgggttggactgtggttcctaaggagctccttttctcagatgggcatcctgttgctaaagatttcaaccgcatagtctgcacttgcttcaatggtgcatcaaacatttctcaagccggtggtttaggttgtctatctccagagggtctaaaggccatgagtgacgttgtcggcttctacaaggaaaatactaaaattattgttgacacatttacatcacttggattcaacgtctacggtgccaagaatgctccatatgtgtgggtgcacttccctggccgtaattcttgggatgtcttcgccgaaattcttgagaaggcacatgtggttactactcctggtagcggatttgggcccggtggtgaaggcttcgtaagggtcagtgcatttgggcacagagagaacattattgaagctgcgagaagactgaagcagctgtacaaatgagcagtgatccggcctttatattctcaacctcttggggagccatatcaaataaaaccaagcagagttcgaagacaaaatttactctgtcgggctatcagtagatgttagaattgaaacctaatactttataggcagttgttctgttccgctcggtatttatccattcagagccattttacattctgaacttctcttgttgtttagccctgatgcacctgagtgaatcgcaagcttatttatctccttttgctaagttcgtttctactaaaaaaaaaaaaaaaactcgagggggggcccggaccccaatcgcctatatgagtcgtttacccgcctactggccgcgtttacaccccgtgcttggaaacctgg

SEQ ID NO: 54526 - DNA, 272 bp, Oryza sativa
  Clone ID: PAT_MRT4530_56621C.1
tggctgtgcggcggggcagttcggcgacacgacgctgactaaggtgttcgtggggggactcgcgtgggagacgcagaatgaggtgatgcggtgatactttgagcagttcggcgatatcctcgaggccgtcgtcataaccgacaagaacaccggtcgatgcaagggctacggatttgactctttcctctagtcgtatgccttgttttttgcttgtctatctcatatttcgttgttcttggttctcagtttatatttcattcttttttcctttt

SEQ ID NO: 54527 - DNA, 344 bp, Oryza sativa
  Clone ID: PAT_MRT4530_56622C.1
ttctttcgcgttagccatcaacgaccagcatctagggtttgctcgacctgctcaagctgctgctgccatgggggcacagctctactccttaggagacatgcacctgcacggcgggcagcgcagcgctctgctgcaggcccggacgggcaccgcatactggctgggatgccctcgtgcgaccccataccggactagtattaacgcctgggcggccgcacggcatgcatatgggcgcgaattgaggcagagactggcaccctttatggggagggccttatacacacatcgaaggaggatggggaagcactaactgcgaagctgcaagtacagcattccagtgggat

SEQ ID NO: 54528 - DNA, 941 bp, Oryza sativa
  Clone ID: PAT_MRT4530_56623C.1
tgtcctgcaagacaagcacaagacacgagtacacgactagtagctcctccttttctccctctacataagccggcaaattgagatgggagcgcagcgcaccatttccaattcgcctcgcccgcactgcacgtcgccagttcgccacccgctccaccgccgccgccgccgccgccgccatggactaatatgcacacgcgttgccggcggtgaacgagcatggccaccctcgctgcatggctgcatgccagtcacgtcgcattcgccatgcgcgcgctatcctggagcacccctccaccgacagcttggcgtgcccccctcccctcccccggcgacgaggtccgggccgctcggcgccgtttgcacgcccgcggaccgctaatgtcatggcacggcttggcgccgccctcgggtgtgccccccggctggcgaagcaggagccgctcgatggtcgtcaccgcacgcgccaccagctcgctggaccgcctttgccgtcgttccgcttgctcatcgccggagaggaaggggatcgggagagaaggatctgggagctagggttttgcccctctcggcgcttcatccgacacgaggacgatcggggccgtctatcagatcggacggcttagattcaccccgcgtcaggccgccgctaattactcagcccaatgggccacagaagtgcatcgggtcgttgccgcatatgtgggccgcgctcggctgctcggcttgcgggccgtcgaactgactcggctcgcacgaagactggacggcttcaaaagacctgggccgaaagttaagaaataaagttgataaaaaatatatttttcccattgcaacgcacgggcactattgctaattttttttcgcagcaccaacgtcattatatcaaatttctcatctatctaggtcaagccgtcaactcccgtgtcgtctcccttccttcc

SEQ ID NO: 54529 - DNA, 400 bp, Oryza sativa
  Clone ID: PAT_MRT4530_56624C.1
atgcttcttcagggagggcacaactctgccggatcatcatctgggtgtacggtcacactgtctgtagatgggaaggccggctgcgcacatggggagcgcacgcgcgagccaaggctacatgataggtgtggaagacttgcactatggggcaaggagtggaaggacatgacctaatgcgaccgcgggctggatttatcagagatgtcatgcggctgactggttctgcctgggcatgtgatgtacaggggtggggtaactgggcctgcgagggctgctgaggatagcttgagcagagaatctgtagtgggcaacaacattcggactgattctgagactaggatatactctatggagagacaccattgaccatggcatcagcttacgcgtgacttctttgaag

SEQ ID NO: 54530 - DNA, 411 bp, Oryza sativa
  Clone ID: PAT_MRT4530_56625C.1
acggcacgaggacttcatgataattcatgctaatgtagggaggggcaacccactatgctacagctcatggatcttcaggaatggagctgccagcatataaatgacaaacaaatacaaggaaaaatactccatgtgcagcaacgattaatgcttttgtatgatctgatcttagtctctgaagactgtgctgtggtcttcatctctgaaggctaagctgtgttaggttggagcactccgattcaactcttttgcccaccaaactaactaagccaattgagtgctgcaaagcgcaaacagtatggtctccatagcctgtgcagatatagctcttacattggtgttctgccaccataacactgccaaagctgtttccaagctaaaaatcatgctgcagtgatgattcaatcccac

SEQ ID NO: 54531 - DNA, 270 bp, Oryza sativa
  Clone ID: PAT_MRT4530_56626C.1
atggctcagctgcgcagatgcatagccatcgcgctcctcttcctcctcgccgccacattcgtcgcaagctgcgtcgacggtgcaagaaccatgcaggcgagctacatcaacaggacgccttccacggcgccgacggcgatgatgaggtcggggaggctcttcggctacctgccgcgggccaagctgatcccgccgtccggcccgtcggagcggcacaacgccattggaccggagaatggtgatggggatgagctgatcagcaagccatga

SEQ ID NO: 54532 - DNA, 1045 bp, Oryza sativa
  Clone ID: PAT_MRT4530_56627C.1
gcagcttaggtggatctaatttgtatccctaatctataaaaccgggtataaaaactcttttaagtattaaaactggtgaaaaagactctcaagactacagcgagggtggtattcgccgatgtggagtccacgtggcagctaaccactaaataaataaaaaaatagacatggcccacatgtcagcgccctttcttcatctcccctctatttcttctccggcatcggcaagtgcatggcggcggtgccttgtggtgagtcgtttccttgtgctgcgatcctgcgactgcgactccgccgctactggagtggccgcaacatggacctcctcgtcctgtccgcatccgatgtcacgccgtctccaccgcagacaagccccgcatctttgatcccctcccggtcttcccttctctcccatgcaggacaacatacagaagtatcaccatctactccctcagcagcaagggctgcgataacatccaaaagaatgcaagcaacaagccaaatcgtatttgcggttggttttgcttctcatcggcgagcgtggttgccatcgccgggtgtcatgcacaacatgtcaccatcgatgatggttggatctcatgcttgctctgttgtgtcgtctctagtgaataatttctaggtgtttgtccttcgatcgccttcctctctacggcactgagttcgttgagctcccatgtgagcgagcgttcgagcgagcatcggtggcagcaggcgcatagcttgaggtcgacctcgcctagctccgggggtcacgctgctcgacgccgtcaccacccgaatcgatcaactccatcgccgtcgactcctcttccggttcgccctccaccacctctccctgtcttccccgccgccttcctcggtccgtcgtgtgcacgtcgctcttgtagcttgagcccgaggagtctcgccggtcgccagcccaccgctgccttcctcccttctccacggacgggcagctaagatcgaggtcgatggggaagagagatatgggagagggagcaaggaggaagaaggggtagtacat

SEQ ID NO: 54533 - DNA, 936 bp, Oryza sativa
  Clone ID: PAT_MRT4530_56628C.1
cagcttcgacttcaatgaaacaataccttaatgccaaaatgaacaaatagatccgacatccacgaaggatattagcccaagctaccaaagaaccacttcttacacacagctagcaacaacaaccatataaagagattgtaatgtgttgtcgttgccaagttttgtcacattcctacagtgaagcggcttctactctactcaacagtaaccaaatgacaatgatggtcacccgccagcttcggttccattgcatgagtccaccaatgaccacaattgcatgcgaaaggtttttggtgctaggaggggtcagcgccagaacaatgcctccaaggaggggaatgacgcctaatggcggtggcggcgtcatgccgtcccatggcctggcaaggcttcgctagcgattaccaatcaagaccccacacaaccatcctgcacaacggccattgttggactaccgcgcatggccgcgtgtcgctccggctaaagcccctctggctcctcaatgcatgctaccggtcatcggagccctcttctgaacagtaccactggctttccctcttcgccgccccgtccgtggcagccgtacgtccccaaggccacgagctccagcctcttacctccagggggggagggggaaggccccgccgtcgtccttgcagccgcgtggttttctggctgcctgcttgggtggcagtgaggcgaagaagggaggaggtgctgggtggcggtgggggagggagacaccacccatgtcgcccaaccctagagcgacacgagggccccattcctggtcactccgcggtagcaataaagttgcagtggaaactgggcattaggacaataatagaaaattggcaatccagattaaccagtcgagaatgggcctggcattatcaactcacaagagctttctagagattctggtaagtagatatc

SEQ ID NO: 54534 - DNA, 150 bp, Oryza sativa
  Clone ID: PAT_MRT4530_56629C.1
atgcttgtcgagggtttggccgctcagcttgggtgggggtgcgccgccggcgagggttttagaggatgggccgggccgggtgatctggaccacgagggcatctgggtcctggaggctggagctggaccgagcccaagttgcgagttctaa

SEQ ID NO: 54535 - DNA, 231 bp, Oryza sativa
  Clone ID: PAT_MRT4530_5662C.1
tcattctaaatcctcattgtcagcctccaactcatcacaaatctgtagctcttcaactgactcgacgttgttccttgacgcctcctccttttctctcccttcctcagatggggcccacttgtcaggggtatcttctacctccttggctccttcccagttggggcagccggggttggcggtggcgatgttgccggtcctcggcgccatggcctcttggttggctaccgccat

SEQ ID NO: 54536 - DNA, 432 bp, Oryza sativa
  Clone ID: PAT_MRT4530_56630C.1
acgtaacaatacgctatgcccatgacaagtcaatacttcatcatgtgtggcgaagccagaggcacaaaactcaagcgctcgtagcctttcaatatttaacgcagctgatacacgcactattttctaacacctgactaataacaatttgatagttagctactttggtggtgcaacctaacgagctctatcttcccaaatgatccacattattatctgtcatgactatatagacgacatacctgtaactgcagcatctactctaggatatacgccatgtcttcctttcattcattcgcgaacacgatgcttcaatccttgtaggcaatgatgccgtaaagtcaggctatgccctcatacaacgcttcatgagaagtagcacatgtgctctggatgtaccactgtcgctgacgcacggagtgctgaccaagcttg

SEQ ID NO: 54537 - DNA, 3039 bp, Oryza sativa
  Clone ID: PAT_MRT4530_56631C.1
atgcccacgtcgcggcgcgcgctcgccggcggcgctttgtccatgcacgtcgcctacttcctcgccatctcctgcctcggctacggcctcctcggggtgctcaaggtgcgggagcccggcgccgcgccgcgccgcatcgaccgcttcttcaccgccgtgtcggccgccacggtgtcgagcatgtccaccgtcgagatggaggtgttctccaacggccagctcgtggtgctcaccgtcctgatgctcctcggcggcgaggtgttcgtctcgctcgtggggctcgcgtccaagtggtccaagctgcggagcgacgccatggacagatcccggcgcgtcgagagccacggcgacgtcgcgctcgccgacatcgacggcggcgacgtcgagaacccgacgtcgtcgggagaggaggcggcgagccgacgccgcccgatggacgcggacacgctgcggcacaatgcggtgcgcgcgctgttctacatcgtgctcgccatcttcgcggtggtgcacgtcgtcggcgccgtggccgtcgcggcgtacgtgctcgcgtcgccgggcgcgaggcggacgctgggggacaagtcgctgaacacgtggacgttcgcggtgttcacgacggtgtcgacgttctccaactgcgggttcatgccgacgaacgagaacatggtggtgttcaagcgggacgcgccgctgcagctgctgctggtgccgcaggtgctggcggggaacacgctgttcgcgccgctgctggcggcgtgcgtgtgggcggcggcggcggcgacgcggcgggaggagctcgtggagatggcgagggaggggggcagggcggcggcggccgggtacgcgcacctgatgccggcgcggcggtgctggatgctggcggcgacggtggcggcgttcgtcgccgtgctgatggcgctggtgtgcggcatggagtggggcggggcgctgcaggggatgagcccgtgggagaaggtggtgaacgcgctgttcctcgccgtgaacgcccggcacaccggcgagtccaccgtcgacctctccatcctcgcgccggccatcctcgtgctcttcgtcctcatgatgtatctacctccgtacacgacgtggttcccatttgaagagaattccactactaaggatagtaatgcagagaaccagggaatcagactgctcgagagtacacttttgtcacaactctcctacctgaccatctttgtcattgccatctgcatcaccgagagaagaaagctcaaagaagaccccctcaacttcagtgtgctaagcattgttgtcgaagttgtcaggcaagtcagactaaatggtttcttacctgagaaaaaaaatgcagaccaaatcctcaagccacgacacaagccaactccaagggacctggatttgatgttcacttctgtgtccacagcagcagtctcaagcatggcaacagtagagatggaagacttttctaaccagcaactctgggtgttaatacttctgatgatattgggaggagaagtatccatttcaatgctggcgctgcacttcaacaatgctgagaccaacacaaacgaagtcctcccaaaaagatcaccttcgacgagaaggaatattgaatcctttgatgctgtaaatgatagcaatcaaaatagttcacaaggcttccaatcagaagcaaccatatcacttaactgggtacagggaagcagaaccatgaaacagaagtgccgcaatatgttggctcatatagtgacaggctacttcatagcagctgttgtttgcagctccttagtcattattatttttgctcagattgactcagatacaagacaactcctgaagagtaaagatatcaaaatatggacgttttccatcttcacagcagtatcctcatttgcaaactgcggcttcaccccggttctagcaggcaacactatattatcgccactattgaggttaagcatatggatcttgaggaaggttagcagaagagaagaatatgcctacatccttcagcatccagaggatactggctacaggtactatccttctgataattcagctctccctatcaatgctgataacaagcctttgacagaacgaggaagaaattcaaatgatcaggccatatggaagaattttatcatttcaaagtctgcttgcttagcaatattcacaattatagcatgcataacagaaaggaagtcaatatctactgatccactaaatttcaacattttcagcatagcattcaaaattatcagtgcatacgccaatgtgggatactcactaggctatagctgcgagaggttgctgaaacctgatgctacctgcaaagctacttcatatgggttcgtcggcaagtggaccgacgaagccattagcacgagagcaaaaacacgggcacccagatcagggaaatgcagagcatggaaagaggggaactaccaggagaagcgaggttgcagaggtggccggcggcgaggccgccacggcagggcattgattgggcttgtccccgtcctcggatgcgcggcgaggcgcggcgcggcgaggcgggcagagggagacatcgtcggcggcgggaaaccgagctcccacgcgccgcgacaggatcgcgtccagggcgacgggcaccgcgcgcgccggcggcgggaagaacgccggcgcctcccgccgccgtcgtcggctgttgcggcggactgctcgccatcgtcgggcttccccaacgactgggcctaactgatactcatttttgtgatgttctttgggaggctcaagaagttcagcatgaaaggaggcaaagcctggaaacttagttagatcttagatgcagtaccagctgaacattgcaggtccctgagggtaggaaaaaagtataaagatgtactctttctcttccgtttgtttgtatattcattttcacatagacaggaaccttccactgtcatccttgcacaaagctcaccctccactccaagtgttggcagtttcagatcaggtgaatgaaagttcatcacaagaaatcaacataggctaacaaaa

SEQ ID NO: 54538 - DNA, 1377 bp, Oryza sativa
  Clone ID: PAT_MRT4530_56632C.1
atgacatccgagatatcgtgggtgcccaggtcctccagtcaatccatccccaactttgcggcgccgcccatccactgacaaaatggcgaggctatgggattcatcaaacaaccaaccatcgggcgtcgcgacgctgaatccgacgctcggagctattttctcggtatcattttcgaatgacagtcccttctcgttggccagcggaggatcaaaaggcagaattaaaagtctggaacacactaacggaaccggctgtagctaataaattcgggaaatagatccgtaggaaattcgacaagctttccgaggaccgatacaagtgatgctggaaacataatagcagtcaacattgctggctcaagcggtttctggctatacaatgctacgcacatgaggatagatttctagttgtgatgtaagcttttcgttttgtccatgttatcaagtccaattttgttgaacgagtggaatgcaaacaatcgattcatgtaccttttggcgcttgtgcaacagaaagtgatgaaagggttttgcagtggatatctgtgaacagaaaataaagagtttaaacttaaggctagcgaaaaaaggaatttcatagctgttggcaccatggatcctgcaattgaaatttgggacctggatatagtcgatgaagttcaacctcacatggtgctaggaggactttcaaaaaagaagaaaaaggcaaaaaagtataagaagggaagccacagaagttctgtgcttggtcttgcatggaacaaggaggtgaggaatgttctagctagtgcaagtgcagacaaaactgttaagatttgggatgtatctgttggcaaatgtgcagtcactttggaacaccatgatgacaaggttcaatcagttgcttggagccgacaatcgcctgaagttcttctaagcggatcgttcgataaatcagttgccatgaatgacatgaaagatggtggacagagttgtaataaatggtctgttgaagcagatgtagaaagcttagcttgggatccgcataatgagcactccttcatggttagtcttgaaaatgggatggttcaagcatttgataagcggacagcctcatcaaattcaaattctggtcgtcccacgtttactctgcacgcacacgagaaggctgtatcttccatctccttcagtccatctaccccaaatgtgaagctatgggatttatcaaacaaccaaccatcgtgcatcgcctctctgaatccaaaactcggagctattttctcggtatcattttcgaatgacagtcccttcttgttggccagcggaggatcaaaaggcaaattaaaagtctggaacacactaacggaaccggctgtagctaataaattcgggaaatag

SEQ ID NO: 54539 - DNA, 594 bp, Oryza sativa
  Clone ID: PAT_MRT4530_56633C.1
atggagaaggggggattcatcgcaatattcgtcgcctttgggctcatcaacctcggcttgcacttgtacgagagggcgccggggtggttggtgtggatgctcggcggcgtcaccacgctggaccgcgcgctgggcgactgctcgatgtgccggtacggcatggtggccggcgacgtcgtccgcacgctctcctgcggccacgtcttccacaaggactgcgactacagcgtcgacaaatggctccgcgagcacggcctgtcctgcccggaatgccgcaagaaggctcgcagcgttcgcgtgctgccgtggagagcgcggccgcagcagccgttgccggaggagcagaacccgccgccacaggagacgtctgcgtcgtcgtcgtcgtcgtcatcgacacacgtcaggattgctccggaggagccgggcgacctcgacctggaggctcaggaccagctgctaccgcccccggcgacaggttcgcccaagggcccggaggagcagcacccaccgcggccggcggcggcgacgtcgtcgagctccgccgacacctcgagtttggaggagccacttctgcggccatctgcgtcgccatga

SEQ ID NO: 54540 - DNA, 1449 bp, Oryza sativa
  Clone ID: PAT_MRT4530_56634C.1
atggagcagagcggccgcgtcgccgtgccgctcactgccttagcactcctcgccgtcgtagccgccggcgtcgcgctgccgcccgctccttcctccggcaccggcatccaagacggccgcggcagcgagcactcactacggcacgtcccggacgaaccccagaaggcgccgccgacgagtgtccatgctcgaccaatcaacaagaaggtgacgcgaggcaagatcgaggccggcttagctcggtcccgggcggccatccgccgggcggctcgcgcgacgccgccgtccgacgagagcatccgccgccgcggctcagcctccacggtcgtcgccgcggcgggcgacgacgactacgtgccgcgcggcgccatctaccgcaacgcgcgtgcattccacaggagctacgtggagatggagaggaggttcaagatctggacgtacagggaaggggagccgccggtggcgcacatcgggccgggcaccgacatctactccatcgaggggcagttcatgtacgagatggacgacccgcggagccgcttcgccgcgcggcgccccgacgacgcccacgccttcctcctccccatcagcgtctgcaacctcgtccactacgtctaccgcctcaacgccaccggcgacctcgcgccgctgcgtggcctcgtcgccgactacgtccgcgtcgtcgccgagcgctacccctactggaaccgctcccgcggcgccgaccacgtcatcgtctcctgccacgactgggcgccgatggtgaccagcgcgcaccggcagctgtacggcaacgcgatccgggtgctgtgcaacgccaacacgtcggaggggttcaggccgcggaaggacgcgacgctgccggaggtaaacctcgccgacggcgtcctccggcgcccgaccgcggggctaccgccggagaaccgcaccacgctcgccttcttcgccggcggcaggcacggccacatccgcgaatcgctcctacggcactggctgatcgggaacaagggcggcgccgccgccgacggcgacggcgacggggacatgcgcgtccacgagtacctccccgccggcgaggactaccacgcgcagatggccgccgcgcggttctgcctgtgcccgagcggcttcgaggtggccagcccgagggtggtggagtccgtgttcgccgggtgcgtgccggtgatcatctcggagggctacccgccgccgttcggcgacgtgctggactggggcaagatgtcggtggccgtgccggcggcgaggataccggagctgagggccatcctgcggcgggtgtcggagcggaggtaccgggtgctgcgcgcccgggtgctgcaggcgcagcgccacttcgtgctccaccgcccggcgcgccggttcgacatgatccacatggtgctccactccatctggctcaggcggctcaacgtcaggctcccctactga

SEQ ID NO: 54541 - DNA, 415 bp, Oryza sativa
  Clone ID: PAT_MRT4530_56635C.1
ccggccgggatcgtacccacgtgagtctccaccctcaggccatcagcttagcactggcaatagggaagaaagagatgaagaagctgcacgcaggcagcatctcatggcctgggtgtgctaacctctcttgctgcgtgaaggacatccgctttctcttctgtcaatccttcccaccagacgctaccgcatagggcagccatggatgaagaactacagtaacttatacgcacgcaacccatgcctacctgtcactgatcacgcgagtgctccagcctatagccctacttgaggacgcgctatgatttcagctacgagaggtgatgtgctcatttggatggtgctgacaccaagccacatatgcagcaaactgtacgagcttgccttggctgtggactcggttagaactaaataatga

SEQ ID NO: 54542 - DNA, 351 bp, Oryza sativa
  Clone ID: PAT_MRT4530_56636C.1
ggagaagcgggcgggtggcacccaaacccagatatggaaaaataatttcgtggtacaaaaaccataaactgggagctctttctcatcttcagagggcccttaccttatccctaacaactgggagtaatttagtaggagtataaataaaagaggggggaaaaccacactaggcctagcttatctgcttatcacttggccaggttcctacaaactggactagtttaaaaaaggcagagaaatgacaattatccggggggtttgggcatgtacaggaccatccattccattcttctcgaaatcctattctttgggggcattttaaatttgcagcccaccaaaaccaaacattga

SEQ ID NO: 54543 - DNA, 162 bp, Oryza sativa
  Clone ID: PAT_MRT4530_56637C.1
atggacttgactcgaagagcatcattgccagcacgcactactgcgttatacatgtatcctgcattctctaacagaacaacgcaacagaatgtcatccctataaacgcatgcacgcacgtaaatcgtacccctatgagcatctttaaagactgggctgaataa

SEQ ID NO: 54544 - DNA, 2478 bp, Oryza sativa
  Clone ID: PAT_MRT4530_56638C.1
atggctttccgagaggacaaatatgtgagatttcatgactggagatcagaacattctgttggttccgaaaagacagttttagaaggaaggcataatgtgtttgactcgctaatggatagaactgtaggagccttttcattcctagggaattcctcacatcctgaaaccctcaacaaaccagcttctgaggaaaagaagtccaaaacaagagttcttgatcctcaagggccattcttgcagagatggaacaagatatttgttatatcatgccttattgcagtttctgtggacccgttattcttctatattccagtgattgatggtgacaatatctgcttatatctggacaaaaagttggaaatcatagcaagtgtcctgcgattttttacagatatattctatttactccatataatttttcagttcaggacaggctttattgctccttcctctagagtgtttggtcgaggtgtcttggttgaggacacctttgcaatagcaaagcggtatctatcaacatattttctgattgatttcttagctgttctgccccttcctcaggtgctcgtattggtagttctaccccgtctgcaaggctcctcagttatgacggcaaaaaatatattaatggttatagttatttgtcaatatgtacctcggttgattcgaataataccattgtaccttcaaatcaccagatcggctggtataattacagagacagcatgggctggtgctgcatttaaccttttaatttatatgcttgctagtcatgtccttggagctctttggtaccttctttccattcaacgagaagacacctgttggaaagatgcatgtagtagacatgatggctgtgattcgggatctttattttgtgggagtaatgcagctagaaataacagtttcttacaagatttttgcccgacaaatggaactgacaatgcagatccaactttcggaatttatcttccagctcttcaaaatgtttcacaatcaacgagtttctttgaaaaattgttttattgcttttggtggggtctgcaaaatctaagttctcttggtcaaaatcttaagacaagcacgtatacatgggagaatctatttgctgttttcgtctcgacatcaggtctagttttgtttgcactccttattggtaatgtgcagacctatctacaatctgcctctgtgcgtatagaagaaatgagagtgaaacggcgtgacacagagcaatggatggcacatcgattacttcctgataacctcaaggagcgaatactgcgtcatgaacaatataggtggcaagaaacaagaggggttgatgaagagggccttctttcaaatcttcctaagaatcttaggagagagataaagaggcatctttgcctgtcgcttctcatgaggatgttagttctggactttctggttttgtgtcagacctttcctcttctgggtcatagtgttccaatgtttgaaaacatggatgagaagctcttggatgccatgtgtgatcgtctaaagcccatgctgtacacagaaggcagctgcatcattcgcgaaggagacccagtgaatgaaatgctcttcatcatgagaggaaatcttgagagtatgacgacaaatggtggacagactggctttttcaactccaatattatcaaaggtggagatttttgtggtgaagagcttctcacatgggcacttgaccctacttcagcttcaaaccttcccagctcaaccaggactgtgaaaacgctgtctgaagtcgaagcttttgctttgagggctgatgacttgaagtttgtagccacccaattcaggagactccacagcaaacaactccagcatacatttagattctattcacagcaatggagaacctgggcagcttgttttatacaggcagcttggcatagatactgcagaaagaaactggaggatactttgtttgagaaggagaagaggttgcaagcggcaattgtcagtgatggttcgagttcgctcagtcttggtgcggcgctatatgcttcacgttttgctggtaatatgatgcggatcttacggagaaatgccactcgaaaggcccgtttgcaggaaagagtgcctgcaaggttattacagaagcctgcagaaccgaactttttcgctgaagatcagtaatgtccatactttgctacatgcagaaattgatgcttcagctggtaaaagttctctctcccctgctgatataccatttttcagtatatgattgaattctgtacatagatagaccatttggttccaagccttttggtttatataagataattcgatttaccgttggatcttcatctatacatgtaatatttgtgttgtacatggaatgcatgtattataagcattccacttccacattgtattcttgtactcctgcctctggggaatccttgaaatggaagaccttgtaaatgtaactgatcacgagggcgttgtatgtat

SEQ ID NO: 54545 - DNA, 1891 bp, Oryza sativa
  Clone ID: PAT_MRT4530_56639C.1
acgaactttccagttggagccgcgaaagctatcgacgccacgtgagcgcatctactctcctcgcgtttcgggtggcccacgacaccgccgacgcgcgacgaacgccgtcgtgccgtcgtccccaaaccccctaaactgctccggcgagtcgtcgaactggccacgccgtcgcacgcacagttcgcgctcacctgcccagatagtaaactatttgggttgggaatttgattcatatggtggcaggattgcggttatatgtatatgataccaagcccattcaattgaaatgctccggcttatggttaaggagactatatgatgttgagtccttataagtctattggacttcaaggaagtgctaccaggtgtgatgagggtcaatcctgcgctcttcctgcctttgatggccgaatatgcagcacccacatgggccatactaatttcagggttcttcatgctgctttctgtttccctctctatgtacttgatattccagcacctttcagcatacaacaatccagaggaacagaaatttgttctcggtgttatcttgatggtcccttgctatgcagttgagtcgtatgttttattggtaaatcctgacaccagcgagtactgttgcaacctgtgtgtcgcctatgaaccattttctatgtattgctttggaagatatttttctgttcgtttaggtggtgatgaaaggtggattgcagtcttgaagggagagggtggcggagattctggggaccctcatttgtatggtgcttctgaaaaagagatcatactccatcacttccctgtgatttagttattgaaaccatggtgcggtcagagtattgtaagtgcagaattccacaatttgtgccatgcttcaaggggccaagtgtaattgagttcctttcacagaaggactcaggtattgtaccagaaaaaaagtaaagaagaattcaatttgagatgcggatacccatactttgccgctgtccttaacttcagtcaatattgggccctatactgtttggtggagtggtacacggctactaaggacgaattggcacatataaagccattggcaaaatttctttcgttcaaatctatagtatttttaacttggtggcagggtattatgattgctatcatgtattctttgggcttggttagaagtccgttggcacagagcttggagttaaagtcaagcattcaagatttcatcatttgtatagagatgggtattgcttcagttgttcacctatatgtgttccctgcaaagccctattcgctattaggtaatcatcgttcacctgaaaacatttcagtgctaggggactatgccgccactgaccctgtggaccctgatgagataaaagatattagtcggcctaccaaattgaggcttccacagttggaaccagatgagataattgtgacaaatgttaaagagagtgttcgagactttgtaattggcagtggagaatatgtgataaaagatctcaaattcacgatgaagcaagcagtgcgaccagtcgggaagcgctttgagaaattaatgaagaagaagggcaagttcgggcaaagccgtgatgacaattgggtgagtacctccacgccacagagagcaatccatgggatcgatgatcctctcatatgcgggagctctagtgacagtgggatcggtagaggaaaacggcaccgcagggacgtgcggtcagagtattgtaagtgcagaattccacaaattgtgccatgcttcaaggggccaagtgtaattgagttcctttacagaagtgcaaggtattgtaccagaacacaagtacacaactccctctgtaatttcgtgaaagtcgctgacacgaactggatgtacgccaagctcttgggaagtactccatga

SEQ ID NO: 54546 - DNA, 939 bp, Oryza sativa
  Clone ID: PAT_MRT4530_5663C.1
atgggtgaccgaccgggaattctgtggccaagaggggacgttcctggcctggggttagtcgacggggacgtcttcccggtgcgcacgagtgaggtggcggacgtggccaagagggccacttcctggtgcgcacgagtgaggtggcctggggttaatcgacgggggacgtggcgaagaggggacgttcctggcctggggttaatcgacggggacgtctttccggtgcgcacgagtgaggacaaaccagcggaggcggaggcgacagcggcgaccgcgccctccccttcgccagatccgggggcggcaggaggggaggcgccagcggcgggcggggtcggcgccagcggggccggcggtgtcggcagcgggtggcgggatggccggatccggcggcgggcggggtggctcgaggaagggaggcggcggaggacccgccagcggggaagagccctcccctccgccagatctggcgggaggggaggcggcggcaggggcgagccggtttctaacaagtggtatcagagcctgcgggagatctatggtagagacgtggtgctcgggttgatggcggcgcaagcgattggcggtccaatcggtgggtcggacacttcgggcgggtggctcgaactttctggaacacggcttggtgtggtcgtcgtgttggtgctggcgggattcgacgcgggccggctcctgtcaacggaggcggcgacggctcggttcatggtggctgtggatgtgtgtatgcatgcagcagaggggtccatgggcatattgtggagtcaagaggaagaagttacaaagatggcggagtctcttgttacggagagacatagcgctgtctttgatcttgccggatgtggattcgaagagaaaggctaccctgttgtcgactacgagtcagcacttcagaccgccaagtcgacaacacttagatag

SEQ ID NO: 54547 - DNA, 111 bp, Oryza sativa
  Clone ID: PAT_MRT4530_56640C.1
atgatgaacgcctggcacctggccatggcatttggtgaatctacaggtagtgctggatttgggtccggtcagaccggcgtgtatcgcgcggttagaccggcgcagcccgcg

SEQ ID NO: 54548 - DNA, 395 bp, Oryza sativa
  Clone ID: PAT_MRT4530_56641C.1
aatattataaaaaaaaaaaaaaaaaaaaaaaaaaaaaaaaaaaaaaggcaaataacccatatctactgactccagtgcaacggagttcgcgctcaaggacgccgatagctccgaccccatccatctccagcccttcacctggaggagcttcgaggacgggttccccagcctgttcatcaacagcgtccacagcaacccgggggaagtacggggggtccctggcgagcttcaggtcgccaccgggcatgttggagcagatctgcggtatcttcgccctgcccaagttgttcatcgcctccttcacgctggggctgcctttcttccgcgcggtctccttctagcgcgttaaggaggaggccgacggcgcccccgggttcaccctagcgcgcatcctc

SEQ ID NO: 54549 - DNA, 417 bp, Oryza sativa
  unsure (1)..(417): unsure at all n locations
  Clone ID: PAT_MRT4530_56642C.1
atggacaggctgtgctggtgcttcggcctcgctccatgggcggcggcggcggccnnnnctgccaccgtcgccggggtggcggcggacgatgactccgcctcggcctgcgatgacgccgttcacgaggtgttcagcttccccaccccgaggaacatgcagaggagctcctcggcgttcacgtccgattgtgattgccccgtatgctccgccggccgggaagaggttctaggtcctccatctaggtcaaagatccccggaaagtacccctccatgagaccgaggtctcttatcgcggaaatacaaaatgcgcctaatgccataggcgccagcaaccgctttttccaaaggacccccctggattttgccttgggggggaaccaaatttccccatttcccggtatcgggaatggtccttag

SEQ ID NO: 54550 - DNA, 419 bp, Oryza sativa
  Clone ID: PAT_MRT4530_56643C.1
ttttgttttttttttttttttttttttttttttttttttttttttttttttttttttttttttttttttttttttttgggccttaaccaggccctttttattttcacttttcacaaaatggggaacaacaaatttggcatcccaaatctcacaacaattccctcgcctttaaacttcagcaacaaacggtttggggaaacccaaaccttccaacatttttttagaccgcccccggggggaacacccccccctgggttttgggggtttgggcagggaggcaaaaagccctcctttaaacgggacccgccaactaaacccaaggggggttgatgctatcgggagaaaaaaactgcctccttgggggctttaaacccgcagatcccgggaaggtggtttgggaggtctccaagggggaaatt

SEQ ID NO: 54551 - DNA, 1723 bp, Oryza sativa
  Clone ID: PAT_MRT4530_56644C.1
ggcccgtgaaatggaattagggggcaaaaaaaaaaaagtaaggcgtcgcaaggccgggtaccaaaacttgggttctataaaacggccccccccaattttattttttttttttttatatatttttttttttttttgttttttttttttttttttttttttttttttttttttttttttctttttttttttttttttttttttttttttttttaactaggacaacctcatagtcatatcagaataaggattcagtttgttagccaaacatctggttctggttctgttgacgatctgattcagccattcaggagaattggaatcagaatcaccaagaaccagaattgggagcactaccagtcgggcccttggatcacacaattgaatatacaagtaaaggttgactgtgaaaaaaaattcagatttgagcatactcagatcaaggtatggatatcgatcaatccagattttctaggagaaaaatgcgcatacactgtacatgaaaaatgagacacaaattatagctaccatattatttgcattacactaaactagtgagtccagatatagagcatataccaagctcctaacagcaccggcaggagattacatctcggcatgtgtaaggtctagctctggcttgtagtacctccagcgggggcactgcttccagaaaaaatcccctctgtttagagatgcaaagatcatacagatttctgcaaatgcctttgctgaatggatgaaccctgctaggaacctcccttaggtaagaaatccgcttccttctggcaatttcatatgttgtttggttcgtaagagcaagataagcatggaatatcaacaagggcagcaggaccacgaggattaatatcaatgctaccaaaagtacaataccaatagcaaacttccaccaggatacaacgatgcccaaataaaagaactgaatgtagaaagcaacagtccagacagttaaaactgtttgttcgaatatgtaccaccaaaatctgcagtagttccttttagcaatgcatgttccaagccaaacacaatgatgatcaaattggaggacacatttatcacagtcatgacagtgcttggtgcgtggaggctggatgagccggcagtaagagcatgtgaaatccctggtggatgtcccaggaggatatagatccatcgtctgctgtagtaacaaagctgtagtggattgtggattttgctgatctattttgctgcgactcatggcagagtttaagcttccacttttggaattggcctgctttgagagagttgttgtattaataaaggttgcatgcatccttgagccagctgtcaacatatcaggtaaatatcctggagaagaagtggctgtatataggtattgtaccaaggtaagtaaaaccagcaacccatatagaattatgtaccacttggcctcgtggatttgcctctggagcgtcggatcgagcaggaagacggcgccgatgaacagcgcgtgcagcagcagcacgacgaccctcacgccccgccatggcttcctcccgtggcgttgcggctgggatagggcccggatccacacgcagggacctccggctccgcagcgtggcatcgtcgccccctccgccgccgcaccctacggccgtagggaggacgaggaggaggcggatgcagcggcgacgacggacgagcagcgcgcggtggcgacttcgcggggggcgagcccggccgg

SEQ ID NO: 54552 - DNA, 763 bp, Oryza sativa
  Clone ID: PAT_MRT4530_56645C.1
ccggccgggctcgcctcccgcgaagtcgccaccgcgcgctgctcgtccgtcgtcgccgctgcatccgcctcctcctcgtcctccctacggccgtagggtgcggcggcggagggggcgacgatgccacgctgcggagccggaggtccctgcgtgtggatccgggccctatcccagccgcaacgccacgggaggaagccatggcggggcgtgagggtcgtcgtgctgctgctgcacgcgctgttcatcggcgccgtcttcctgctcgatccgacgctccagaggcaaatccacgaggccaagtggtacataattctatatgggttgctggttttacttaccttggtacaatacctatatacagccacttcttctccagggtaattgatccttgcggatgttgaagttttccctagatgatgacacttatacgttgcgtttacttgactcttgtgctgttagatatttacctgatatgttgacagctggctcaaggatgcatgcaacctttattaatacaacaactctctcaaagtaatgtcttactttatgttgttttgccttatgatatatatgtattttaagtgctgagcctgagtatcgtacaccacttatttatgctaaattaaatgcctttgtgattaagaaaaggcaggccaattccaaaagtggaagcttaaactctgccatgagtcgcagcaaaatagatcagcaaaatcccacatccactacagctttgttactacagcagacgatggatctatat

SEQ ID NO: 54553 - DNA, 603 bp, Oryza sativa
  Clone ID: PAT_MRT4530_56646C.1
atgccgccgagctcgtcacccatgggaggagggcgactgggcgctgtcctcgccgttgaagctcgcaggctcgatgaggaaagcaacggagaaggagaggagctcgaggttgaggcgaaagggacggcagcggtggaggtcgatctggcccccccctcccccccccccccccggggagctcgatgcgtagccaacgctagcgaggagaagggaataatggatttggcgtcggcaaactcaggagagaggggagatccagcgagccgccgccatcgccgcccaaggccggatccgtgtcgtcgctgctcggtccaccgctccgctcggctccgcgaggaagacgaggtcacgaggctccggtcgacggagacctccatgaggacgactgcgagggcgaataatcaagggggaattcgtaagcatacgctgcaggagcagcggcgacggtggaagatcgaagggtttagggtttgccgtgtcaattggtgtagcgggtcattaaacatagttggaggcgatgggacgcggtggccgtacaacgaatctggacacattctctcctacacctattacaacgaatctagacataacgttatccagatt

SEQ ID NO: 54554 - DNA, 1089 bp, Oryza sativa
  unsure (1)..(1089): unsure at all n locations
  Clone ID: PAT_MRT4530_56647C.1
atgaagaacaagggcagcagctgcaggtatcttcctcactcttctgcaccatgcgccaccgacggcgccagatgtttccgctgcgaccaccggccggcgatcgacgagatcgtcagggagcagtcgctggtgacccagctgcgcgccgtcgtgctgccggcgctggagacgaaggccgacgacgggcgggcggagatcgtggcgcagctgttcgggagcatactggattgctccaggaaggtgatctctgctctgaattctcgctacgtcggagaatcacctcctgacgatgatgagatcgtcgacaaaaggagggcgaagaggaagaacagtgagggcaagaagggtgatgatcaggtgaaagtgaagccacatgagcacaagagaagcaggagatacactaactcaacatcacaaatcacagctgttccacattatgacggtcatcaatggagaaaatacggacagaagaatattaacaactcaaaccaccaaaggagctactacagatgcagctacaagcatgaacaaaactgcaaagcaaccaagacagtgcaacaactggacagtgccggcgaaaccatcatgtacaccgtggtctactacggacaacacacctgcaagactaacatgagcaatgctcctctccatgttgttgaaacaagtaccactcaaagcatctcaacaacatgctgctctgatgatcttggcgattatagccaaaagatggagaacatgcacacaccagagttggcagaagtgtgctctgatgagcttggttcttaccatgcaataataggggcagagcacagtgcactagggttggaggatgaacacatgcacaagctgctcgacacatttgcatgtggagcattagatctggacagctgggagattgatgcaattgtgagatctggtttctgctaggtgaattttgatgcatgttgctgtgatcagttttggtgcttaagatggagtttttttgtattataatgggttatatggtgcttactgaactttggtgaatgcaaaataaataggttagtgcttgctagatagcanggtaagttaaaaaatataagtacttat

SEQ ID NO: 54555 - DNA, 1128 bp, Oryza sativa
  unsure (1)..(1128): unsure at all n locations
  Clone ID: PAT_MRT4530_56648C.1
tttttttttttttttttttggttcggctcgagggctcaaataaacacatgctgattaattattgaaaaccaaaccaacattattacaatatgcataatacctcacccacatcacacttactacatcacaggctgtattacttaattttacatcttagcttagcttagctagaactgagctagctagctaacttagctttagctcagctcaagaggaactgaggttgtttctgcgtagccttctctcctctgagagcttcttggcaaagcgagcgagtgcctcctcgttggtgccctctccatcaacgggctcgtatactccagtgtctatgttcaccctcgccactcgcttagtcagaaggtccttgccgatcttgatcagtgcctccatgttctcctccgtcgcgatatccaccgacgacgtgtgccccaccagcgaatcgtcctaaatgcggaggtagctcttctcgcaggagagagactggaagagaacggaggcatggatgtcgaccatgtctgcacttgcatggctgaagatgtcgatgagtggggtgaagccgctgtcgtagagccaccggagtacaccccatttcgcgcatgccggtgcggtgtacttctccgccatcgtcgccgttcccgtcccgatcgagatcaccaagtagtgcctgtaatctgctggcttacccaatttgaagtcctggttctcgcgcaacacctccttgctgatcatagacatggctaccattgttaaatgatatatgctcggtatcgggttgtttgcagcgacaccgcgatcaataaggtggaactctcgagactcgccggaggggctggtggtcttgaagaagtgcgcgaggaagtaagtgggcgccgctnacgtgctgatgcagatgtcggagaggtgggcgttcttgaggggctcgttcttggcctcgtaggtggagaagatgatgggttgcagatacttgacatcaaatgctggcacgacgatgttggtgactgtgtcggcaatggtcacatcgtgggtaaggctcttgatcttgtcgtgcaagaacgagccgtcatacttgggccctctcaccgtgccaatcaggttcgccaccggcgtcaagaacccaacctttattat

SEQ ID NO: 54556 - DNA, 2070 bp, Oryza sativa
  Clone ID: PAT_MRT4530_56649C.1
atggaggtagctgataagattgtggagccaaagggccctttggtggccactgctcagctgccaaataatgtagagttgctcaaatcagttgtgctgaatccatcaagggaagggggaagctcacaagagcagtatgagaaggatctgttggcagaaggtgaggagagttttcggagcgaggagtcatctgacgagggtggccggagttcattctccggggtgagccaccctccggagccaattgatgtggatcttatgagcacggtgtatgtcgcgatcgacgaggagaagcctgagccacccgagtgcttgatgcgaggcctatcggtcaaaggagcatctatggaggacctctcagtccatgccatggatgcaaagccggatgtgattgtttgcacagttaatgtcaatggtttggttgaagagaggaaggtgcactgtgctgtggtagcaccagatgctgttgaagccgtatcctcaactcaggcctcggaggagaaggattgcgtctgggatgcctccttccctcccagtggcaatgtcagcccacacagtagcagtgacagcactggtgcggtcgctgccacaagcatcaggggaagatccacaagcacatgtagaagtggagttctaactagtgaatccatccttaccgtggagaagacatgtgagagcgcaaaggatagcacccgaggcaactcaatggaaagcacaaagaccagcatgagtcgagcgagtgatagtagtggcgttagcgatgacagcagctggagcaacatcacaggaagtgctaacaagcctcacaagggtaatgatcctagatggagggctattctagctgtacgggctcggggcaatgtccttgggatgagccattttagattgctcaagcgtcttggctgtggtgacattggcagcgtctacctctcagagttgagtgggacaaggtgctactttgcgatgaaagtaatggacaaggcgtccttagcaagccgaaagaagttgaacagagctcaaactgaaagggaaattctgcagcttttggatcacccattccttccaactctgtacacacactttgagactgacaggttctcatgtctggtcatggaattctgtccgggtggtgatctgcacactctgcggcaacggcagccacgaaagcatttctctgaatatgcagcaaggttttacgccgctgaggtgctcctagctctggagtacctgcacatgctgggcgtcgtctaccgggacctgaagccggagaacgtcctggtgcgcgatgacggccacatcatgctctccgacttcgacctctctctgcggtgcgcggtgtcgccgacgctcatcagagcgtcggcgtccgactccgatcccaggagagccggcggttcgttctgcgtgcagcctgcttgcatggagccttcttcggtgtgcatccagccggcgtgcttcatgcccaagctgttcggccagaggagcaagaagcagggccggaggccgaggtccgagttggggcagggcggtggcgccgccctgccggagctcgtcgccgagccgacgtcggcgcggtcaatgtccttcgtggggacgcacgagtacctggcgccggagatcatcaagggggaaggccacggcagcgccgtggactggtggacgttcggcatcttcctccacgagctcctctacggcaagacgccgttcaaggggtcgggcaaccgcgccacgctgttcaacgtggtcgggcagcagctgcggttcccggagtcgccgtcgacgagctacgccgggagggacctcatcaggggcctcctggtgaaagagccgcagcagcggctcggcgtgaagcgtggcgccgccgagatcaagcagcaccccttcttcgagggcgtcaactgggcgctcatccggtgcagcacgcctcccgaggtgcccaggcatgtcgaggccgagctgccggccaagtacggcgtggccgagccggtggcgagcggcggcggaggcggcaagagggtggtcggcgccgaggtcaggtccggcgggaaatacctcgacttcgaattcttttag

SEQ ID NO: 54557 - DNA, 531 bp, Oryza sativa
  Clone ID: PAT_MRT4530_5664C.1
atggcggcgcaagcgattggcggtccaatcggtgggtcggacacttcgggcgggtggctcgaactttctggtcggagcggatttgttggcgacgaagtccgagcggcaggaacacggcttggtgtggtcgtcgtgttggtgctggcgggattcgacgcgggccggctcctgtcaacggaggcggcgacggctcggttcatggtggctgtggatgtgtgtatgcatgcagcagaggggtccatgggcatattgtgcgttggtccaaggcatcgagcagaggttgcatcggaatcggtcgtaggaacgaattcaatttcacttggcaagacgattgtggtgataggagagaaggtggagcactgttgcaggtggagtcaagaggaagaagttacaaagatggcggagtctcttgttacggagagacatagcgctgtctttgatcttgccggatgtggattcgaagagaaaggctaccctgttgtcgactacgagtcagcacttcagaccgccaagtcgacaacacttagatag

SEQ ID NO: 54558 - DNA, 246 bp, Oryza sativa
  Clone ID: PAT_MRT4530_56650C.1
gtgccgccgcgccgccattcccgtgctgccgcgccgccattcccgtgccgccgcgccgccgttcccgtgcccccgcgcgagaccgagggagccgcggatccaggtgaaggccaagacccgcaagacctcgagcaaggcaagtcatcactattccttgaacatgttgatcctaattgcgaaattgttttgtttacaaataaaattgcatgcaatgatgaacatcctacttgtgattatgccatgcct

SEQ ID NO: 54559 - DNA, 986 bp, Oryza sativa
  Clone ID: PAT_MRT4530_56651C.1
gagttggaaaaggattggataatccgtttaatagaatattcgaaagatcctagtcttagggttgatcgggaaattcagcggcaagcatttaaatatactttgcttgatggggagttatatcaccgaaatatagatggggtattactgaaatgcttagataatgatcggtccaagtttcccataagatgaattggttgcttaagagagtggggttttattggccgaaaatgattaatgattattttaggcattatacgggatgtgaagcttgtcaacagttcgttaatgttcaattggtgcccgccgcagtgttcaatcctattattaaaccatcgccgttccgaagttgggctttagatttcataggtcaaatttatccttcgtcatccaaaatgcatcagttcgtgccagttgtaatggattatttcaccaaatgggccaaactcatgctgctttcatctctttactacgctcaggctaatggacaagccgagttgagtaataagatgtcgttgaaattagtcaagaaaaagatcgaagaacatccaaagaggtggcatgaggtgctttcggaagcattatgggatgataggatatctgaacatggtgctactaaagttactccttaattttgagtaggcttatggacaagaagccgttttaccgatagaggtgaatcatggctctcttagatacataaagcaagatgacttattggttgaagaatagaaaacatttatgggagacaatctttatgatgtgaccgataagtgtttgaaggctttggaagtgatagagaaggagaaaaggagagtagctaaatcctacaataaaagagtgaaagaaaaatctttcaagcaggagacttggtatggaagacgattttgcctttgggttctcgatttatggagttcccagaacgatttcaaagagcaattaatgggaaatacttgaagaaatacttcccgagtgtttggcaagttccc

SEQ ID NO: 54560 - DNA, 198 bp, Oryza sativa
  Clone ID: PAT_MRT4530_56652C.1
atgagcacgaccaaaccaccactgcacttcggcgaccagctagccttcctcccatgccgtcacctccaaagagagtgcccgccaccgcccatcactatcgataacaacctggggcaaccttgccgccgccttcaccgtctcgcaaaggagctccccacgaccaggcggtcaagaaggggaggagctccaaggagatga

SEQ ID NO: 54561 - DNA, 550 bp, Oryza sativa
  Clone ID: PAT_MRT4530_56653C.1
aatactctatactttctacattgaagtatttgttattttatacatctgatattgtcaattgtaccacaaactcattcagaagcgacatctgtcaccaatttattccctcatcaaccatgtctagccttatcagccaccaagacagcaacagccttttcaagaacagaagaacatcttcaacagtatcaaatgaaagtactctgagcacccacgagattgagtacatgtcgcttcgagatgaaaatctctgctacgaagatgacgctgatttccatattttcatcgacgccatggatcgcgttgacgagctcgtcacacaaattgcttcttctcctcagggggggcgaagacattcaatgagccgcgtaatattcagtggactcaaactacgccgaggaagtcaggatcgacacaacagcgctaactagagtcttatcaagatctggtgccctttgcttttgctttactttgcgttgctttgctcttttggcttagccggcccagccgacatggctattcgataccaacttcatcgcattcgcgctttata

SEQ ID NO: 54562 - DNA, 294 bp, Oryza sativa
  Clone ID: PAT_MRT4530_56654C.1
tgtgccgccggtcagaccggccttatgcgccggtcagaccgccttcttgcggctggtcagaccggccagggcacgccggtcagaccgccactatgtggctggtcagaccgcccctggtcaggccgagccgaatgcttcaccgcgtgctgcccctcctcgagccgccgccgcgtcccatgcttcaccaccactgaaaccgcccctgtgcgaaagccaagattgaaaatgaagggcgccttttcaagccaggccaattcattaaggttagtgaaccaggaatttggaagcgttaag

SEQ ID NO: 54563 - DNA, 514 bp, Oryza sativa
  Clone ID: PAT_MRT4530_56656C.1
ccggccgggatcgcgagggttttttgctgctgccgagaggagtggaggcgcttccagatctcctcccctctctactcccgtcatgagccgatcggggcagcccccggatctcaagaagtacatggacaagaagctccagatcaagctgaatgcaaaccgtgtaattgttggtacgctccgtggattcgatcagtttatgaatttggtggtggacaacacggtagaggtcaatggaaatgacaagactgatattggaatggtggttgtcagggggaacagtgttgtgatgattgaggcattggagccagtgcccaaatcccagtgactcccgtggcatattcctgattcagtagctatagagctggtagcaagaaaactgatgtatatgctgttgatgttcttgttgtaccttgtccttaactgatgtgtggaatattgacttcgtttcttgaatatggaatgacaaacctttgataaaaaaaaaaaaaaaaaaaaaaaaaaaaaacccgcggcc

SEQ ID NO: 54564 - DNA, 264 bp, Oryza sativa
  Clone ID: PAT_MRT4530_56657C.1
atggccgacggcgcgggcgggctctccggcctcggaccggggaaggggaagaaggagggtgcccggagtcctcttcggctcctcgcgcgcacgcaggcttcaccagcacgcgcgacggcgaaggatgtgaggtcggcagctgcgaggcggcaacaatggcgcagcggcggtgtaagagagatgccgagagagaatgagatggggaggctcggcttgggctttatagatggagaagaggcggtttgggagggggaaccgacatag

SEQ ID NO: 54565 - DNA, 269 bp, Oryza sativa
  Clone ID: PAT_MRT4530_56658C.1
cggacgcgtggttaatttgtaaaagaaagatgtgccagagatctttatgaaaaagaaagggaaaagaatcttcctaagacgcgaggatctgaagaatacaatagagaatgagatgggtggccttatagtagattactggtctacaaggctggtgatacctgttatatttgcagagagttgaaacctctatatgagtcgacgtatcaaagcctcatttcttaccaacgcggcttgcccaagaatggtatgtacatgttgcatacagcagc

SEQ ID NO: 54566 - DNA, 274 bp, Oryza sativa
  Clone ID: PAT_MRT4530_56659C.1
ccggccgggaccttctcaaacctcagccacagaagaagatggcgaaatcctatgcaggcggagtcgtatacaccactcgctgtcaggatttgacatgtcgacaaaaataaactccacataggagatgtaagcgaaatgaccgctagaacgataaagttatctcagaatggtattctctcaccattgtgataatggttgtgttaatagtttggcaaataggatagaaaggacttcacaaggtaaacgccatagactgtatggatcgacggggcac

SEQ ID NO: 54567 - DNA, 734 bp, Oryza sativa
  Clone ID: PAT_MRT4530_5665C.1
atgtggccctttttttttttttccttttctttatttttctatatttttgggtgttttttttttagggcccaacaaaccccttcccttaaattaaaacatataggcgggcccctcacagggcatattacacccgcccaacaaggaatcctagccctaatcaaagcccctctcatcaaaggggggcaacccctcaaccaaatacattctacattgggcccttgttggtcccatggcactggaaaaaaccaaatgaagggagaaccccaggggggggagaaaaaacaaaagggaacttcccaagatggctcatacaaggggggggaaccatttcggggggaattttaccccctgggcgaaggaccccctagaggggggggctttttctgggggccccctttcatggccttgggctttgccttgggaggaccaactgcctttgccttttgcccccttgctaccggtttcttttgatcaggaggagagggggctacggttttcttatgaccagggggagacagggctcccggtttcttttgatcaggaggaaaagctgaccccggtttcttctgaacagggggagaaggggaagactttttcttaggggccttccaaacattgaggggggggcttaaacagaaggagccttgcaccttaaaaactgaggggtttgggcgggcatttcccttcttggcccggcccttcttaagggtttcgggggggacccaagaacgggg

SEQ ID NO: 54568 - DNA, 1572 bp, Oryza sativa
  Clone ID: PAT_MRT4530_56660C.1
atggatgttccttctgttgtgatccccattttggttgtgctggtctcgagactcctgacaagcgccctggtgcacctgttgtggaagccctacgccatcaccaagctgttccgtgggcagggcatcacaggccccaaatacaggctcttcgtcgggtccctcccggagatcaagcgcatgaaggccgccgctgccgccgacgaggtcgccgccggcgcccactcccacgacttcatccccatcgtgctgccccagcacagcaaatgggccacagatcacgggaagacgtttctttactggcttggcgctgtgccggccgtcagcctcggcagggtggagcaggtgaagcaggtgctgttggagaggacggggtccttcacgaagaactacatgaacgcgaacctggaggcgctgctgggcaagggcctcatcctggccaacggcgaggattgggagcgccatcgcaaggttgtgcacccagcgttcaaccacgacaagctcaagttcatgtctgtggtcatggcggaaagcgtggagtcgatggtccagcgctggcaatcacagatacagcaagctggaaataaccaggttgaattagacctaagcagagagttgtcagagcttacttctgatgtgatcacccgctcggccttcggtagcagccacgaggagggcaaagaggtctaccaagcacagaaagagctccaagaactggccttctcatcatcattagatgtgccagctctggtttttctaaggaaattaccaatcataagggggaacacacgagctcatcagctcgtcaagaaatcgaggaccatgctcatggagataatcgaaggacggcttgccaaagtcgaagctgccgaagccggctatggcagtgatcttcttggactgatgctggaggcgcgagctctggagagggaagggaacggcctggttctcaccacccaggagatcatagacgagtgcaagaccttcttcttcgcggggcaagacactacctccaaccacctcgtctggacgatgttcctgctgagcagcaacgctcagtggcaagacaagctacgggaggaggtgctgacagtgtgtggagatgcaattccaacgcccgacatggctaacaggctgaaactggttaacatggttctcttggaatcactgaggctgtacagcccagtagtaatcataaggaggattgctggttcagatatcgatcttggcaacctaaaaattcccaagggaactgtgctttccataccgatcgccaagatacaccgggacagggatgtatggggacccgatgccgacgagttcaaccctgcaaggttcaagaatggcgtgtcgagagccgcgagctacccaaacgcgctgctgtccttctcacagggtccaagaggttgcatcggccagaccttcgcgatgctagagtcgcagatcgcgatcgccatgatcctccagaggttcgagtttaggctgtctccatcgtacgttcatgctcccatggaggcgatcaccttgaggcccaggtttggacttcctgttgtcctaaggaatctccagggatga

SEQ ID NO: 54569 - DNA, 1260 bp, Oryza sativa
  Clone ID: PAT_MRT4530_56661C.1
atggcagtcgccgcaggatccgccgccgtggcgtgcctcctggtggtcctaggcctcgcggccgtggcgggggtggacggcgcgacggcgagctcccacccggccccggcgccggcgccggcgccggccgtggactgcaccgccgctgaggcgctgaaggtgggggcctgcctggactacgtgacgccgggcaaccccccgcggagccagccgtccaaggcgtgctgcggggaggtgaagggcgtgctcaaggacatcgccggcgtgggctgcctctgcgccgccatctccacccatgcgctgcccctcccgatcaacgccacccgcgtcttgcacctccccgccgcctgcggcgccgacgcctccgccttcaccatgtgcctcgacgttggcgaactgagcggacgacaggacgtgaagaactcgaacttggccaagagcaacacgctcatggacaaaatgcaggtcgagctcaatgttatttcggcgaccgcgttggcgacgccgcggtacttggcttcggcacttgatcgtattggagagctccagccatgctgcgatatgctgtcggccaagtccaaggacaaacgctttgaagcgctcgaaccaggcccggagagcctgtttgaggctgtaaagagaagggttcatgcaacatacggcgtcggggtgcttggcatcgatgaagccgtggcagctgtagaagcatatggtgcgatcggcgcagatggtgcagtggcggtgtttggtgcgatcggcgcggtcggcggcatggcagtggctgctgttggctgggttgcaactagcggtgcagcggtaaccacggtggttggacggatagccgaggaagacgcaagccgtcaaatggggagaaagtttatgtggtgcagtggagcggaagaggttctcgatggactgccacatggaggcggcggtgccgccaggggctatgacgatgccgagtatctcctaggagatggagccgtagatccaggagaggacagtgtagtccatctgtcgccagtcggcgtcgacgggtggcgcggaggggcttgccggagagaggtggtgagacagctcgaagagggtacgccaatgggtgtagttggacttggagaggtcgaggacgaccgggacgagagacttgatgtggacggcgacggcttgggaccaaagctgggcacaggctgtcttggctacttcagcagcggcggcagtggcggcggtagcgctagcggcggagtcgtcttgagccattag

SEQ ID NO: 54570 - DNA, 328 bp, Oryza sativa
  Clone ID: PAT_MRT4530_56662C.1
gtggtgttgtttttggtttgttttttgtagatgaggatgccaacaggttcacgctgtggaaagccagagctgcagggggggggcagggcgggcggaggacggggagaggaaagagtgaagcacaaatcggcaggggaggtggagaaaacgcaaaatggggcggagggcaccaccagggcttggaggaagctgtgcctgcctacaaccggggccaaggtgaaaaccggggccggcgccccgtggggggagtggcccaagaccaagcagtagacgcaacgaaagcggaaaaaggggaagaggccgggagggcaaaaccccggaggggaag

SEQ ID NO: 54571 - DNA, 190 bp, Oryza sativa
  Clone ID: PAT_MRT4530_56663C.1
tcataatcaccactctcactccgcctcttaccagcgggtttttaaacatctgcgggttcttaaataaactgcaccttcattatcacacactttaacaccaacccttttcctcttttacctttcactgactctttaccaactcattcctctctttatctctcttttgcctgactctctccatcttttttct

SEQ ID NO: 54572 - DNA, 891 bp, Oryza sativa
  Clone ID: PAT_MRT4530_56664C.1
atggcgcaacgaagtcccggtccagctcaccgcactgtgaccgacctaagcgtgaggcccagctgcctggttagccctgttgcagtgcgagcaaacggaaatacgcatgagaatgcagaaaagggcgcgagaagaggcaggtggacgttttggcgtcaggagctgaggaggcaatcttgtgtctcaatcgtggcttctcaagctgctactgttgccctccactacaaggcctccaaaccggagcagcagaccacctgtgccgcggaggagacatccatgcgatggagagagatggggtggaggccggcggaggaggggtcttcttcagggacgtcgtcgacgcagatcacctgcgccggtggaagccgacgttgtcgacgcagagctcaacctccatactggggcagcagaactcccacgcagaggacacatgggagaggaatggcgaggagggcggcgtcggagtggtcttcttcaggaccaactccacttgcgctagcgccggccgaggcgacgactagcggcgagcggtggtcagctatggaggcggagcgttgtttatcccctgcacttgctccaaacagggggtgcggggacgtggtggcgacgaggatggacgtgaggtggtgcggcgactcgatgcaccggtcctgcccggctcggcatttggccaagcaggtggcgggcggcgtgctggctggccttgggccaggccaggcgcagtggggcagcgtgtcgctgcggcccaggaaggaaggaggtgggaagctgggccggcctagagagggaggacaacaggacctggggttggctggcctaaataaggaaaaagtgcacccaaggtccctcaacttgtcaacgaaatacaaaatcgtccgcaaaacgaattag

SEQ ID NO: 54573 - DNA, 482 bp, Oryza sativa
  Clone ID: PAT_MRT4530_56665C.1
atttttagttgcttttttgggtctctactcttttagctgtagaaaatttgcagtgcaaatcatgcaaccctttttagctgcagagcaaatgcaacactgcacactgcaacattgtcatccagaaaaagaacagaaatacatactggtattataaaaaaaaaaggggtaatcagattactgtgacaagtttgtttttcctgcagggttggctgtgatcacagtgatgctggtgaccacctgcctgacgtccctggtgatcatgctgtgctggcgcaggccgccggtgcttgcgctgtgcttcctcctcttcttcggctccgtggaggcgctctacttctcggcgtcgctcatcaagttcctggagggcgcgtggctgcccatcctgctggcgctcttcctcatggccgtcatgctggtgtggcactacaccaccatcaagaagtacgagttcgacctgcacaacaaggtcaccctggagtggc

SEQ ID NO: 54574 - DNA, 708 bp, Oryza sativa
  Clone ID: PAT_MRT4530_56666C.1
atgttccgtgacggcaaggaatactgcgcctccgtcggcaaggcatggaagcgcggctacctgctgtgcgggccacccggcaccggcaagtctaatatgatcgccgccctggcaaacttcctcgagtacaacgtctacgaccttgagcgcggtggcttgggcgaggcggcggtcgggccaaggtggcggcagtcgggccaaggtaattgttatccagtaattgctgcgtatcccacaggaaagtggtacatcggtatatcagtgcgcttgcagattttatttgtgaccgtgagaattactaacaatgggcacggtgaagaatatcaatatatcaatgatttggctgatagaattgcaaagataatagaggagcattttggaattaaacctaagcaacatatttatgtgtatcggctgccatatcccaagtggtttgatagggttccattgccacaccgatacaaggttccagacttctccaagtttttagggcagaatggtacatctacgatggagcacttcagccaattcttagtattgagagttaatttttttccactatctttgactggatcgaccttcacatggttttcatcactaccatcgaattctatcagcggatgggctgatcttgagaagaaatttcatgagtacttctttgctggcatcattgagatgaagttttcagatttgatatcagttcagtag

SEQ ID NO: 54575 - DNA, 765 bp, Oryza sativa
  Clone ID: PAT_MRT4530_56667C.1
atgtcgctctactatgtacccagacaggaagacttaagtgatctcgagggctgtcaccacctctacacctacttcaaacccgggccgccgccgcgcccgaccgccgccaccttggcccgactgccgccaccttggcccgaccgccgcctcgcccaagccaccgcgctcaaggtcgtagacgttgtactcgaggaagtttgccagggcggcgatcatattagacttgccggtgccgggtggcccgcacagcaggtagccgcgcttccatgccttgccgacggaggcgcagtattccttgccgtcacggaacatgccttatcgactggggttgttggtgaagaggcggtgctggcggttgcggagggtgacggcgcggccctttgcaaggacgtggcaaaggtaggcgttcttgacgagcgcgcggtggcggaggtggaaggtgaggcggtagttgcagcgctcggcgttgcgcggggaccaggtgatgacattggcattggggagcgccttggtcttgcttcaccacatggtggcaccgcggaaatcgtcggcgatagcctcgtggtcgtcgacggcgagggccatgcggtcggcgccctcggcgaggtcttgacggccgcctcgcccaagccgccgtcgtgctcgaccgccgcctcgcccagccgccgccttggcccggcggccacctcgcccggctgccgccgttctcgaccgccgccacctcaccgcggccgattgagggagtggttgagggagaagagataa

SEQ ID NO: 54576 - DNA, 606 bp, Oryza sativa
  Clone ID: PAT_MRT4530_56668C.1
tagcttcacagagacatttattctggactaaaatagcaggaggacatgagctaagctacgcagctattatgtgaccctacacatgatgagaaattcacatacagaagtgatattttcaaaagcattaatactaacttaagattgcataaccactgttgttccagggtatgggttctagactcagtactgtataacccctgaaggcaatgggagcatctttcattaattttgtggttaattctgagacagatgagacagaggtcttggaaggcaggaattcaatatgtgcctggtacatttgcagcctgaactgaggaaaggacagcaaggacagaggaaaatgcataagtacaggacaaaacaattatgtgcattaatggcaggaaaatatcgagaggttacttggacaaggagctgacactctgtcagcaagtgtaagaaggctgagagaatcacctataggaacaagacgtgctgcatccgaaggagaactgatcacatagaattctggggccaggagaaaatgagcttgggaaactggagggagcctcatatatacctacaggcatgattttaagaaacagtattctgtctctacaagacatg

SEQ ID NO: 54577 - DNA, 183 bp, Oryza sativa
  Clone ID: PAT_MRT4530_56669C.1
agattcgtagtttccttggtcttgtggggtactaccgcaggtttattgagaacttctccaagatcgctagaccaatgactcgactgcttcagaaggatgtgaagtataagtggacggaagagtgtaaagcaaatgttgtagcagatgctctcagcaggaaaagccactgtaatatgtcagaag

SEQ ID NO: 54578 - DNA, 329 bp, Oryza sativa
  Clone ID: PAT_MRT4530_5666C.1
atgggtgaccgaccgggaattctgtggccaagaggggacgttcctggcctggggttagtcgacggggacgtcttcccggtgcgcacgagtgaggtggcggacgtggccaagagggccacttcctggtgcgcacgagtgaggtggcctggggttaatcgacgggggacgtggcgaagaggggacgttcctggcctggggttaatcgacggggacgtctttccggtgcgcacgagccacagctcaagacctccgtcgacagctaaggcgagcccgggcgatggctactgcggcgcggtggccccgtcgtggatccgtcgtcgtggcgcgtg

SEQ ID NO: 54579 - DNA, 619 bp, Oryza sativa
  Clone ID: PAT_MRT4530_56670C.1
caaatgctactcggctgtacttcattcaactggaacaatcttttcctctataatgtacaacatgtgagctaaaatcgttcattattgtacaatgatctacacactacaacgaaatatgtgaaaggcaaataccatcattctgcagctatagcatcactaacactgttggatttcgtagctgcagagtgaaaggcaaataccatcattctgcagctatagcatcactaacactgttggatttcggtggaacagtaagcccataaaaaatttccagtgtgttctgataaccatttagaacaagtattccctctttcactaccattgtcattattatcatacgctcctctcaatggccacttataaatactttcattgtttaattgtgtagaaggaacagaaccagaagaaccattgcaggttattccacttcatttaaaactctatgagcgtgttgcacaaattgattgaccctcttagtcaatatttcatttcatttgtttagcataatattgtttagtataatacaccattattataggataaggagtcaggggagcatgtaggatccaaagtcagcatgcccaataatggcgtaccatcgaacttgatacgatctata

SEQ ID NO: 54580 - DNA, 1134 bp, Oryza sativa
  Clone ID: PAT_MRT4530_56671C.1
atgcagcagctgctcgcgatgaagctgatcctgacgacgctcgtcgtcgccgtgctggcgctgtccgccggcacggccacggccacctgcgacacgctcacggtcgggcactaccggcagtcgtgccgcgccgccgagaccatcgtgcgcgacaccgtcaagctctacttctcaaaggaccagaccgtcaccgcgccgctgctccgcctccacttccacgactgcttcgtcaggggatgtgacggatcggtgttgctgaacgcgacggcggcgagcgggccggcggagaaggacgcgatgccgaaccagagcctggacgggttctacgtcatcgacgccgccaaggcggcgctggagaaggagtgccccggcgtcgtctcctgcgccgacatcctggcgctggcggccagagacgctgtctccatggctgccgggaacatcaatggcgcgagcctttggcaagtcccgacggggcggctcgacggccgcgtgtcgtcggcggcggaggccgtggccaacctaccgtcttctttcgcggatttcgctaagctcaaggagcagttcggttccaagggcctaaatgtgcaagacctcgcgatcctatcaggtgctcacgccataggcaattcacactgcgtctccttcgccaagcggctctacaacttcaccggcaagggcgacgccgacccgacgctcgaccgggcgtacgccgcggcggtcctccgcgccgcctgcccgccgcggttcgacaacgcgaccaccgtcgagatggtgccggggagctcgacgacgttcgacaccgactactacaggctggtggcgagccggaggggcctcttccactccgaccaggcgttgctccaggacagggaggcggcggcgacggtgcgcgtcatggcgaggtcgagcaggcaggcgttcttccggcgattcggggtgtccatggtgaggatgggcaatgtcggggtcctgacgggagccgcaggagagatcaggaagaactgtgctctgattaattgatgggcagagatttgatctttgatataagttattactaagtcatgtactaatgatgttctattgtttggtgtctaattaagttattactactactacaaggtaaatttcatcagc

SEQ ID NO: 54581 - DNA, 997 bp, Oryza sativa
  Clone ID: PAT_MRT4530_56672C.1
ctttttaacgttccccgacgccggccggccgcccacggccctcgcgcgcatgggcggcttcgctccccaccccgtcgtcgtccccaccgccgccatggacgggaccagcagcgttagcgcgcggacggcctcgtctctgtcgtcgtcgtcgtcgtcgctcgacgacggcggccgtggccggcctccgccggccgggtcgacgctggagctgccgtcgcggaagcactaccggtacccttcccggtcggcgaggctgttccagaagctgcgccgctcgctcccgctgctgacgctggcgccgcggtgcggccggatgcaggtcggctcggcgagcgaggtcgccgcggcggcggcgtccggcggaggaggaggaggagcagccgactcgcacctgatgtcgcacgtcgtgtcgtcgttctccggcgcggcgcggccgatgcggcgggtgacggggacgctgttcggccaccgcaagggccgcgtcgcgctggcgctgcaggagacgccgcgctgcctgcccaccctcgtcatcgagctcgcgatccagacgaacgcgctgctccgggagctcgccaaccccgccggcgcgcgcatcgtcctggagaccgagcgccgcgcgccatccacggacgccgccgccggcaagcaccggagggcgccgccgctgctggacgtggcggcgtggaccatgttctgcaacgggaggaagaccgggctcgcggtgcggcgggaggcgacggacgacgacctcgcggtgctggagacgctgcgccccgtctccatgggcgccggcgtgctccccgcctccaacaggtcgtcgtcgtcgtcgtctcagtcgccggagaagggggcggcggcggcggacgacgaggtggcctacatgcgcggctgcttcgaccacttcgtcggctcgcgcgactccgagtcgctctacatgatcgcgccccagggcggcggcaccggcccggagctcgccatcttcttcgtcaggctatga

SEQ ID NO: 54582 - DNA, 2247 bp, Oryza sativa
  Clone ID: PAT_MRT4530_56673C.1
atgggcagggcgatcgaccgcccattggagtttccgaataatatatgcatgaaccttgcagtgaagagaaaaaaacagcactacagctttgcactgcataagtttcaaggaaggagatttaaacaccaccctaatcttgtaaagcaacacgattttgcagaaagtacaagtagaacggtctgtgaccggtggcagatggatgggacgggtaacaacgcacccacgccccgccctgtgtcaggcggcgtaggggcagccaatccttccctgcctgactggctgtctgcctgtctggttaacctgcttgagaataagctggaggatctactggcaagtgggaacttagttattagacaggagtccaatgcttcaagtgtgctctggcaaagtttcgatgatatcacagacacatggctcccagcaccaggaatgttctctgtagagattgatccagatggctcaaaccagtacattatctcgtggaataagtctgtggtgtattggggtactggtaattggactggcagttcatttcctaacatgccagagttgtcacctgctaatacctatcccaacaccccttacacttataagtttgttaacaatgacaaggagacatacttcacctacaatgttacagatgatagagtattatcaaggcatgccattggtgtgtcaggtcaaactcagtctttggtatgggtagagtcagcacaagcctgggtactctatttttcacaaccgaaagcaaattgtggcgtgtatggactttgtggagttaatagcaagtgtagtgggagtgccttgtcatcatgtagctgcctcaagggcttcagcattcgtgatccaaatagttggaatcttggtgatcaaactgctggttgtaggagaaatgtcatgctgcaatgcggaagcaagagttcagcaggaggacagcaagataggttctatacaataggcagtgtcaagcttcctgacaaatcacagagtattgaggctaccagtattcacagctgcaaattggcttgcctgagtaattgttcctgtactgcctactcttataatggtacttgttcactttggcactcagagcttatgaacttgcaagacagcactgatgggactatggactccatttatattcgattggcagcatcagagctaccaaattcaagaaccaagaaatggtggattattgggattatcgctggtggatttgctactcttggtcttgtggtgatagttttttattctctccatgggagaagacggattagtagtatgaatcacactgatgggtctctgatcactttcaaatacagcgatcttcaaatcctaaccaaaaacttttctgagagactgggtgtggggtctttcggctctgtgttcaaaggggctttaccagatacaactgcaatggcagttaagaagcttgagggtgtccgtcagggagagaagcaattccgggcagaagtgagcactattggaactattcatcacatcaatttgattcaactacttgggttttgttctgaaggggcaaagagattgcttgtctatgaatatatgcccaatggttcattggaccatcatctattcgggagtaccggtgtgtcattaagttggagcacaagatatcaaattgctgctggaatcgctaaaggattagcttatctgcatgagaaatgcagggattgcatcatacattgtgatatcaagccccagaatatattgctggactcatcatttactccgaaggtggcggactttggaatggcaaagctcttaggccgggattttagtagggttttaacgtcaatgagaggcaccataggttatcttgcaccagagtggataagcggtgaggccatcacaacaaaggcagatgttttcagctacggaatgatgcttttcgagatcatatctggaaagaggaacggtatgcatggaggctcattctttccagtgttagttgcgagggagcttgtagaaggagagttgcacaagttgtttggttctgaatcaagtgatgacatgaacctaggcgagcttgatagggcatgcaaggttgcttgttggtgcgttcaagacagtgagagctccaggccgacaatgggggaaatcgttcagatcctagaaggactggtagatgttgaaatgccaccagttccaagatatcttcaggttcttggtcaaggtgtgaaatcatatgaaatttcttctgagatgaatcaagctagtaactag

SEQ ID NO: 54583 - DNA, 1125 bp, Oryza sativa
  Clone ID: PAT_MRT4530_56674C.1
atggaaccaatcaatttattaatagtagatgatgcagccaaaatcaacgaatgcgacctcattattccattgcgcctgctggtgacacacattttgatgctaggcgacgacttcaatttgcagccaagcaaggtacgggaaaatgccaggtttactatgagtcctttcaaaagattgctcaatttgggttttcggaagcatatgctcactgagcaatatgcaattcatccatcaatctggcagttccgcaatgagaaattttatgaagggagaatcacaaatggtgcgactgtatttctcctgaatacaacaaaaaattcaaaggtcttaaatttcccaattattgctttattgatgtcactggaacagacgggcctagctgcaaagagaaaaacaccattgagcttgccacaatccaatacatgcttgagatcatttccaagcaatattagtgaaatcaaaagttctctcagacaaaaatatgcttctcacaataaaatcaatgtgcacattgagtctgctgatagttttgaaggagaaacttatcaagtggttattctatcaatgcttttcaaagacgagaacacgattcttcagattgaaaagatcaatgctgcaattaccaaagcaagacactgtttgtggatgtttggtgaagctgctagtgtatctgctagagggggagtcttcagagaattagttgatgatatgatagagcgaaagtgtatattgaaatggaacactatcgctacaagtcaatcaaaatatgcacttgaatctgatgacttccatggttctagctctgcaagttcaaatgaaaccatacaccaggttgcaagtaatttcagaatcaaatcccaacctcaacttcccatcaagaaggaccaagagataaaaaccgtcttcaatactgtcaagaatggaaaatttccagtggcacatttccgcatgtcggaaaacttcttctccttaaggccaggggagattggccactatgactaccagaagccctaccttcatcccgtgtgttctttactagcttctcatgcagtgatgataattggctcagcgatgaccatgacagaggtgaataagagaagagaaaacagtgcgctatccatctga

SEQ ID NO: 54584 - DNA, 6093 bp, Oryza sativa
  Clone ID: PAT_MRT4530_56675C.1
atgacggggccgcggggtggcggcggggaggacccgccgcggacgtcgtcgggcgcggcggcgtcggcctcggcgtcatccggcgtgccgaacgagccgctgaccccgacgtcgatgctcatgtcggggcagcaggccgggctgaaccggcgcgggtcgaggagcgcggcgatggcgacgttctccatggaggtgttcgacaacgaggtggtgccgtccacgttgagcagcatcgccccgatcctccgcgtcgccgccgagatcgagcccgagcgaccccgcgtcgcctacctctgtcggttttacgcgtttgagaaggcgcaccggctggatcagaactccgtcggccgtggcgtccggcagtttaagacggctctgctccaacggctggagaaggataacagtcccagtctcgcgaaacgcgtgaagaagaccgatgcccgcgaaattgagagcttctaccagcagtactacgagaactacgtccgtgccctcgacaaaggggaacaagccgacagggctcaacttggtaaggcctaccagacagccggagttctcttcgaggttctctgcgctgtcaacaagaatgagaaggtcgaggaagttaatccggagattgttcgcctgcaccgggatgtgcaagagaagaaagacatctacacgccattcaatatccttcctcttgatgccgccagtgcatctcagtccatcatgcagatggaggagatcaaagcagcagttgcagcgctgcggaacacgcggggcttgacctggccttccacatttgagccagaaagacagaaggggggtgatcttgatttgctggattggttgagagctatgtttggctttcagagggacagcgtgagaaatcaaagggagcatttaattctcctccttgctaatgtgcacataagacttgagccaaagccagagccacttagcaaggcatgttcctttgccactttttactttgctgatttgactatatggatatcaatgtggataatgaaaagtcctcaaggtgcacaaccacaggaaattcaacaacgaaatattttgtttctaggtctttatcttctcatttggggtgaagcagcaaacatccggtttatgccagagtgcctttgctacatctttcacaatatggcatatgagttgaatgggctgcttgctggaaatgttagtattgtgacgggtgaaaatatcaggccatcttatggtggggatgaagaagctttcttgaagaaagtagtcacacctatctatcgtgtcataaaaaaggaatcaggaaaaagcaaacacggaaaaacaccacactcagcgtggtgcaattacgatgatctaaacgagtacttctggacaactgattgtttctcgttgggttggccaatgcgggatgatggtgattttttcaaatctgtgcatgattcaaggcctgtaacaacggctggaagctcatcacaaaagggttctactaaaagcacagggaagatgaattttgttgaaacaagaacattttggcacatcttccgtagttttgacagaatgtggaccttctatctgttggctctgcaggcaatgctgatttttgcttggagcgattatacactatctcaaattcttcagaaggaccttttatattctctatcaagtatatttgtcacagcagcatttctacagttcctccaaagcattttagactttgttctgaacttccctggtcatcataaatgcaagttccttgatgccatgagaaacattctgaagataatagctagtgctgcgtgggctgtgatccttccatttttctacattagcaccgcatctaaagtcaatttaccaattaaagatctggataaatggtttcaatatgttaaaggagttccacctctatatatcctagctgtggcagtgtacctgatacctaatatcctaagtgcagcactcttcctgttaccatgtttccggaggtggatagaaaactcagattggcgtattgttaggttgcttctgtggtggtctcagaaacgaatttatgttggccgtgggatgcatgaaagcagtgtttcactttttaagtatacactattttggatcttgctgctatgctccaagtttgcattcagttattttgtccagataaaacctctgatcaagccaacaaaggacataatgaatgttcataatattcattatgagtggcatgaattctttccaaatgcatcatataatgttggtgctgtcatgtcgctctgggctcctgtactcttggtctatttaatggatacacagatatggtatgccatcttctctacaatatctggtggtgtgtctggagcacttggaagacttggagaagtttctcccagcaagagaactgaggctgctaagtttgctcagttgtggaatgaagtgatatgtagtttccgggaagaagatcttataagtgataaggaaatggacttactggtggttccttattcgtcagaccccagtcttaaactgatgcagtggccactcttcttgcttgctagcaagatacctatagctttagacatggcagcacaatttcgaccaagagattccgatctttggaaacgtatatgcgcagacgagtatatgaaatgtgctgtactggaatgctacgagtcattcaagcttgttcttaatttactcgtaattggagaaaatgagaaaaggattattggtattatcataaaagaaattgaagctaacatcgcaaagaacacattccttgccaattttagaatgagcgcactgccagtcctgtgcaagaaatttgtggagcttgtatctgccctgaaagaaagggatgcctccaaatttgacaatgtagtattgctgcttcaagacatgttagaagtaataacaagagatatgatggtcaatgaaatcagagagctagctgagtttggtcatgggaacaaggattctgtaccaagaaggcaactttttgcgggtactggtacaaagcctgcaatcgtctttccacccccaatttcagcacagtgggatgagcagatcaagcgtctgtacctccttttgaccgtgaaagaatcagcgatggacgtgcctacaaatcttgaagcccgtcggaggatagcatttttcactaattctttattcatggacatgccacgtgcacctagagtacgcaaaatgctgtcattcagcgttatgactccatactacagtgaggaaactgtatattcaaggaatgacctcgatctggaaaatgaagatggtgtctcaattatattctacctgcaaaagatttttccagatgaatggaataattttttggaaagaattggttgccaaagagagagtgaagtttggggaaatgaagaaaatgtcctacaacttcgtcattgggcttctcttagagggcagacactctgtagaacagttagaggcatgatgtactacaagagagccttgaagcttcaagcttttcttgacatggcttctgagtctgagatattggaaggatataaagcagttgcagatccagcagaggaggagaagaaaagccaaagatctctgtcatctcaacttgaggctatagcagacatgaagtttacatatgttgcaacttgccaaatatacggcaatcagaaacaatctggtgatcgacgtgcaaccgatatcttaaacttgatggtgaattatcctggtttgcgcgtggcatacattgacgaagttgaagagagagacggtgaaaaggtgcagaaggtcttctattcagttttggtaaaagctcttgacaatcatgatcaggaaatataccgcataaaattgccaggaccagcaaaattaggtgaaggtaaaccagaaaaccagaatcatgcaattgtctttacacggggtgaagctctccaaacaattgatatgaaccaggacaattatttggaggaagctttaaaaatgcggaatttactggaggagtttcacgagaaccatggtgtgcgccagccaacaattcttggtgtgcgtgagcacattttcactggaagtgtgtcctctctcgcgtggtttatgtcaaaccaggaaacaagctttgtgacaattggacagagagtactagctaatccattgaaggtacgttttcactacgggcatcctgatgtatttgatagaatttttcacattacacgaggtggcattagcaaggcttcctgtggtataaatttaagtgaagacatttttgctggtttcaactcaacactgagacgtggaaatgtcacccaccatgaatacattcaagttggcaaaggacgagatgttggtcttaatcaaatttctctctttgaagctaaagtggcatgtggtaatggagagcaaacactcagcagagacatctatcgcttgggtcaccgctttgactttttccggatgctgtcgtgctactttaccactgttggattttatatcagttcaatgatggttgtcataattgtctatgtcttcttgtatggaagactttacctagcattaagtggactcgagttagcaattatgaagcaagcacgaatgagaggtaacactgctcttcaggcggctatggggtctcaatctattgtgcagctaggtcttttgatggccttacccatgtttatggagattggactagaaaggggttttagaagtgccctaggggatttcatcattatgcagcttcagctctgctctgttttcttcactttctcccttggcacaaaatcacattactttggccgcacaattctgcatggtggtgccaaatataaagcgaccggcagaggctttgtagttcgccatgtaaaattccctgaaaactatagaatgtactccagaagccattttgtcaaaggacttgagctcatgttattgctagtggtttatcagatgtatggtgatgtggctacagattcgactgcatatatacttctgacatcatcaatgtggttcctggtaatcacttggctgtttgcaccattcctcttcaacccatcagggtttgagtggcaaaaaatagttgatgactgggatgactggagcaagtggattagcagccgtggtggtattggtgtgcctgctaataaagcttgggagtcctggtgggaagaggagcaggaacatttgcagtctacaggttttttcggccgcttatctgaaatcatcttgtctctccggttcttcatcttccaatatggtatcatgtatcatctgaatatctcagctggaaacaaaagcatctctgtttatggtctgtcgtggctggtaatcgttgctgtggtgatggtcctgaaggtggtatccatgggaagaaagaaattcagtgcagacttccagctgatgttccggcttcttaagctgttcttgttcattggatccattggaactctggccattcttttcacccttttgcatctaacagtcggtgacatattcgccagcttccttgcctttgcaccgacaggatgggccattcttcagatatctcaagccagcaagccggtggtgaaggccttcgggctatggggatccgtcaaggccctctcgaggggatacgagtacctgatggggatcctcatcttcgtccccgtcgccgtgctggcgtggttccccttcgtctccgagttccagacgaggctgctcttcaaccaggccttcagccgaggcctccagatctcccgcatcttggcaggcgggaagaagcagagctgagcccgcacaaagtccaccaagtgaccgtacataagcatgcacaggtttaggcgaacagcatcacaagaggttaggtccaggattgatcgttgtacagtggagaagtttgttcaggaggcgtcgtacagctgctgacttgctgacccttcagaagttccgttacttttgtacacacagggcgatgatttttttttctttttaggcattttcgagttattacatctccataccatattattcttacgtctgttacataggctgttgctgagtattgtatagatagatgttgtatgcccacaaacaggtgcatcaaagcattttcgttgatttaaatgcaaaagatgagattgtttattctct

SEQ ID NO: 54585 - DNA, 365 bp, Oryza sativa
  Clone ID: PAT_MRT4530_56676C.1
atgtgtcctttagaagagcgatagttgggaaaaacttggaaaattggtatgtcattgtctcgaaagtggctaatgttaatttgacaagtgaacatgaccaattcatatggaaaattaataaagaaggagtaatacctaggaaatctttaatttggaagctaagaattccattaaagattaagattttcctatggtatctgaaaaagcgggtaatattcaaggcaactcattgaggaaggctttggtctttgcttcttaaaaaagttggagaggaagttcaagtcaactgcagaattctggagaagcgagttatggagttcttttcttggatggttgtgactgcccttacatactgttttcttgat

SEQ ID NO: 54586 - DNA, 5847 bp, Oryza sativa
  Clone ID: PAT_MRT4530_56677C.1
atgacggggccgcggggtggcggcggggaggacccgccgcggacgtcgtcgggcgcggcggcgtcggcctcggcgtcatccggcgtgccgaacgagccgctgaccccgacgtcgatgctcatgtcggggcagcaggccgggctgaaccggcgcgggtcgaggagcgcggcgatggcgacgttctccatggaggtgttcgacaacgaggtggtgccgtccacgttgagcagcatcgccccgatcctccgcgtcgccgccgagatcgagcccgagcgaccccgcgtcgcctacctctgtcggttttacgcgtttgagaaggcgcaccggctggatcagaactccgtcggccgtggcgtccggcagtttaagacggctctgctccaacggctggagaaggataacagtcccagtctcgcgaaacgcgtgaagaagaccgatgcccgcgaaattgagagcttctaccagcagtactacgagaactacgtccgtgccctcgacaaaggggaacaagccgacagggctcaacttggtaaggcctaccagacagccggagttctcttcgaggttctctgcgctgtcaacaagaatgagaaggtcgaggaagttaatccggagattgttcgcctgcaccgggatgtgcaagagaagaaagacatctacacgccattcaatatccttcctcttgatgccgccagtgcatctcagtccatcatgcagatggaggagatcaaagcagcagttgcagcgctgcggaacacgcggggcttgacctggccttccacatttgagccagaaagacagaaggggggtgatcttgatttgctggattggttgagagctatgtttggctttcagagggacagcgtgagaaatcaaagggagcatttaattctcctccttgctaatgtgcacataagacttgagccaaagccagagccacttagcaaggcatgttcctttgccactttttactttgctgatttgactatatggatatcaatgtggataatgaaaagtcctcaaggtgcacaaccacaggaaattcaacaacgaaatattttgtttctaggtctttatcttctcatttggggtgaagcagcaaacatccggtttatgccagagtgcctttgctacatctttcacaatatggcatatgagttgaatgggctgcttgctggaaatgttagtattgtgacgggtgaaaatatcaggccatcttatggtggggatgaagaagctttcttgaagaaagtagtcacacctatctatcgtgtcataaaaaaggaatcaggaaaaagcaaacacggaaaaacaccacactcagcgtggtgcaattacgatgatctaaacgagtacttctggacaactgattgtttctcgttgggttggccaatgcgggatgatggtgattttttcaaatctgtgcatgattcaaggcctgtaacaacggctggaagctcatcacaaaagggttctactaaaagcacagggaagatgaattttgttgaaacaagaacattttggcacatcttccgtagttttgacagaatgtggaccttctatctgttggctctgcaggcaatgctgatttttgcttggagcgattatacactatctcaaattcttcagaaggaccttttatattctctatcaagtatatttgtcacagcagcatttctacagttcctccaaagcattttagactttgttctgaacttccctggtcatcataaatgcaagttccttgatgccatgagaaacattctgaagataatagctagtgctgcgtgggctgtgatccttccatttttctacattagcaccgcatctaaagtcaatttaccaattaaagatctggataaatggtttcaatatgttaaaggagttccacctctatatatcctagctgtggcagtgtacctgatacctaatatcctaagtgcagcactcttcctgttaccatgtttccggaggtggatagaaaactcagattggcgtattgttaggttgcttctgtggtggtctcagaaacgaatttatgttggccgtgggatgcatgaaagcagtgtttcactttttaagtatacactattttggatcttgctgctatgctccaagtttgcattcagttattttgtccagataaaacctctgatcaagccaacaaaggacataatgaatgttcataatattcattatgagtggcatgaattctttccaaatgcatcatataatgttggtgctgtcatgtcgctctgggctcctgtactcttggtctatttaatggatacacagatatggtatgccatcttctctacaatatctggtggtgtgtctggagcacttggaagacttggagaagtttctcccagcaagagaactgaggctgctaagtttgctcagttgtggaatgaagtgatatgtagtttccgggaagaagatcttataagtgataaggaaatggacttactggtggttccttattcgtcagaccccagtcttaaactgatgcagtggccactcttcttgcttgctagcaagatacctatagctttagacatggcagcacaatttcgaccaagagattccgatctttggaaacgtatatgcgcagacgagtatatgaaatgtgctgtactggaatgctacgagtcattcaagcttgttcttaatttactcgtaattggagaaaatgagaaaaggattattggtattatcataaaagaaattgaagctaacatcgcaaagaacacattccttgccaattttagaatgagcgcactgccagtcctgtgcaagaaatttgtggagcttgtatctgccctgaaagaaagggatgcctccaaatttgacaatgtagtattgctgcttcaagacatgttagaagtaataacaagagatatgatggtcaatgaaatcagagagctagctgagtttggtcatgggaacaaggattctgtaccaagaaggcaactttttgcgggtactggtacaaagcctgcaatcgtctttccacccccaatttcagcacagtgggatgagcagatcaagcgtctgtacctccttttgaccgtgaaagaatcagcgatggacgtgcctacaaatcttgaagcccgtcggaggatagcatttttcactaattctttattcatggacatgccacgtgcacctagagtacgcaaaatgctgtcattcagcgttatgactccatactacagtgaggaaactgtatattcaaggaatgacctcgatctggaaaatgaagatggtgtctcaattatattctacctgcaaaagatttttccagatgaatggaataattttttggaaagaattggttgccaaagagagagtgaagtttggggaaatgaagaaaatgtcctacaacttcgtcattgggcttctcttagagggcagacactctgtagaacagttagaggcatgatgtactacaagagagccttgaagcttcaagcttttcttgacatggcttctgagtctgagatattggaaggatataaagcagttgcagatccagcagaggaggagaagaaaagccaaagatctctgtcatctcaacttgaggctatagcagacatgaagtttacatatgttgcaacttgccaaatatacggcaatcagaaacaatctggtgatcgacgtgcaaccgatatcttaaacttgatggtgaattatcctggtttgcgcgtggcatacattgacgaagttgaagagagagacggtgaaaaggtgcagaaggtcttctattcagttttggtaaaagctcttgacaatcatgatcaggaaatataccgcataaaattgccaggaccagcaaaattaggtgaaggtaaaccagaaaaccagaatcatgcaattgtctttacacggggtgaagctctccaaacaattgatatgaaccaggacaattatttggaggaagctttaaaaatgcggaatttactggaggagtttcacgagaaccatggtgtgcgccagccaacaattcttggtgtgcgtgagcacattttcactggaagtgtgtcctctctcgcgtggtttatgtcaaaccaggaaacaagctttgtgacaattggacagagagtactagctaatccattgaaggtacgttttcactacgggcatcctgatgtatttgatagaatttttcacattacacgaggtggcattagcaaggcttcctgtggtataaatttaagtgaagacatttttgctggtttcaactcaacactgagacgtggaaatgtcacccaccatgaatacattcaagttggcaaaggacgagatgttggtcttaatcaaatttctctctttgaagctaaagtggcatgtggtaatggagagcaaacactcagcagagacatctatcgcttgggtcaccgctttgactttttccggatgctgtcgtgctactttaccactgttggattttatatcagttcaatgatggttgtcataattgtctatgtcttcttgtatggaagactttacctagcattaagtggactcgagttagcaattatgaagcaagcacgaatgagaggtaacactgctcttcaggcggctatggggtctcaatctattgtgcagctaggtcttttgatggccttacccatgtttatggagattggactagaaaggggttttagaagtgccctaggggatttcatcattatgcagcttcagctctgctctgttttcttcactttctcccttggcacaaaatcacattactttggccgcacaattctgcatggtggtgccaaatataaagcgaccggcagaggctttgtagttcgccatgtaaaattccctgaaaactatagaatgtactccagaagccattttgtcaaaggacttgagctcatgttattgctagtggtttatcagatgtatggtgatgtggctacagattcgactgcatatatacttctgacatcatcaatgtggttcctggtaatcacttggctgtttgcaccattcctcttcaacccatcagggtttgagtggcaaaaaatagttgatgactgggatgactggagcaagtggattagcagccgtggtggtattggtgtgcctgctaataaagcttgggagtcctggtgggaagaggagcaggaacatttgcagtctacaggttttttcggccgcttatctgaaatcatcttgtctctccggttcttcatcttccaatatggtatcatgtatcatctgaatatctcagctggaaacaaaagcatctctgtttatggtctgtcgtggctggtaatcgttgctgtggtgatggtcctgaaggtggtatccatgggaagaaagaaattcagtgcagacttccagctgatgttccggcttcttaagctgttcttgttcattggatccattggaactctggccattcttttcacccttttgcatctaacagtcggtgacatattcgccagcttccttgcctttgcaccgacaggatgggccattcttcaggctttgttcctagtcttcaaaattgcccacaatacagctgcacttctgatcgctatccttctctatatctcaagccagcaagccggtggtgaaggccttcgggctatggggatccgtcaaggccctctcgaggggatacgagtacctgatggggatcctcatcttcgtccccgtcgccgtgctggcgtggttccccttcgtctccgagttccagacgaggctgctcttcaaccaggccttcagccgaggcctccagatctcccgcatcttggcaggcgggaagaagcagagctgagcccgcacaaagtccaccaagtgaccgtacataagcatgcacaggtttag

SEQ ID NO: 54587 - DNA, 384 bp, Oryza sativa
  Clone ID: PAT_MRT4530_56678C.1
atggaggactcgcctgaggtcggccgggggggctcggtggtggcggcgctgggctcggtggagggcgtcgccggcgacgacgatgaggaaggacgtcgccgggcttggtgggggcagctgttcgcgtcggggaagaggcaggcgacgacgacgaggaaggtcgacgccggtcgatatagaggctcggtggcggcagcggcgggctcggtcgaggcggcggcctcggcggcagcgacggcgggctcggtggcagcggtggctcgctcggtggcggtggcggcgagggaggacgacggcggcgaaggaggagttggcggcggcgctagggttctaaggaggcgggaaattgtagcgggacttagaaaaattttcgatccgatctga

SEQ ID NO: 54588 - DNA, 193 bp, Oryza sativa
  Clone ID: PAT_MRT4530_56679C.1
aacatatattcattaaatatgctatatatataacaaaataatacataataaatattcaaacaccgaagggcaaacgacaagtttgcctgaacactatacaaactatcgtatttaacgaatgtgaacaaatactcttttacaaagaaccgcggccatttccaaagcctttctgaccaaaatgtaagtcaaacat

SEQ ID NO: 54589 - DNA, 3238 bp, Oryza sativa
  Clone ID: PAT_MRT4530_5667C.1
atggagcaacctctctttgagctgtctgctcctagggatgaattctatgagccacctccttcatcgtagccaatttatacaattggctatgaaattcgccccgaactaatctgcatggttagggagaatccttttttctagtcttgatctagaaaatccctaccatcatctgtgggactttgagcaagtttgctcatgccttaagattcgtggcatgaagcaagaaactgtacggtggaagttgtttccgttctcccttcaagagagagcgaagcaatggtacacatctaccgtaggatgtgtagacggtagttgggaaaagttgcgagacaggttctgtcttgccttcttcccagttacccgtattaccgcccatcgagtagaaatcctcagtttccggcagatcaataacgaatcaatcggtgcagcctagtccagattcactaatctagtgcagtccagaccaaccttgtctttacccaagtatgtgcttttacaacattttcatacgggtctagaaacagagtctgcattctatctggacataacccccggatgatcattcatgcataaaatgtcgtcagaaggaaaagtaattttagatcgcattctagaaaatacttccttcatgacgcaatgcgatgaacctctgctggaggcattcgtgtccaagatagagaagccttcgacagtcgaatcacaacctgaactttccacttcgaccgactcgactgatgaagtagttcccgagccgccatccattcagaatgaagaaattcagacttcggattgtgctccaattttattcagggatggccttgatgaagactacggcaacaccctgaattatttcagtaaaaagatgctgattgttcctttgccacctcccgatcctatggaacttgcattcctaagacaaactgtctgggacgttacatccataatgagtgacgaacggctaagggaggcagagctttcatccgaagaagttctctctcacgagtctcctgagacccttctggaaaatgaagtccctaacttcataaaagaggaagcggaacccagtgagactctcgagcttccaatcatagaaccgccgcctcgacctccgattgcgctgaaacctctgcctcaaggcctacgctatgctttcctgcacggcaataaggaagctcatgtcatcataagtaacaagctttctgaagatgagactcaacgtcttctagctgtgttagaaaagcatcgctctgttcttggctactctctctaggatctcaaaggaaataatcttgcgctttgcactcatcgtatccctattgagcccgagagtactccctccagggaaccacaatgacggctcaataatacgatgcgagaagttgtaaagaaagaggttctaaaactcctgcacaccgagattattatctcgtcccatacaggattgtacttggtcatagggtgtccgaacatggaattaaagttgatcgtgctaagatcgatgtgattgatcaacttcctcctcctgtgaatatcaaggtcatccaaccccctgattggacactaccctttgaaattatgtgtgatgcaagcgatttcgctgttggtgtggtcttgggccaaaccaaggataaaaagcatcatgcaatctgctatcctagcaaaactctaaccggagctcagtttaattatgcaactactaaaaaagagctgctcgcggttgtttttgctatcgataagtttacactgatcatgctgctctaaaatacctgctcactaagaaagatcctaaaccacgtctcttgtgatggattttgctactccaagaatttgacttagaacttaaggataaaaagggagtagaaaattccatagcagatcatttgtctaggctgcaaatcactaacacgctcgcaggaacagtcgataaatggttttctaagagatgacatgctgatgatggtgcacgactccaactcatggtatgccaacatagtgaactacatggtgttaaagtacataccacccggagaaaatcaaaggaagctgaaatacgagagtcaccgtcatatatgggatgagccatacctgtatagggtttgctctgatggtctattgagaagatgcttcagctgccagaggcaaggaagaatagctgctcgcgacgcaatgcccctcacatacaacctacaagtcgagatattcgatgtgtggggtattgactttatgggaccatttcccaagtcccgtaattgcgagtatattctggtggcagtcaactatgtctccaagtgggttgaggctatgccgtgcagcgccgcggatgcgaagcatgccaagaagatgttcacagaaatcatcttcccgaggtttggtaccccaaggatggtcataagtgatggagaacttgggcacagagcatacaaggccatcagaaactagaatatggattttgagggagtaggagattggaggaaaatgcagttggctgagctagaagaatggagagaaaaagcatatcacaactctaggatatacaaagaaaggatgaagcgctggcctgataaaagaataaagatcaagaaattcaagccaggagacaaggtcctaatgttcaactccagagttaagcttttcggccatggaaaagtacgaagcaattgggaaggaccgtttgacatcatcgacacctcttcgcacggagcgataacactctgcgacgactcagccccttgcgacggtgctgggctcccctgcgaatctagagcccatcggcgagctccctagttcttctgaaccaggggttcggccgaacccatctcggccccattcagcagcacgctccctctccccgatgcacgtcacatagacaaaagtacagggtgattcgcctgcgcgacggccgacaatgggcgagctcagccttttgaaggcgaggcgtctattccaagatgacgagaaggccgctccgcttcccgttgagtaatatgtggtcactctctacaccaaggcaggggatgaggtgctccacaagtataccacaaccactgctgctccgtccacccctaagagggatcgcttttgcattcagggagtgcgaactcccggcggtggatatggtaaaggcttgctccgtccattgacggcatcggagaagaagggggtagcggaatcctgcatccctccacctatgaaggtgaagcgtcatttgacgcatcctcctatcattagggcgcccagg

SEQ ID NO: 54590 - DNA, 569 bp, Oryza sativa
  unsure (1)..(569): unsure at all n locations
  Clone ID: PAT_MRT4530_56680C.1
aaaatatataaagcgcgggtgcacgatgcgccgccgcgtcgtcccggcggcggcggccgtttccgcccagctggcagccgccctcctcctcctcctcctcctccacgccgtcaccgtcgtcgtcgtcgccggcggcggcggcagcgaagtggccgtcgacaggtacgcggctgcaggcgcgatgctgctgcttccgcggcggcggcggcagcagctggaggacgaggtggtgttcccggcggcgatggcggtcgtcggagctgagcagctgcagcagggcgggtccttcagcgggctcacggcgaacaagcaagtctgcctgcagggtcactcgtgcgccgcgttcgccatgccctacaccggccatggctgcatctacagaaataattgcaagcagtaagctagcttgctatagagctatcgatcttatcatgtagtatactataatattgtttatatagttgtttaattactcattataattaaaagttgtaattgaatctcaatgtaccatggactgtactagtactactacttgtcnaaaaaaaaaaaaaaaaaaaaaaaaaaaa

SEQ ID NO: 54591 - DNA, 991 bp, Oryza sativa
  Clone ID: PAT_MRT4530_56681C.1
tccatgacaatgggaggagaagaagccgccattcttctctatgtggatgttatgatcattacaagcaatgatgttgagtttattgcttttgttaaagcgcatcttagtgagcagtttcttatgtctgatcttggttctctccgttattttcttgtcattgagatttcctctactcctgaaggcttttatctctgtcaagccaagtatattcaggatcttcttgatagggcttctctcactgatcaacacacagttgagactcccatggaacttaatcttcatctttctgccaccgatggtgaactgttagcttatcccactcgctatcgtcacattgtagggagtcttgtttatctcggtgtcactcgtcctgatatttcatattctgtgcatattctgaaacaatttgtttctgctcccacacaacttcactatagtcatcttcttcgtgttcttcgttatcttcgtggaactatctctcgttgtcttttctttcctcgctccataactttacatcttcagggttactttgatgctacttgggctagtgattcctctgatcatcgatctctttctgctttttgtgtttttcttggtggttcccttattgcttggaagactaagaaacaaacaatggtttctcgttctagtgcagaggctaagttacgacctttggcccttttgacagcagaggttacttggttgtgttggttacttgaggattttggtgtttctgtgacttcaccgacttctttattgttggaaagtacaagtgctattagtattgctcgtgatcctataaaacatgagcttcctaagcatattggtgtggatgcctcatatacccgcacacaggtacatgatcaggtggttgctcttcagtatgtgccttccaagttgcagttggctgatttatttacaaaggcacaaactagagctcaacacaggttctatctctccaaactcagtgttgttgatccaccctgagttt

SEQ ID NO: 54592 - DNA, 174 bp, Oryza sativa
  Clone ID: PAT_MRT4530_56682C.1
atgaagactgaagaggtggagaaagttgatggttttaacaatggttgtggccttatggggacagagaatgggaggcatgtttgtgggggactgcaaaacgcacttgcacggcttccgaggcatgttggggctgataaacaagatggtaaacgtgaactcctctcagcagcataa

SEQ ID NO: 54593 - DNA, 372 bp, Oryza sativa
  Clone ID: PAT_MRT4530_56683C.1
atggtggtgtggcggcaaggacaacatgtgggagtagaagctgtggtggctggagtcgctggggtcagagctagaggggctgccaggggcattggtggcggacaacgacggcggtgcgaggagtgcatcggacgaggtgtggtactagcacttgagggtggagttccggtggcgtgggtgtggaggatggtgtcatcctcctcgggcgtgaaggggtggtgctctacccatggtgacagctggttgcaccaccggatgtgccacgacttgccggacctccccgggatggacttgctgatgagcgaccagtcacatgcccccgtgcttcgccacttgccgctgcaacgcctcgtccttctttgggctccatga

SEQ ID NO: 54594 - DNA, 417 bp, Oryza sativa
  Clone ID: PAT_MRT4530_56684C.1
gttgccgaggataccgtcccccgtgcggcgtgcgcgaccaagccgccatggccgagctctgacactcggcgcgtcgaggcgataggcgtacggtttgacaattcagggcctgagcttgcatagttgcattgcatcctctgctccgatggaagaagctacaaatgccggcccgagaatatccctacgattaattccgtcgcgctctccgcccgcacgcgcggcgtggcgcggcgcggcgcggcggcgtctcctacaaatggcgagcgcccgacggagaagagagctgaggcttatcgagtccgaggcttctgagcctgcttgttgccgccgctactggctgccgatctgctgcagttgggaggggtctcccatggcggcggaggtcgggattggaagggcgacctgcgcggcgtgggc

SEQ ID NO: 54595 - DNA, 416 bp, Oryza sativa
  unsure (1)..(416): unsure at all n locations
  Clone ID: PAT_MRT4530_56685C.1
atccttttctggggcgccgcagcctcctcctctcgtgctctccttcgattgatagctccctccttattcaaccatggccaaggggaagacgcacatcaacattgagggcattggccccgacgactccgggaagtcgaccaccacgggccatctgatctacaagccgggaggcatcgacaagcgtgtgagcgagagggtttttttgttattccgttgagatgaacaagagggccttcaagnacgcgggggagctcgacacgctcaccgccgagcgcgagagaggaatctccattgatatcgccctgtggaagttcgagaccaccaaatactactgcacggggcatcgatgcccctgggcaccgggacttcgtgaagaacatgatcacgggcatcctcccagcttgactgtgcccggg

SEQ ID NO: 54596 - DNA, 344 bp, Oryza sativa
  Clone ID: PAT_MRT4530_56686C.1
ggaaaacccccctttttttatggggttggggcggggggacccaaaaaaagacggggggttttggggggaaaaaaagcccaaaaaaggggttacgagggggtttcccccccccccgctacgagcaaaagggggccccaaattcaaaggcggactagggggggggctcccccgggggggggaacacccccccccacaagaaaaccctggttttggggagcttaaaggccctttcccgaccaaaaagtttttccaagggggggaaagaaaacccccgggggggcccgggcccctggcgggggaataggggcccaaaaaccacaaccctggttttggattccctttgg

SEQ ID NO: 54597 - DNA, 3279 bp, Oryza sativa
  unsure (1)..(3279): unsure at all n locations
  Clone ID: PAT_MRT4530_56687C.1
cttcgttatcgcgcgggcggcggcggcggcggtgaggggatgacgataccgagcgccgaggggttcctccacgccgcgagctgcctcccgtgcacggcggaggaggagcgggacctcgtcgtcgcgctcaccagggaggccgaggagaatgtcaaggacggcgatctccgctacctcgtctcccacagctggtggcttaactggcaaagctatgtgggcttaatcaaacctgatgagaatgatgctgacatgcttcctcaagctccaagtagaccaggagagatagataactcaaagctagtttcagaggaaagcagcagtattggtgatgagccagagcttcaaagaaccctgagggaaggagatgactacgctttggtgccccaggaagtatggaggaagctacatgaatggtacaaaggtggaccagaactctcaagaagagtaatttgtagtagtccaacttccagaagttacattgtggatgtctatcccctcagactgaaattattagacggaagagacagtttcgtttgtattggaagatctacttgaagatctaaactgtgtgaaaaatataccatatattgaagaaaagtatgccgatgacagtcctgatgaaaaacttgctgaggtttgcaagaaataaaataaaaaaaaaaaagattctataattgttgataaattccagggtcagtacaagtccactttggtttgcccagattgtaagaaaatctcagttacatttgacccattcatgtacttgtcactgccattgccctcaacagttactcgcatgattaatgtaactgtatttagtggtactggagatgcccttcccatgccttacactgtgaaggtacaaaagaatggagtttgtggagatcttataaaatctctgagtgtttatgtgttgcttacaaagttgcgaaacactgttacttgcagaggtatatgatcatcggatttagtggtttacataacttgggaaatacatgtttcatgaacagtgctatacaatccttggtgcattacaggctactggttgggtctgaaaatctcttttacagtcgggagataaatacagaaaatccacttgggctacaggagttacttgcatttctattggatggtctgcatgaagatctcaaccgtgtgaaaaagaaaccatatattgaagcaaaggatgccgatggccgtcctgatgaagaacttgctgaggaatgctggaattaccataaagctcgaaatgattctataattgttgataaattccaggtttatgtatgctcacaactattcaccactcatcacaatggtgtctcctgtgaggaagatgtatctacatctaatgtggatgaggaagcagctgatgaattggttttgccatttcagctttggttgactgatgataaagctaataagagagagcatattgatgcagattctaacggtgttcctgggtcgaccatgaggttattaatggactggtctgatagagaacatgaagtatatgacattaagtacatggatgaactttctgtggtcttcaagcctggatttatgtcaaagaaaaatcggcaagaagcagtcaatttattttcatgcttagatgcttttctgaaggatgaacctctgggccctgatgacatgtggtactgtccgagatgcacggagcacaagcaagccagcaaaaagcttgacttatggaggttgcctgagatattggtagttcacttaaaaaggttctcatacagccggtttatgaagaacaagcttgatacctttgtcaactttccaatccatgatcttgatatgagtagatatgcaaatcactcaagaggactgacagacacccatttatgctgtgaggaagatgtatctacatcaaatgtggatgaggaagcagctgatgaagaggttttgccatttcagctttggttgactgaggatagagctatttgataagagcatatcaattgtggttgtagcggacttcatgagacgctcagcagattttcagttcaatcggcggattggtagcaggtcctgcagtgtgtctaaaaatgttgcagtggacactgatatggttgattcgctggacaaatagatttgaagacgaggattcagtatggcatagttttttgggccatacatatactgctgagaagattgctaggaatcttatttgctggttttgggcaccggagtattggtttatggtaggtccatccaaccgtggaggttttgagggtgcagcatctcgttagcatcatcttccaatatgttacaaccattctcatgcagattagggcttccaatatctcctgtcttgcccttttaacgaatcgttgaaatgttgccggctatatgtttactaaaacttcctttgccgatatgctgatgtacagcagcaggtcttgttaatttacgtgatcttattgttgtggttggatgggtggtggaaaattggtactgcaactagctgcgtcagaaccagagaaaaagcccatgtactgcatttttgcttgctgagcttatctcctgttctatcggcgagttggtagcagctcctgcagtgtgtctaaaaatgttgcagtggacactgatatggttgattcgctggacacatagatttgaaggcgagaattcagtatggcatagttntctgggcaatacatatgctgctgagaaaattgctaggactcttatttgctggttttgggcactgagtattggtttatggtaggtccatccaaccgtggaggttttgagggtgcagcatctcgttagcatcatcttccaatatgttacaaccattctcatgcagattagggcttccaatatctcctgtcttgcccttttagcgaatcgttgaaatgttgccggctatatgtttactaaaacttcctttgccgatatgctgatgtacagcagcaggtcttgttaatttacgtgatcttattgttgtggttggatgggtggtggaaaattggtactgcaactagctgcgtcagaaccagagaaaaagccaatgtgctgcatttttgcttgctgagctacatctactcatgttcttattttactggaatcatatctgctacatactataggtcttgacgatatattgattttctaatacactattcgattcataaccaataaaatatgctgtggccatgtatcgtgttgtgagcaaatcaatcccttgaattgcctacttggctatcaaaaaaaaaaaaaaaaaaaaaaaaaaaaaaaaaaaaaaaaaccccccac

SEQ ID NO: 54598 - DNA, 1791 bp, Oryza sativa
  Clone ID: PAT_MRT4530_56688C.1
ttcaagcttaattaagctcgtaatctcatataacctctttttggacgaagcttgccactcgatcgtgttaaccactcgagcttgagcgagcgagctagctttgctctgacgagaaaaatggcgtcctttcacatcgccacggcgctctcggcgactctgctgctctccttgctcgtcctgggccgctccgacgccaccctgccgccgccggccacgccggtgccgccgtccacggcgtgcaatgggacgacggaccccacgttctgccggtccgtgctcccgtcgaacggcaccagcaacctctacacctacggccggttctccgtcgccaagtcgctggcgaacgccaacaagttcctttcccttgtcaaccgctacctctccggcggtcggctcgccgccggcgcggtggcggcgctgcaggactgccagctgctgtccgggctcaacatcgacttcctgtccgccgccggcgccacgctcaacaggacgtccagcacgctgctcgacccgcaggcggaggacgtgcagacgctgctgtcggcgatcctgaccaaccagcagacgtgcgccgacggcctccaggccgccgcctcggcgtggtccgtgcgcaacggcctcgccgtgccgatgagcaacagcaccaagctgtacagcgtctcgctctcgctcttcaccagggcgtgggtgcgccccagcaccaagaagccgaggacggcgacgccgaagccgcctcgccacggcggccgcggcaggggcctgttcgacgccaccgacgacgagatggtgcggaggatggcgctcgacggcgccgcggcggccgtgtccacgttcggcgccgtgacggtcgaccagagcggcgccggcaacttcacgaccgtctcggacgccgtggcggcggcgccgacgaacctcgacggcaccaagggctacttcgtgatacacgtcaccgccggcgtgtacgcggagaatgtggtggtgcccaagaacaagaagtacgtgatgatggtcggcgacggcatcgggcagacggtgatcaccggcaaccggagcgtcgtcgacggctggacgaccttcaactccgccacgttcgctgtgctcgggcaaggattcgtggcggtgaacatgacgttcaggaacacggccgggccggcgaagcaccaggcggtggcgctccggtgcggcgccgacctgtcgacgttctaccagtgcagcttcgaggcgtaccaggacacgctgtacacgcactcgctccggcagttctaccgcgcctgcgacgtctacggcaccgtcgactacgtgttcggcaacgccgccgtggttttccaggactgcaccctctacaaccgcctccccatgcaggggcagagcaacaccgtcacggcgcaggggcgcaccgaccccaaccagaacaccggcaccaccatccagggctgcgccatcgtcgcggcgcccgacctcgccgccaacacggcgttcgccaccaccaactacctcggccgcccgtggaagctctactcgcgcacggtgatcatgcagtccgtcgtcggcgggctcatcgaccccgccgggtggatgccgtgggacggcgactacgcgctcagcacgctctactacgccgagtacaacaactccggcgccggggcggacaccagcaggagggtgacctggccggggtaccacgtgctcaacagcaccgccgacgccggcaacttcaccgtcggcaacatggtgctcggcgacttctggctgccgcagaccggcgtgccgttcaccagcggcctcaactga

SEQ ID NO: 54599 - DNA, 1014 bp, Oryza sativa
  Clone ID: PAT_MRT4530_56689C.1
atgcagccgcggcctccgccggcgtccatcttccgcttctcttccagcctccgcgttgccaccatcggcaaatgccacctccaggacgccattgtccaaatgcttcacttccccaagctcgagcatctcggacttgaggatgtcgtcatctccgagggctcacttcacagcataattgctgcctgccctgtcctggaatgcctgctgcttgttcgtgccattggtttccgtggtcttcggatcaactccgctagccttacaagcattggtgtggacatattgtattttccggcagaacagatcgaattgggggaactcatcatcgagcacgcccctcttcttgaaaagttgctcaattttggagtgcgcaatgaactggatgtatcgataatttcagcgcctaaactggtgactgtaggctgcctttgtcaacaattttgtcatcgccactccaggttcacgtttggcaccacagttattaagggagttaagaacgaaagtttgccagaggtggtgcacaatgtgaagactttagctgtcagtgtgcttttgcttgatgtggataaggttgttgacatattgagatgctttccttgcttggagaacttgtacttcaagtcatgtgaattgacctcaaaagttgtgtggcgtaaaaaataccggaatcttaccaagagccttgacattcgtctcaagacagtagtgttggaagattatcggggcatctgggcagaagttcattttgcccaattttttgtactgaatgcaaggacgctggaagctatgaaatttttcgtaacatgcaagattactataaggggtttgctgcagaacagcgaaaggtgcttcagctggacaaaagggcttcgagtggtgctcgtttcatatttaccacaaagggatgtttccacgatgctgcatgtgcaaaagatggtattagaatttggtgtttcaaaattggggaaattgtctttggaagttctgacatttttagtgcctgtcaattgttactaa

SEQ ID NO: 54600 - DNA, 1675 bp, Oryza sativa
  Clone ID: PAT_MRT4530_5668C.1
ccggcaaccgacacccaaaaaaatccatcaccatcccagagactccccccttctccccccgcctcctccctcccccctctcccccaacttccacctcgatccccatcccctctcctccctccttcttcctccgcctcccaccctcccaccgcgaccgcgtcgacccgccacccacccaaccgcgccgagatccagatccagatccgccgccatgaacccggggcgcccggcgccggcgtcgttccgcgaccgcaccaacgagttccgcgccgccgtcgagagcgccgcgcgctacgcctcctcctccgcggcggcggcgcccagcagcagcagcggcggcggcgttggcggcccgctcgacgtgtcgcggggggcggcctcggcgcactcggagttcaaccgccgcgcctccaagatcgggctcgggatccaccagacctcgcagaagctcgcccgcctcgccaaactggcaaagaggacatctgtttttgatgaccctacggtagagatacaagagctgactgcagttatcaagaaagatatcactgctttgaattctgccgttgtagtcctacaggttctctgcaattcacaaaatgagagcgggcacctttccaaggatacaacaaatcattccactacagttgtggacaatctaaaaaatcgcctgatgagcgcaacaaaagaatttaaggaagttcttaccatgcggacagagaacttgctggttcatgagaataggaggcaaatgttctcctcgccagctgcgaacaatgcatcaaatccatttgttcgtcaacgtccccttgttaccagggatggtcctgaatcctctgtacccccggcaccatgggccagtgattctgccactactccattgtttcagaggaagaagactaatggagatcatggagcatcatcatcatcttctcagccattcatgcagcagcagttagtacagcaggacagttacatgcagagtagagcggaggctctccaaaatgttgaatcaaccatccatgagctaagcaacatttttacacaactggcaactatggtttctcagcagggagagctagcaatcagaattgatgagaacatggatgacacactagccaatgttgagggagctcagggccagctactgaagtatctcaacagcatttcatcgaaccggtggctgatgatgaagatattctttgtgctgatggttttcctcatgatctttatattcttcgttgcatgatttccacttgcaatgtcaccatgaatgttctgcatagtttgtctgctatgcgtagtatattcttttgatttttaccaaactacaacatgtacacaattttcacccgggatgataagcagccgtctagccttttgtggtcatgtaaattgggagaagctccagaactggtatgttaaagttttcactacttgttcgatgtaccatttgatgacacacgttggtagcaatgtggaagaaaactgtcactgccaacgggtgaacccctaggagggggtggtcaggtggtgatggtgttgtgatatctgaacatgtgacagcctattgctccatagcagacgacccgctgtttctgaacttcactagtatggcttaaagcaatttcatttgtgcgtgctttcttttgcttggcttttaaaaaccaaaacaaag

SEQ ID NO: 54601 - DNA, 2623 bp, Oryza sativa
  Clone ID: PAT_MRT4530_56690C.1
ttagttgcaggcacgcccatctttttgcctgcctgctccaccgatgtttattcgacgcgctttcaccgatgcaggctttggcagcggctgtgcacaaaggatgagactgaaattagaggatccagccattccaccgtctccagatgacaggtatactgcagaataagtcataggaatatggtccgccgcctcatagtatattagtatatacagaaaacaatgatgtactgctacagatatgctggaacacctttgccagtataaggttaacctctggtgaagttgactaatgaaaagactggaacctgtaattgcatctctggattggtacagttccaatctgatcttggcctctggcaacaagctctcaattagcggatcttgcatcatgaacgactgtttggaggcccattcaagaaccgtaaggatctctgcttgcgccaactcctcgctatctgggacgttgtgtgcaatgtaacatacaagggcgagtgctgcaagctgaaccacctgctcactaaaatacacgagctgaacaaggtgcttcgcaccacccgcactgatgatcgctttcgagtgatcaacacgcaggtagttctctgtgcatgcaaacttggtcagggaaagtgctgcctcccgagagacatcagcttccctctcatcaagaagcttcaccaatggcccaatgatccgagtctcagttgcacggaaggttctggacagacagcctaatgagataatgcagggaataaggagatcatcatactcagccttgtcgacaacacgtaagagttggtcaacaacagcacgggcagcaggagaggttggcttaaatgctgaccgtcgcaggtcagaattctgctcagcaacactgcagatttccatgagagccatggcagaattgtattgcacatcaccttcgcctttctcaagtagcaccgcgaagcagagcagagcccttgactcagtgatgctcttgcagatagctgcattgcccttggcaagatgccacagcgccttcgcggcatttgccttcatagatgcctttgtctcagggtcctcaaactccctgcccctcgtagtcgctcctgacaacgatacgttgtgctgcttcgatgcgacgacaccgccattactgaccttaccactgctcccattaggctttgcagccatggtggaatgcaccaaactgtacatctcgttcttgctctgcgaaacgtgtccacctgggtgcctcgtaccgccatgctcccccgcgtccatcaagtccgggatcaacgccccgcgggtgctgttcttcttgtccatcaccacggaatgtatggacatcttggacgacgtcacggcgtacttggagtgctcctgcaccgtctcgaacgcgaggtggccgacgagcagccggatcacgttgtgcgacgcgaaggcgtcctggcacttggggtggttggcggccagctccgagacagcccaggccaccgtggcctgcaccttcatgggtccctccttgagcaccttggcgaaggcggtgcacgccccggcgtggaccatctgctcgacgcactccgggtcgcggccgaggaggccgatggcgagcgcggcgttctcctggccctcgagcttgccctccttgaccagcctgaggagcggggggacgccatcctcctcgatgatgagcttggagtacctgtcattgtcgcgggcgagcgagacgaggctggcggcggcgtcggcgcgggcgtcgaggttgccggtgtagagcacggcgatctgctcccagattaggaagaggatgggctcgttctgggcgatggggggcagtccaatgtgcgcgtcgaagtcgtcgtcgtcggaggcggaggaggagacgcggaggagccaggagaggtcgccgatggagttgtcgagctggttggccatcttcttgaacgacccggccgggataatggtgaagacgcggcggacgacgccgtgggcgcggcacttgtcgacgagcgccatggccttgtcgagcgccttctcggtgtcgtcgaagatgcggcgcgcggggcgctcgtacaggtcggcgcgcgccgcctggcggagctgcccggcgagccgctccaccttggccttgagctccatgcactcctgccggaacgtgtacgcctcgtccgaccacttgatcacctgctccgcgagctggatcggcctcgccaggatctgcttcagatcgtccatctctctccctctaaaccacccacctcccccctcgccgccgcgccgccgccgacgaagtcaactccgagcagcaatggggtgggggcggtggtggagtatcccgcccgcccgccggctcgccgggaatcctctccctgcctcctccgcgggaggggaagaattggagagggaagttgaaggtggaggtggaggtggtggtgatggtggggaggaggacagaaatgctaccagggaatcatccaatgttcaggtactgtgggtgtttgatccctgtgaaccgaagaacagctgggagaagaaagttcaggaaatggagaagacgacgagcgatcatatcaatctgtggtcttgcttggttgtttgctgcggcggtggagaagacgacattgccatagcagatgactga

SEQ ID NO: 54602 - DNA, 386 bp, Oryza sativa
  Clone ID: PAT_MRT4530_56691C.1
ttttggtttttttttttttggtgtttttttttttttttttttttttttttttttgttcgaaatttacgcaaaacatatacttttttattattcaatgagaaaagcaatgagcgcaatggtgctttcttatcacgtggggggggaacgccaagaaacaaagggcaggggacaaaggggaaaaaaaagggttccgccaaagggggcaacgaaggggaccccaaagggaacggaaaaaccgctcgaccagggggaagggatcaagcagcgaccaagcaacggccccctccacgggggcaacacccattatagcccttagcagcgaaaggaggtgcctgtggaaggattccaccctaaaaaaaaacaacaaggggggggggggaggaaag

SEQ ID NO: 54603 - DNA, 1752 bp, Oryza sativa
  Clone ID: PAT_MRT4530_56692C.1
atgtcacgcgagcctgcggcggcggcggaggcggaggacgtcgtggcccgtctcggcaccgacgaggcgactgggctgacggaggaggaggcggcgcgccgcctcaagctgtacgggcctaacctcgtggtcgcccatcacccccaggttacatacattagcagtttgatgttggtggccttcaacattgtgcttcaggtgggtggcaagcttcttgctacactaaagtgcatcgtcctgctctggggatgggatcactccttcaccgagtacattaaatacgagattggatgggagtcatgggagcatcttatcttcccctgctccagggagatgttatgtgtcatgttcatcaatttctcgtcatgggcggcattggcggctgcacttgtgtcccttgcccttaactcagctggtcagacaacctatgaactgatcgttatcgtctccttacttgtgggaagcctgtgtgcatgctgtgttgccaagctccttgccaatcgtgctaaggcaccgctggaagctaaagcttttgcgcgaaggaccaaggttctgagggatggaatatggaaacatgaggatgcgaccaatcttgtccctggggatatcatatatctcaagtgtggtgatattgtgccagccaatgcttttgtcctcaacatggcacagatcgacaccaaaaccatccgtcatgaaaggagtgttaactatgtgatgggctcccttatatactatggctgggctgtctcctgtggcgaagggactgctgttgttactgtgacaggcaataacatccccatgagcactctgaaacagctttatccaaaacgattctctcggcctgggcagcttaggaagggtgtcatggctgctgccactttttgcttctgcttagtacttgttggcatcacaagtgaggctcttgttaaattctttttccatcaaagcataggcacgctgcacagtggccactttatgccacttattggtctaataccaatgtcgattcctgctgtgctctacctggcattggcattggactctcagaggctttccaaattgggggttgccagccggggaacttttgctcttgaagacttggctagcatggatgctatgctcttcaacatgactggcactttgacatgcaacaagccctattttgacaaggacaagattgaagtgcttacagaaggtattgataaagatcatgctgtcctgttggctgcgcgggcttccaaagcacacaatgaactgtataaagaaccgattgatgcagccattctaggccttatggatgatccagaacaggcacgagttggcattaatgttatagagcaccgctcccgtatgtttgttgcaatgacattgatgtacatgactacttacatcgatgaaaatggctccaagtgttctgtgctcaaaggtgaccctgcattgatgcttcgtgactgcagttgtagcgaagaagtcagagagcatatacgcaaacgtattgataagctcggtcttgatggatatcaatgtattgctgttggacgtattgttaactctcggttggacatcattattcttctacctttcatagatgatctcagaagcgatagtgcagaagctgttgataatcttactgatatgggtctgagtgtaatagtacttacagaaagcccaatgacaattacaaagcacgtatgtggaagacttggaaaactgggcttaaatgtgttacatgctgactctatgcgggagttg

SEQ ID NO: 54604 - DNA, 855 bp, Oryza sativa
  Clone ID: PAT_MRT4530_56693C.1
atggccactgaatcttttagaaagaatactatatcttctttactggatgtggatggtacatttctaactagccatgatgacaaagctgtggttgcttggagggcttataaatcaagaatgggggtttccatgtttgaggatatgccttttgatttaaattcacttattgatgcccatgaaggtttggatattctgcataccccattcctcaaaaaagagattgatcagctcatcaaggatttacctactgacagggctcctggtcctgatgggtttagtgttcttttaaatggtgtccctggtttggactttcattgcaaaagaggagcttgtggtaaagaactttttgtgttaaaggccctgttgcaaacctttgctcaaggtacaggtcttaaagtgaattatcataaatcctgtctcatccctattaatgtgaatgatgataaggctgagatgttggctggagtttttggctgcaaaattggtacccttcctttcacttaccttggtttgcctttgggtaccacaaaacccagagtgattgactttgctcctctagttgatagaattgagagaatattgtctgcaaattcagcctttctttcttatggggataggcttaccttggttaattcagttttctcttctcaccctacatattatatgtgcacactgcagcttcctaaaacagttattgagaatattgacagggctaggagacattgtctttggagaggaggagatttcaattctagtaaaaagtctttggctgcttgggacaaggtttgtaagcctaagagctttgaagtcaccacaacactttgtttggctttggaaaagcaaattcacatctaa

SEQ ID NO: 54605 - DNA, 2067 bp, Oryza sativa
  Clone ID: PAT_MRT4530_56694C.1
ctcgggatgagagccccctcctctccatggcctcctccctcctcctgcctcgcgccaccttcgccgccaccaccaagcacatcgccgtcctccacccgcccgtcgcatccgcctgcaggccccacccgcccaggctgatcaggtgcggcgccgccgccgtcccggacgacgagctcctccgctcgctctacctcgtgcaggccgacgccgcgtcgccggtggtgtccgcggacacgggcaatgatggatgggccgctctccttgacgagatcaggggctccctccaggcggaggactcgtcgtcgtccatcccggcggcgaccagcggtggcgtcgtcgtccccgacgagctcctgaccgcgccgccgtccgtcgacatcccggacgagatcctcggcgcggacccgtcgtcaaccctgcaggcgcccggccccggcggcggcgccatcccggaggaccttctcgcggcgctgcacctggacgcgtcgaacccggtggtgcgggcggcgtggggggcgctgtcccgcctcgacgagctgacgtcgggcctctcggggccgcagcggtgggcggcggcggcgttcgcggcggcgacgtgggcgtacctgacggcgcggccgggggtgctgagcggggcggtggacgcgtacgtgctggcgccgctgcagctggcggtggacagcgcggtggggcggcggagcctgaggatgagcgacttcgtggtcggggagcggatcggggaagggtcgttcggggtggtgtactccggcgcggtggtgccccggggcggcgcggcgccggcggcgaggaaggggaaggcgaagacgaggctggagctggacgagaggtacaaggagaaggtgatactgaagaagatcaaggtggggacggcgggggcgaaggagtgcggcgactacgaggagtggttcaactaccgggtggcaagggcggcgccggagtcgtgcgccgagttcctcggcagcttcgtcgccgacaagaccaagtccgagttcgtcaagggcggcaaatggctcgtctggaaattcgaggtagagagtctctatcttatattccattatagaaatggcggtcaaagtacatggccaaatggccaaagaaagggtgaccggacgctgggcaactacatgagcgaccgcaacttccccttcaacctggagggcctcatgttcgggcgcgccgtgcgggggctcgacgacggcagccgcgccgcgctggtggtgaagcaggtgatgcggcagctggtgacctccctgaagcgcatccacggcaccggcatcgtccaccgcgacatcaagccgtccaacctcgtcgtcacccggcgggggcaggtgaagctcatcgacttcggcgccgccaccgacctccgcatcggcaagaactacgtccccgaccgcgccctcctcgacccggactactgcccgcctgagctctacgtcctccccgaggagacgccccagccgcccgccgagcccatcgccgccatcctctccccgatcctctggcagattaacagcccggacctgttcgacatgtactcggcggggatcgtgctgatgcagatggcgtcgccgatgctgaggtcgccgtcggggctcaagaacttcaacgccgagctcaaggccgccgggtacgacctcaaccggtggcgggagaccacgcggcggagacccgacctgcagatcctcgacctcgactccggcagggggtgggacctcgccaccaagctcatctcgcagcgcggcgccgacaagcgcggccgcctcaccgccgccgccgccctgcgccacccttacttcctcctcggcggcgaccaggccgccgccgtcttgtccaagctgtcactcagcaagtaggttatacaaaacaactcaatgcacaaaattaagaacacatgcagtgatcaggtcaccactcaccaatggcattagcatttttgtttatgatccattggagagatcaagaactcaagattgatccaagagagagggaaaaggaggaggaagaaacaatatggtaatatataattacattgttttgtatgaggtt

SEQ ID NO: 54606 - DNA, 457 bp, Oryza sativa
  Clone ID: PAT_MRT4530_56695C.1
attcaactaactattctgtattgtttgttttcctctctatttcaaaactaagtggaaaaagaaaatccaacatattttttttagaaaattttcaatcaagtaataaaaaacagagacggttcctctggacaagagctgataacatcatgagcgaaaaatgtaaagtcaactgaacaagaacttgtataccaatagcttatagagggctggggtgcttaacctgaaaaagttctcgagagcgctaagggtaagatggctatagcgcaccagtggaaggcaacgaaaaagacataagtagggctggatatgcgacaaatccgacaagctactctttacggcaacgacagcaataacaactggagatgggaaaactattctcttttgaaactcagcatggatgcaaggaagaagtccaagaaacgtggcgccaaaagtctacgcaatctccgatagaaaa

SEQ ID NO: 54607 - DNA, 757 bp, Oryza sativa
  Clone ID: PAT_MRT4530_56696C.1
ggcggaaaaaaaataaaaaaaaaaacctggccgtccaccgctacgagccttctccccctcgtacgcatacgcgaaacgcccccccaccgccgccgccgccgccgtattcctcctccgctcctcccttctcaagcaaaccaccggacctccctcgtctccgcgtccggtccacccctcgctgctcgggaatcatcagaaaggaggaggaggatatgccgctgggactgatactgagctcgctcggaaggtcgatgcggcgtaagcggctgtcctcgctcggcatcctctcctccaagagggcgcctcgggattactacaaggggaagaactgcaagcccaccgggttccacacccgcaaaggtggatatgttatggtggatgagaagttgccaagatttgtggtccctgacttgactgatttcaagttgaagccgtacgtgtcacaatgtgccagggacatcacagcgtcatcggcatcctccacttcagcagagactagtgaaaacaagaagtgatcttatggatgctctaggcattgtttgtgttttgcaagaacgcagagcatctttgcagttatgcttttcttatggtgaaaacaagaactgatcttagtgcatgtagcttcatcgtctgctgcatgttgactattatttagctacatcttttttgtaagagaacttgataggcagcatatattatctgaattgtctgttacatgttagctgtttctctggctctaaaaaaaaaaaaaaaaaaa

SEQ ID NO: 54608 - DNA, 1930 bp, Oryza sativa
  unsure (1)..(1930): unsure at all n locations
  Clone ID: PAT_MRT4530_56697C.1
acatgaaaaantatatactccgtattggagtatgtattagctaaatttattaggcacgtcgaaccacattttttaaatttgatagtttacagtaaattgtccaataaattggatatatataggtggatatcatgtatccattctaatcaacattatgtactaatgtacagtactacagttacatcattacacgaattactatcattttacaccctatttaaattcgaaagtacaactttatctattgattttcatgcagattttggaggaattccttgtaccacagcgcagatagctttggagatctttcctgtgttctgtagtctatgtagtacagtccaaatcgaagggtgtacccaaacaaccactcgaaattgtcaacgacttagtcctcacagcaaacgtggtgcctcctttcaaaactgataactttggcaagttttgtgagatagccttccaggtactctatcctatcctcgtcatcaatccaatcctctgcgtcggtgtaactatctccaccttgcgcgtatccgttttctgtgatgaacattggcaggttgttgtatcttctcatgaagtacttgaccatcttctcaatcccgtccggtaccacgtagaaagtgggcatcgctgttggagttccaatgggaagcccgttgctctctccagtgacagccgccagcgcgtgctgcgtctcctgcccctgtgggcagtctgagaacatgcagtccctggcgtacagggtcgtgtagtggttcaccccgatgaagtccagcttgtaccgcagcttcctcctgtcctccggcgagaaactcggcagcctcccgccgagaatctggcgcatctccggtgggtaatcgccgtagaccagtggatcaagaaaccacggagtttcgaacgccaaggctcgctcggtggcaagccggtcctcggggacatctctcagcggctcgtaccaggtgctgtacaacaccatgccaatcattcctctctgcttgctctggtactttctcttgtatatctcgatggcggtggcgtgggagagtatcacgttgtgggcggcgacgtagggctcggcgtgtgagtcgccgccgcgggcgcagtggccgaacggcggcgagcagcgggacggcgggtaggtgccgagcatgtagccatgccgcaccgcgacgttgggctcgttgaaggtggtccagtacttgacgcggtcgccgaacgcgccgaagcagacgtcggcgaagtgcccgaaatccgactgtatctcggcgttgagccaagctccgtatctgtcttcgagctcctgtgggatgtcgtagtgtgtcagggtgacaaatggctgtattcctttcagtaaaattgaatcgataagtttgttgtagaaatcaatgcccgctgggttgactccaccaaatctcccttttggaaggattctggaccatgatatcgagaatctataggcatttacgccgagggagttcatcagctcgacgtcctcctcgtagcggtgataatgatcatccgcgatatctccgttgcttccatccttgatatttcctggtagatgagtgaacacatcccaattgcttaaacttttgttgccttctagatatgcaccttcaatcacctgcgaaaccacagctaacacaccgatgctccaccaccaatcaacctccgccgacatgtgggacccctgcaccggcgccctccgccggctagccttcgtgcgtcgaagaccacgccagacccaccagcagctcctccactcaccaaggtcgcctcctccaccgccggccgcgccgagccggcctcctccaccggactcgcctctcacgccaatccggcctccctccatcagacgcgcctctcgcgccaagccggcctccatctccgctgcccgcacctctcgcgccgagccggccttcgctgccat

SEQ ID NO: 54609 - DNA, 255 bp, Oryza sativa
  unsure (1)..(255): unsure at all n locations
  Clone ID: PAT_MRT4530_56698C.1
agaaggggggaagaatggngtcgcgcctcctcgcccgatccaaagccctagcgctcgccctgtcccgcgccgacgggcggcgccggggcccgcggcnggattgcagtggctccgcacgctgtcctcnctcccccgcaatccggccgcggcggcctcccccgcccccgcgcngcgccaacccgccgtggggtcccctntnggcctctccaanattccaggatatnaacagacatctngactcattggtacaaaagt

SEQ ID NO: 54610 - DNA, 1610 bp, Oryza sativa
  Clone ID: PAT_MRT4530_56699C.1
gaatggaaccaagatacattaattattatttggcagtaggataattacaatgccagatatattcacacccgtaccatattattattagcaaaaatacaaaaagaatctaatcctgatatcaaattgttcccttgaacactcgactgaattttcaaaattctctacatcatctccaagaaaattccgaatgcatacctccttcacatatgcatacggacgagacgatgatgacggaacaattagaacgaagaaacacctaatcctagtctgcaatgcgacgactcggccatttgagtcgcatcacctgctatgatcttgccattgtccagctccggcagctcctctttaacaccaatgtcgccgttcacgtccaccaccgtcttgacaacgtcgacgatgtcggcgttcacgtccaccattgtcttgataatgtcgatgttgctgttctcgtccaccattgtcttgacatcgatgtcggcgttcatatccaccatttccttgacctcgatgtccgtgttcacgtccaccgtctgcacttgctcctcctcctgccgaaggtcgaacacatcgacgagtgacggtcccgactttatctcgaaccccttatcatcaatctggttgtgctcatccacccctaccggcatttggtgatcggatgtgagctcaaccttgtgttcagcatcatagttggtgtcgaaatcaaaatgctgcattccatcgacattgatgtcgagatgcggcttgctactgacgtcgtcaccggcggtcgagtcgtagtagaagtaatcgtaaagctgctgtggttgaccgtgatggtgttcacgctgactctcgtcctgattatgatggccgtcggcgtgtaggatcgcagcatcggcttcttgattggcatagagcgcatcaacgacctcatgctccgcactgagtaggagaggctggtttgacgaggtgacatcgagatcggcgcacgcgtcgtccaacacgcctgccggcagcgcagcggcgacgctaccggacgcgccagcggcagccgcctgacgacacatcgccagatggtggagtacggtgttgagttcggccgtgtcgagctcgagctggcgctcgagatcgcagatgacgcggcaacacccgccgacggggtcgtgggcccgcatctcggcctggtagatgagcgtgcgcatggcgtcgtcgcacagctcgggcttgaggtggcggagcgtcttgaggatgttgctgacgccgaagaggcggtgcgcgttgaggaagcggcgctgctggtcggcggggaagtagggcgccatcgggcagtccgggttgcacttgcgccgctggtacttgcacgccgcgcatgcctgattcgtccctccccctccacctccaccaccacctccaccaccaccacctcctccgctccctccgccgctggcgccgcgatgcgagccgccgctgccgctgccgctgccgctggagtgcggaggacgggcggcgacgggaaggctctggcgttggtgggaggcagtggtggtggtggtggtggagacggggttgttgttgttgttggtggtggtggtggtggtgttggtggtggtgatggtggtggtggaggtcat

SEQ ID NO: 54611 - DNA, 473 bp, Oryza sativa
  Clone ID: PAT_MRT4530_5669C.1
tctttgatgcccaggaatataagaagagacccccgttaataccgttgtggaggacggacgaactcttcatcgttgtcgtccatcccacaggcgctacatgtggtggacggaggaactcgccggtgtgtcagaggtcgagagttgacattgaacgacacaaatgtggcatgggaaaaaaggaattcacactcctagtggcataatataaaagtgctacgaattgagtggcatatcctgagagtgctctgaattggatagcatacttgaaaattcttatcgatttttgtcatttgtccaccttgctctgcatataacacatctggcaagtatttggacatgtttcatagcctatagagctcatggtgagatgtttccttaagtgatttggatgataatatatctggagtttattctccagattaataaataaaaaccgtaatgcatggagtttctaaaaaaaaaaaaaaaaaaaa

SEQ ID NO: 54612 - DNA, 633 bp, Oryza sativa
  Clone ID: PAT_MRT4530_566C.1
agctcaagctcagctcaagctgctattggctgtttgaaacgtggccatgtctgaggatgatgcggtatgcttaccctgaggtgactatgggtgcaaccccagttacacaattacacaccaccatgtgggcaggtgtgcttgtaaatgagtgtttaaccagtgatgagtgggttgcggaagtttaaaaattaaaggccttccaggattattccatcatatggtgaccactgtgaaaactttggcgtgatataaatcaccccactaaagttgtcttttcatatttaaaaaactgacaacagctcgcgctggtgagcgcaaacaatctcactatcaggacattaacattgttcaggccatagcgcagcagctacaactccagcagtttggtgatctctcctttgatcggaatttggcccaagcccaagctttgttggcttttaacgggccctctaaatatggtatctcccctagggactatggggcccccagtccccttcccccccttggcggtgtcttgtaatgagttttaccagtaaagtggttcggaagttaaaaataagccccgatatcctcatatgtgccatgtgaaactttgggtgatataaataaaaaaaaagttgtttttcttttttt

SEQ ID NO: 54613 - DNA, 791 bp, Oryza sativa
  Clone ID: PAT_MRT4530_56700C.1
cccacgcgtccgcccacgcgtccgtcttcttgtgctttttgtgggagacccttcactttaaatttcttcttccttcctccgcgaaccttaccccgatccaaaccgttctccactcgtgcaaccccgcacctctctagaatcttgatcctcccaagctgctcaagtgctcatcccccatggcgagcgccccctcggtcaccgccttcttcgggctgctggtgtccatgtacgccaccggattcttcccctacgtcgacctgcagtcgggtggcgagagttgcttcgttcgagctccgccgcttgacgccgcggtccacacgatgctgctggcggcggcggcggcgatggttgccttccacacatccgtcgcactcatctacgcccgtatcggcggcggaggcggcggtgccgtggacaggatgatccgcccgcaggtcgtttacctcatcctgttcttgtcttccggcgtgcttcacgtcttcttggctcctcagccaggcgccatcgacggcggccaagatttgctacccctcgccgtcgcggttgtccacgtgctccgtccagctgctgcagcgacgacgttcttcctctccatgacgctcatctacacccatgtccgtgctgttggccgcggtgaagggggagccggcgccgccgccaccgccgccgggaacgtgccgatcgcgacgaccaccgtggagctcctcgccaagctggtcctcgccgctgcgcttgtcacggtcgttcttaccctcacttccaccgtccttgctgcctcctacgccgactga

SEQ ID NO: 54614 - DNA, 670 bp, Oryza sativa
  Clone ID: PAT_MRT4530_56701C.1
aagctttgctacttcatcaaccatgacgactacaagagttttgacatctcggcatacgtcactaaatatgatgccgtgttattttattacaacaagtggtgttccaatcttcaatatttttatcaaccaatcagctcagtttcgacgagttggacaacatcatctactttcctccaagtaaagcatctgcaacagctataacaccaatttgatggattattgtcactgacatcatcaccagcacctctgcttcatcggccctgacatcagctctgttgctaatggatgactatgtcttcgccgacttattatttcactttcacggttgctatcgactggatcaccgacatcgttatcttcatcaacatcctgtcaagcctcttcaacatagcccactctactgctattgatgggcaacttcgtcattatatttgatcatctatgattgctgcttatcatcattactgtcggttgcctgccttgtctatcaccgactgattatttcactgccatggctacacaactttatcgctgggcgccttcatcttcattgctggctgacctgactgctgccgactggtttctttgccttcatggttgtgcaacttcatcacttttgattggtatcactatcttcactaccaccaatatttttgccacctctggtggg

SEQ ID NO: 54615 - DNA, 2962 bp, Oryza sativa
  Clone ID: PAT_MRT4530_56702C.1
atgagacaactagatcgtcagatctataattcacctggcggattcaaatccccaaacaggagtctcgtgcgctacccccttttattattgccgaattcatgtttcgacagttggcgcgccaggtaggggttcgtcgagtttcctatcacaagtgtgatggaaccaatctccgacatcgccggattcatcaagcatgtctttttcgtctcggattcaatccagtcgaagggatcaatctcggcaatttcatcgattcgatctccaattaatatcattggctttgtcgttttcactagttagatcattctctaactgcagactaatcttctattacttttctttttcttgttttcacgcaccggctgagatcgagacgaagtcccggtgtgtctgctcgtcgcctggtacgatctgtacaggtgccggcgtaaccttcatacgacacggggacaattcatgtccatgggatcaacagcgactgagtgcttcacgtgcatgtcatgccacacgcaacctctaaggccggttagctgcaccaagcccataatgtcaacaaaatcagagagacgaatctacatgcaaatcagcctcgcctatacggttggttggtcacgccgtcgttgttgggcgtctacgtcttcaccgaccggcttgccttcgttgccgccgactggtgtcaccgcctgcacggctggcctattatgccgccgctgttgggcatctacgacttcaccgccggcctgccttcgccgccgctgactggtgtctccgcctacacggctggcctattatgccgccgttgttgggcatccacgtcttcaccgaccggcttgccttcgtcgccgccgactagtgtctccgcctgcacggctggcctattatgccgccgctgttgggcatctacgacttcaccgccggcctgccttcgccgccgccgactggtgtctccgcctacacggttggcctactatgccgccgttgttgggcatccacatcttcaccaaccggcttgccttcgtcgccgctgactggtgtttccgcctgcacggctggcctattatatgctgccgttgttgggtgtccgtcgactggtgtcctcgcctatacggttggttggtcacaccaccgtacatgggcgtctacgtcttcaccgaccggctggccttcaccgctgccgactagtgtttccgcctgcacagctagcctattataccgccggcctgcctctgccgccacttactggtgttttcgcctatacggttggcggacttcgccgccattaatgggctccatcatctacaccactggcttggttccactggcgccgactggtgtttttgtcaccattgatggactgcttcactcccggtgcttggtggctatgactagtcgggcagagtgtttaaacgtaatgagtcatttgctcggggaaatcaaaattgacaagagaagaaatacatatttataaatattttaaaatacttgaatttttctcgagtattatatttatatcagatactactcatcctatatgtttgttctgcaggatccagatccagatatgtataaaagggattcatggctttaagcttatctcttacgctccaggaatggatcagtcagaacatcaccaccggcttgtgccaactggtgtttccgcctgcacggctggcctattatgtcaccgttgttgggcgtctacgtcttcaccgatcggccgcctcatccgccgccagctggtgtttccgcctgcacggcaggcctattatgtcaccgttgttgcgcgtctacgtcttcaccgaccggccgcctcgtccaccgccgactggtgtttccgcctgcatggctggcttattatgccgctgttgttgggcgtctacgtctttaccgaccggccgcctccttcgccgccgactggtgttttcgcctgcacggctggccttttatgccaccgttgttgggcgtctacgtcttcaccgaccggccgcctcgtccaccgccgactggtgtttccgcttgcacggctagcctattatgtcatcgttgttgggcgtctacgtcttcaccgaccggccgcctcgtccgccgccgactggtgtttccgccgtgcaccaccaactggtgtttccgcctgcacggctggcctattatgccgccgctattgggcgtctacgtcttcaccgatcggccgcgtcgtccgccgccgactggtgttttcgcctacacggctggcttattaccgccgttgttgggcgtctacgtcttcaccgaccggtcgcctcgtccgccgccgactggtgtttccgcctgcacggctggcctattatgccgcctttgttgggcatctacgtcttcaccgaccggccgcttcaccgaccggctgcctcatccgtcgccgactggtgtcaccgcctgcacggctggcctgttatgacgctaactgatgctatcttcttcacggctggctacatcgccgtcaccgctaataggcatcagcatcttcaacacaagctgcctacgtctgctgccgactggtttcttcacttccatggctgcatgattctgctagtgttgattggccttatcgtcttcatcgccgctaccactactgatggacatcatcgtcttccgtcgtcgactggttatgtcgccgccgactggtgcttttatcttcacaattgcgcgtcttcactaccggtttgcttctgttgccgccaactcatgttcacttcatcacggctatgcaactttgtcactatggtggagcaacttcatttttattatcttcggcatcggcaaactctattgcctctacttcgcaagctttgctacttcaccaaccatgacgactacaagagtttcaacaccttggcatacgtcaccaaatatgatgccgtgttattttattacaacaagtggtgttccaatcttcaatatttatcttcactcaagcaatgactac

SEQ ID NO: 54616 - DNA, 2977 bp, Oryza sativa
  Clone ID: PAT_MRT4530_56703C.1
atgagacaacctgatcgtcagatcaatacacactcggcggattcaaatccccaaacaggagtctcgtgcgctacccccttttattattgccgaattcatgtttcgacagttggcgcgccaggtaggggctgcgtcgaattacccatcgaaaagtgtgatggaatcaactacagaagaaacggcgagattaatctcgatggctcaaatcttcagtcgggagcagcgccgacggatgcgttgcggccaccacgccaccacgggcacatgggagcagccgcctatagcttgctcggagaaatttcacgcatgcatgagttgatttagcagattaacatacaagattgcttttctctttacatgtactgctggagccaccgtcaccgcccggtttgccttcgccgccgccgactggtgtctccgtctacacggctggcatatcaagccaccgttgttgggcgtctacgtcttcaccgaccggcttgccttcgtcgccgccaactggtgtcctcgcctgcacggctggcctattatgccgctattgttgggcgcctacgtcttcaccgaccggcctgcctccgtcgccgccgactggtgtcctcgcctgcacggctggcctattatgccgccgttgttgggtgtctacgtcttcaccaccggctcgcctttgtcgccgccgactggtgtcctcgcctgcacggctggcctattatgccgccgttgttaggcgtctacgtcttcaccgaccggccgcctcgtccgctgctgactggtgtccttgcctgcacggttggcctattatgccgccgctgttgggcgactacgacttcaccggcagcctgcctccgtcgccgccgaccggtgtcctcgcctatatacggttggtcacaccaccgttcataggcgtccatgtcttcaccgaccggctggccttcgccgactggtgtttccgcctgcacggctggcctattatgccgccgttgttgggcgtctacgacttcaccaccggcctgcctccgtcgccgccgactggtgtcctcgcctatacggtcggttggtcacaccaccgttgatgggcatcgtcatctacaccgccggcctgcctccgtcgccgccgactgatgtcctcgcctatacggtcggttggtcacaccaccgttgatgggcatcgtcatctacaccgccggcctgcctccgtcgccgccgactggcgtccccgcctatacggtcggttggtcacaccaccgttcatgggcgtccacgtcttcaccgaccggctggccttcgccgactggtgtttccgcctgcacggctggcctattatgccgccgttgttggatgtctacatcttcaccgttggctcaccttcattgccgtcgactggtgtttccgcttacacggttggcctattgtgccgccattagtgggcatcttcactttcaccgtcgaccgccttcgtcgccgccgactggtgccatcaccaaggggaatattacaaagctaagtcatcatttattttattctttatatgatatttttccttttcctctgcctcactacaccaattggtcttccattgagtagtgagtcgggggctacagatgttatatcatattttttataatatttatcttgattacttgcgacataatctgagtacaaaagtacctatcgagttatggagttctatcttcctatgctttccgtttggtttgccaatggatggttgcctttgggctgattcctagcacccgggggctcgttggatggaccgagtaacgcaaggtgctaagtattattcggaataaatcaaaagcatagagatgagataaatttattttctgctcttaataatggcaaaagtacccgagtagtaaattctgatccgtgaaactttgttccattaatgacgaactcatgtcactcatatgcatgtttgggaagtgcctaggccgacatatgcataaaagggattcatggctttaagcttatctcctacgctttaggaatggatcaatcagaacatcaccaccggctcgccttcgtcgccgccgactggtgtcctcgcctgcacggctggcctattatgccgccgttgttgggtgtctacgtcttcaccaccggctcgccttcgtcgccgccgactggtgtcctcgcctgcacggctggcctattatgccgccattgttgggcgcctacgtcttcaccgaccggcctgcctccgtcgccgccgactggtgtcctcgcctgcacggctggcctattatgccgccgttgttgggcgtctacgtcttcaccgaccggcttgccttcgtcgccgccaactggtgtcctcgcctgcacggctggcctattatgccgccattgttgggcgcctacgtcttcaccgaccggcctgcctccgtcgccgccgactggtgtcctcgcctgcacggctggcctattatgccgccgttgttgggcgtctacgtcttcaccaaccggcttgccttcgtcgccgccaactggtgtcctcgcctgcacggctggcctgttatgacgccaactgatgctatcttcttcacggctggctacatcaccgtcaccgctaatagctaccactactgatggacatcatcgtcttccgtcgccgactggttatgccgccgccgactggtgcttttatcttcacaactgcgcgtcttcaccaccggtttgcttctgttaccgccgactcgtgttcacttcattacagctatgcaactttgtcaccatggtggagcgacttcatctttattatcttcggcaccggcaaactttattgcttctacttcgcaagctttgctacttcaccaaccacgacgactacaagagtttcgacacctcggcatatgtcactaaatatgatgccgtattattttattacaacaagtggtgttccaatcttcaatatttctactcggacatcctcaacacatatcttcactcaagttatgactat

SEQ ID NO: 54617 - DNA, 277 bp, Oryza sativa
  Clone ID: PAT_MRT4530_56704C.1
gcacgcgacgaagctggacctttttagcggcgcctattttgttttgactgaataaaagggagatgaacgaatatactaaacactcacacgatgacaggacataaaaggtccccaactaactgaaaatcataaaacaaacaagcgcaaaagctaacggccacccatctgttattcatcggagatagaatcgtatgacccggtgtaatatttattacttcaacttttggccacgcatcggaagatgccgtacacaacaacaaaacccggagggaaacac

SEQ ID NO: 54618 - DNA, 1141 bp, Oryza sativa
  Clone ID: PAT_MRT4530_56705C.1
cagcctctcgatggacggagctcgcgagatcttaaccaaagaacatcaacttgactttattgctttgtttgagactgttaagaaataattttctacaactgctcttaacaatctttgtgctggtgaagattttttgtggtattgtaaacccactagaggtagatatggtggacttctcttgggcattaatttattaaatgctgatattggtttgattgatgagggtgatttttatattaagtttcatttgcgaagtaaggctgacaattttaagtgggccttagttttagtgtatggacctgcacagaatgagtttaaggatcaattccttgcagaattactgcacagtcatgagactttaccaattcttaatggtggtgatttcaacatactttgtagccctaatgaaaacaataatgacaattataatgatagatggccctttttttaatgctattattgatgggttgtgcctcaaggagttacaaatgtctggtaggaattttacttgggcaaataatttagcacatccaacctatgaaaagctggatagggttttagtgttgacggaataggagcaaaagtaccctttatcttctgttgttgctcttaatagagatatttcggatcatactcctttgcttctaaataaaaaatcttcctcttttagtaatgctgaacatagttttaggtttgaacttggttggcttttatgtgatggttttgttcatatggtaaaggaagtttggtctagtgttgatgaaggaaatactcctatggagcgttagcaggcggaaattcgccgcttaagacaacatcttaggggttgggctaaacataccagcggtatatacaaaaaagagaaaaagcagattttagataggttggatgcgctggataaaaaggcagaaactgttctcctgtctcaagaggaaattgatattagatggttttttaggaatagattatctgctatcctacgggaagaagaaataaaatggtattagaggtctaaaactaaggatattttggagggtgattctaatacaaagtattttcatttagtggcaaatggaaataatgagtctgaccttcagttagatgagaataatattgctgacatttctcaagtctcacattt

SEQ ID NO: 54619 - DNA, 793 bp, Oryza sativa
  unsure (1)..(793): unsure at all n locations
  Clone ID: PAT_MRT4530_56706C.1
gccttttgctaaatgtttcttgctacgatgtgttctttggaatgtgctcatctctgtcttctctactctgtaggggttttcggttttgttgtgttggtgtggttcttgctgcttgatttgtccgcctgagttagctgacaggatcttgcatgctctagaccagattttctctattggttccacatcccgcaacctcttctttgctccttgctgtgctgcttctgtctttgaagctcacatttcttcgaagggatttcacgctgtcggctaggctgcgctacaagtgcaccgtgtgaagaatgcaaacaggagctacaagccagttgccaatgaactaatgatcactttcactaggtggacaactgttgaggagtgcattgaagttcctattgatttccctactgtggttttctccctgacacctttcgatgatgttgctaagtttgtggacaataatgatttttttattgatgttatgggtgtcattactgacatatctacacccacaatgcttcgtcctagatcaagggatgctgacagcttgaaaagaactattcagatacgcgatgcaaacaattctaccttgaatgtgtctctctgggctgaacaagcatctgcgtttgaggctgacgctatacacaaggctggtaagagtgaacctcagattattctgtttgttggaactcttgcgaagaactacccaggcataggattggcactatcttggaggttctgcttgcanatggtacattaacattgatgtacctgcgatagttgaattaaagggacagac

SEQ ID NO: 54620 - DNA, 4048 bp, Oryza sativa
  Clone ID: PAT_MRT4530_56707C.1
gtctcgtgtgctacccccttttattattgccgaattcatgtttcgacagttggcgcgccagataggggtgcgctgagttttctattgacaagtgtgatggaatatatcatcgccgctgttggcgccatcttctgatcaaatcaatcttcgaccccacgagtttgtcgctccaatctgcttttattatttggttgttttcttgattctaattagagatttcttctgtctctttacatgtaccgccggccgccttcgtcgctgctgactggtttcttcgcctccacggtcggtgtgtgccgctaccattgctgatggagataacatcttcaccgactggcctgctccgtgctgctgactagtgtctcgtctatacggttggttggtcacaccaccgttcatgggagtcatcgtcttcaccgaccggttggccttcgccgccgccgactggtggttccgcctgcacggctggcctattatgccgccgctgttgggagtctacgacttcaccgccggcctgcctccgtcgccgccgactggtgtcctcgcctatacggttggttggtcacaccaccgttcatgggcgtccacgtcttcaccgaccggctggccttcgccaccgccgactggtgttttcgcctgcacggctggcctattatgccgccgctgttgggcatctacgacttcaccaccggcctgccttcgccgtcgccgactggtgtctccgcctacacggctggcctattatgccgccgttgttgggcatccacgtcttcaccgaccggcttgccttcgttgccgccgactggtgtttccgcctgcacggctggcctattataccaccgtacatgggcgtctacgtcttcaccgaccggctggccttcgccgccgccgactggtgtttctgcttgcacggctggcctattatgccgccgttgttgggcgtctacgactttatcaccggcctgcctctgccgccactgactggtgttttcgcctatacggttggcggacttcgccaccgttaatgggcttcatcgtctacaccactggcttggttccactggcgccgactggtgtttttgtcaccattgatggactacttcgttcccacatcggctacttttgctgtcaccgagggaatacgacaaagctaagtcatcatttattttattctttatataatattttgccttttcctttgcctcactacatcaactggatccagatccatatatgcataaaagggattcatggctttaagcttatctcttacgctctaggaatggatcagtcagaacatcaccaccggcttgcctcgtccgccgccgactggtgtttccgcctgcacggctggcctattatgtcaccgttgttgggcgtctacgtcttcaccgaccggcttgccttcgttgccgccgactggtgtcaccgcctgcatggctggcctattatgccgccgctgttgggcatctacgacttcaccgccggcctgccttcgccgccgccgactggtgtctccgcctacacggctggcctattatgccgccgttgttggacatccacgtcttcaccgaccggcttgccttcgtcgccgccgactggtgtctccgcctgcacggctggcctattatgccgccgctgttgggcatctacgacttcaccgccggcttgccttcgtcgccgccgactggtgtctccgcctgcacggctggcctattatgccgccgctgttgggcatctacgacttcaccgccggcttgccttcgtcgccgccgactggtgtctccgcctgcacggctggcctattatgccgccgctgttgggcatccgccggcctgctttcgtcgccgccgactggtgtctccgcctgcacggctggcctattatgccactgctgttgggcatctacgacttcaccgccgactggtatctccgcctacacggctggcctattatgccaccgttgttgggcatccacatcttcaccgaccggcctgccttcgccgccgccaactggtgtctccgcctacacggctggcctattatgccgccgttgttgggcatccacgtcttcaccgaccggcttgcctttgtcgccgccgactggtgtctccgcctgcacggctggcctattatgccgccgctgttgggcatctacgacttcaccgccggcctgccttcgccgccgccgactggtgtctccgcctacacggctggcctattatgccgccgttgttcggcatccacgtcttcaccgaccggcttgccttcgtcgccgccgactggtgtttccgcctgcacggctggcctattatatgctgccgttgttgggcgttcgtcgactggtgtcctcgcctatacggttggttggtcacaccaccgtacatgggcgtctacgtcttcaccgaccggctggccttcgccgccgccgactagtgtttccgcctgcacggctggcctattatgccgccgctgttgggcttctacgacttcaccgccggtctgcctctgccgccactgactggtgttttcgcctatacggttggcggacttcgccgccgttaatgggcttcatcatctacaccactggcctggttccactggcgccgactggtgtttttggattcatggttttaagcttatctcttacgctccaggaatggatcagtcagaacatcaccgaccggccgcctcgtccgccgccgactggtgtttccgcctgcacggctggcctttatgccgccgttgttgggcgtctacgtcttcaccgaccggccgtctcgtccgctgccgactggtgtttctgcctgcactgctggcctattatgccgccgttgtcggacgtgtacatcttcaccgactggccgcctcgtccgccgccgattggtgtttccgcctgcacggctggcctcttatgctgccgttgttgggtgtctacatcttcaccgaccggccgccttcaccgactggccgcctcgtccgtcgccgactggtgtttccgcctgcacggctggcctattatgccgccgttgttgggcgtctacatcttcaccgaccggccgtctcatccgccgccgactggtgtttccgcctgcacgactggcctattatgccgccgttgttgggcgtctacgtcttcaccgaccggcttgccttcgccgccgccgactggtgtctccgcctgcacgactggcctattatgccgccgttgttgggcgtctccgtcttcaacgaccggccgcctcgtgtgacgccaactagtgctatcgtcttcacggctggccatgtcgctgccaccgctaataggcgtcatcatcttcaacgcaagctgtctatatctaccgctgactgttatacagctaccactactgatggacatcatcgtcttccgtcgccgactggttatgccgccgccgactggtgcttttatcttcacaattgcgcgtcttcactaccggtttgcttctgttgccgccgactcgtgttcacttcatcacggctatgcaactttgtcaccatggtggagcaacttcatttttattatcttcggcatcggcaaactctattgcctctacttcgcaagctttgctacttcaccaaccatgacgactacaagagtttcgacacctcggcatacgtcaccaaatatgatgccgtgttattttattacaacaagtggtgttccaatcttcaatatttatcttcactcaagcaatgactactcgacgacaagaagttacagttctcgactctatgttcagttgtttcccaactaaccaaagagtcgggggctacacaaatacaagactctcaaaattcgacaagctgaagcaatcaattaatcagccaacgagtcaattccaggagtcattatcttcgtctttgctttagagcagagttatcaaccaatcagctcagtttcgacgagttggacaacatcatctactttcctccaagtgaagcatctgcaaattttaaaaggtgccaacaagtaatgctttatatagctccccgctgacttttttatataagtcaaggcgctgtttgg

SEQ ID NO: 54621 - DNA, 4885 bp, Oryza sativa
  Clone ID: PAT_MRT4530_56708C.1
atggggttttcggttttgttgtgttggtgtggttcttgctgcttgatttgtccgcctgagttagctgacaggatcttgcatgctctagaccagattttctctattggttccacatcccgcaacctcttctttgctccttgctgtgctgcttctgtctttgaaggtgagctcacatttcttcgaagggatttcacgctgtcggctaggctgcgctacaagtttagatttggtgcagctagcagtgggtttcatagaggtagttcttcgcggtcacacaaggatcatgctgaggctttaaaggcatcataccctaggaggtcttattatggtgcaccaacatacgagtgcccatactgtggtgccgtgttttggtaccaggagagagttaagggcgcttctgctatttcaaaacgaaagatagtttacaatctgtgttgcaaaagtggtaaaatacagttgcccaaactatgtaaaccccctgagcctcttgctacactgctaaaatttaatggcgatgcacgctcaaaaagattccttaggcagatacggtcctacaactctatgtttgcttttacttcaatgggtgcagctgttgataaatcaattaacactggaaattcaccttatgtcttcaaaattaacggtgttgttcatcacagaattgaaaatgagacacaaaatcgaatgaacatatatgaaaatgatggtagtaacgctgatcaagctgagcctgttgtagttgatgctctctgcactatgctagattgtcataatacacttgtgcaaaaatttcgctacgctagggagcgtctttctgagcatgggaaccatagtttgacgttgaggcttatgggatgcaatgccaaaagtgatgtgcagtacaatttaccaagtagtggcgaactagctgcgattatagtgggtgattactcagcagctgaatacacttttgatatacttgtgcatgagagcgatattgggctgcgacgtgtcttccttgcacccatgctaaatgaacctaatccattcacatacattcaaagtgttgtcgatgtattctcaactattgaaagcagtaggttgaaatatatagctgatcatcagtcagacttgcgatctgaatgcgtacaaggtatagctgatgctattgatagaggtataaccaacggtgattctgtaggcaagcgagctatccttcctgctagctttacgggaggtagaaggtatatggtcatgaactatcaagatgcaatggcgttatgtcgtgtttatgggtctcctgatttatttgtcacattcacgtgcaactcaaagtggcaagaaatagttgaatcaatacgatttgaagatggccagctgccatctgatagagctgacatgattgttagggtattcaatatgaaagttcatgattttattactgacatcagggagggtaagacatttgggcctgtgcttgcagttctctacactgttgagttccagaaatgtggtttgccgcacatacactgcttagtatggcttgctgctagcagtgctcaagtatcagtagctgttatagatggatttatcttagctgagataccagactttgaaaccgatgaattaggttatgagtcggtaagcgagttcatgatgcatggtccctgcggtgagcataacaaacaatgtccttgcatgaaaaatggcaaatgttcaaagcactttcctaaagattttcatgatgaaacatttgttgatgaatatggttttacaatctataggcgcagaaatgatgggcgatatatcacaaaaaatggtgtgcgtctagataacagatcagttgtcccatataacattggtttgcttaaaacataccaggcacatataaatgttgagtggtgtaataaatccaacatgattaaatatcgttttaagtatgtgatgaaagtccatgatcgatcaaaaatatattttgaaaccactgctgcaaatggtaatatgtcacctaaccatgaccttgcccctctagatgagatactagaatacatggatgctaggtttttatccacctgtgaggcactgcatagaatttatgaatttgacatacattatagggtttcacctgttgaaaggttggctgtgcatttgcctggtatgaactatgttcgatacgagacagggtcagacttaagagcattgcttaatagtcctgctgcgaaacgtacgatgctgactgagtggtttgaaacaaatgcaaaggatgaggatgcacgtagcctaacatactgtgattttccaacaaaatggacatgggattccacatcgagatcttggcacaaaagaacaccagctcctaaaattggtagaatgtattatgttcatccagctgctgattccttggttgcacagattaatactgatcaaaaaacaatctttgacaccattgtaggccgagttgtagcagaacagccaggctttttctttgtatgtggtcatggtggtactgggaaaacatttatgtggaatgctttgattgcgaaaataagatctagaaataaaatagttcttgctgtagcttcgtctggtgtggcttctctactgttgccaaaaggaaggactgctcattcacgcttcaaaatacctattgaaattaatgaaaccagtctttgcaatgtaaagagaggaacgatgcttgctgaactacttgaaaacactttgctcatcatctgggatgaagctccaatgacacataggcgttgctttgaagcactagatcgcacactgcgtgatatcctttctgaaacatgcccttcaaatggtgttgttccctttggcggtaaaattgttgtgctaggtggcgactttcgacaaattctaccggttgtgcctaaaggttcacggtcaacaattattgacgcatctattacaaattcaaaactatggaaacatgttgttatgcttaggttgaatgtaaacatgagattgcttaacccttcacttccaaacacacaaaaagaagagcttaagcaatttagcgaatgggttttagccgttggtgatggcactttgcctaaaaaaaaagatggtttaattccaggagatggaaaagaatacctcagttgtgatacaatctcaaagtgttctgaacaaataccagattttgacatgttatatcccactgaactcctcaactcaattgatgcgaacaattttccaacacatagacttgtacttaaagaagtgcaccgtgtgaagaatgcaaacaggagctacaagccagttgccaatgaactaatgatcactttcactaggtggacaactgttgaggagtgcattgaagttcctattgatttccctactgtggttttctccctgacacctttcgatgatgttgctaagtttgtggacaataatgatttttttattgatgttatgggtgtcattactgacatatctacacccacaatgcttcgtcctagatcaagggatgctgacagcttgaaaagaactattcagatacgcgatgcaaacaattctaccttgaatgtgtctctctgggctgaacaagcatctgcgtttgaggctgacgctatacacaaggctggtaagagtgaacctcagattattctgtttgttggaactcttgcgaagaactacccaggcataggattggcactatctggaggttctgcttgcaaatggtacattaacattgatgtacctgcgatagttgaattaaaggacaagactgggacaaacttccagccaatcaattggattgaggctccagccagagcagctgttgaggaagtcgctgagaacaagactgtgcgtgaacttctagagatcaatcctcacaagtgcaaggtaaatgctaattgcgatagatcaaaacaacatgtttgtcttatgctatttagacctgctcttactctgctaattgctccatttgttacagaagatgcttcaaggttgcaaaaccttatgggtccacctataaatgcactagctgttccaacatcgcagtggcagtaccaagcccagcgcattgtgcgaaggccagttgaagctcttattgaggaagcaccagctgacagtgattttatccctgatgaaataacggctttagttgggaagtcgtttgtgtggaatgtcagcttcacagaaaatacgcttaagtttggggatatctcattccaggtcaacagcattgtctccattgatgctcctggtgaacctcttatgttgatgtccccaggtgcttcccagagttcttcagccatgatttcacctggaccaagtggctcattgatgtcaccatcaaggggaagtgaacttggcatagcttcacccggttcaactgcagccagctctccactgccaaggcgtgttattaccacggacaaaagccaagttgtgcacacaccaaccagcaagtgctctgtcagcatagatcaggatgacatttctgctgctttttctccaccaatgtcccagaaagtgcaagctccagctattcctgatgatgatacactactggctcatgcatctggctcaaagagcaagtctaggaagagaggtcctccttctcaagcaccaccagcagttaagaaactattcaaggaaggtgacagcgatgagaaagaaaccactgttagctattacttcttagtgactttcgaaattattgttcccatctcttttggaaccatctttagcaatgtttgtaagcttattatggttacattagctatagtccaaccacgtgctcaaagtccattacagttgccaatatgtcagtacggcaatggactttgaacagttggcattggctaacttccaagataccttctaaggtttggtttagtaattttacaccaatcttaacactcatccatgtttc

SEQ ID NO: 54622 - DNA, 3124 bp, Oryza sativa
  Clone ID: PAT_MRT4530_56709C.1
gacacacaaccagatcgtcagatctacaatgcacttggcggattcaaatccccaaacaggagtctcgtgcgctaccccttttattattgctgaattcatgtttcgacagttggcgctccaggtaggggtacgtcgagttcctatcaaagaagtgtgatggaatcaattccaaaagcagggttgagattaatctcaacaatttcgacctgcatgcactggcggctgatgagatctgctgatcgcctccggataaccatatgcaccatggctcggcgttggcggagagcttctgcgtccgatcttgccctgcgatttggctgaagtcggccaatattcaatggctgatctaatagagatctataatgagatttcggatagcatcgcttactgccgtgtcgagttctcaaccgatcatctggccggttacggcgattatattaattaattaattattatttttcactaatcacaagagtccgattcataagaagacaagcttcccaactagattgcacgagcatggattggtcaggcgatgtgtggatgcatatcaagcgttcatgctacaggagattaattggccaatcaatatatgcgagctgcatatacgcattgataaatgcaaacgtatatacacaagcttctttatacctgtatttattttatgtggtactgaacagattaatctgttagttgatttattttgcatgtacccatgccaattgtctctgtcgccgctgctgggcatccacatcttcaccgccggccccctcgtctgccgccgactggtgtcctcgcctgcacggccggcctattatgccgccgtttttgggcgtctacgtcttcaccgccggccgcctcgtctgccgccgactggtgtcctcgcctgcacggctggcctattatgacgccgttgctaggcgtctacgtctgcactgttggcttgctttgccgctgccgactggtgtttccgtctgcacggcctatgccgccgttgatgggcgtctacgtcttcaccgaccggctggccttcgccgccgccgactggtgtctctgcctacacggctcacctattatgccgccgttgttgggtgtctacgactccaccgccggcctgcctgcgtcgccgccgactgatgtcctcgcctacacggttggttggtcacaccaccgttgttaggcgtccatgtcttcaccgaccggctcaccttcgccgtcgccgactgttgtctccgcctacacggctggcgttgttggacgtctatgacttcattgctgcccagcctcgcctgccgccgactagtatcctagattatacggttggttggtcacaccaccgttgatgggcgtcttcgcttacactgccggtttgcctttgtcgctgtcgactggtgttttcgcctatacagttggcggactccgccgccattgatgggccttgtcatctacaccaccggcttgccttcaccgccgttgcccggtgtcttcattgttattgatggacaactttgctcccacatcagccacctctgccgtcatcaagaggaatattacaaagctaagtcattattttttttctttatatgatattttccttttcctctgtctcactatgtcaactggttcgccgttgactagcgaatcaggggctacagacactcatatgcatgtttgggaagtgcctagaccgactcccgatgcttgggggctatgactagtcggacagagtgtttaaacgtacagagtcatctgctcggggaaatcgaaattgagtagaggagaaatatatatttataaatattttaaaatacttgaatattatatatacatcagatactactcatcctatatgcttgttctgtaggatccagatccagatatgcataaaagggattcatggctttaagcttatctcctacgcttcaggattggatcagtcagaacatcaccaccggcttgccttcgccgctgccgactggtgtctccgcctgcacggctagcctattatgccgccgtcgttgggcgtctacgtcttcaccaaccggcttgccttcgtgccgccaactggtgtctccgcctgcacggctggcctattatgctgccgttgtagggcgtttacgtcttcaccgaccggcttgcctttgctgccgccgactggtgtctccgcctgcacggctggccttttctgccgccgttgttgggcatcatcatcttcaccgaccggcttgccttcgctgccgtcgactagtgtcttcgcctgcacggctggcctattctgccgctgttgttgggcgtcttcttcttcaccgaccggcttgccttcgccgccgccgactggtgtctctgcctgcacagctagcctattctgccaccattgttgggcgtcttcgtcttcaccgaccggcttgccttcgccgtcgccgactggtgtctccgcctgcacggctagcctattctgccaccgttgttgggcgtcttcgtcttcaccgacaggcttgccttcaccgccgccgactggtgtctccgcctgcacggctggcctattatgccgccgttgttgggcgtctacgtcttcaccgaccggccacgtcgccgccaccgctaataggcatcatcatcttcaacgcaagctgtctacgtatgatgccgactggtttcttcacttccatggctgcatggttctgctagtgttgattggccttatcgtcttcatcgccacaaccactactgagggatgtcatcgtcttcattgctggccgccttgtttgacatcgactatttttttttctggagctgaccggagtatctatcttcacgactacacatcttcgccaccggttttcttctgttgctgccaacttgtgttcacgtcatcacggctatgcaactttgtcaccatgtggagcgacttcaccttcattattttcgacattggcaaactctattgcctctactttgcaagatttgctactttaccaaccacaacgtctacaagagcttcgacatctcagcatgcgtgaccaaatatgatgccgtgttattttactactacaagtggttttccaatcttcaatatttctactcggacatccccaatgcatatcttcactcaagtgatggctac

SEQ ID NO: 54623 - DNA, 322 bp, Oryza sativa
  Clone ID: PAT_MRT4530_5670C.1
taaatactctctctcgccgatagcagcgggggcatttttggccgatctcgccgtcgcatccaccgccttcgccaacaagccgcgcctggcgcgcgcgccgtcatccccagccgagcggatctccgagtcgtgctccgagtggggcaacaacggcggcgcctgcgagatggcgcagacgctggcggcgtcggccaagacgttctccgcggcgctggcgctgaccacggagctgctctactcggcggcctggcacgacttacacattgcactgtccatgaacagggcatactgttggcctggaagacgaaacatccttcatctg

SEQ ID NO: 54624 - DNA, 3043 bp, Oryza sativa
  Clone ID: PAT_MRT4530_56710C.1
atgagcacatatgatcgtcagatctatactacacccggcggattcaaatccccaaacaggagtctcgtgcgctacccccttttattattgccgaattcatgtttcgacagttggcgcgccaggtaggggttcgtcgagtttcctatcacaagtgtgatggaaccaatctctgacatcgccggattcatcaagcatgtctttttcgtctcggattcaatccagtcgaagggatcaatcttggcaatttcatcgattcgatctccaattaatatcattggctttgtcgttttcactagttagattattctctaactgcagactaatctcctattacttttctttttcttgttttcacgcaccggctgagatcgagacgaagtcccggtgtgtctgctcgtcgcctggtacgatctgtacaggtgccggcgtaaccttcatacgacacggggacaattcatgtccatgggatcaacagcgactgagtgcttcacgtgcattcgcctatacggttggttggtcacgccgccattgttgggcgtctacgtcttcaccgaccggcttgccttcgttgccgccgactggtgtcaccgcctgcacggctggcctattatgccaccgctgttgggcatctacgacttcaccgccggcctgccttcgccgccgccgactggtgtctccgcctacacggctggcctattatgccgccgttgttgggcatccacgtcttcaccaaccggcttgccttcgtcgccgccgactggtgtctccgcctgcacggctagcctattatgccgccgctgttgggcatctacgacttcaccgccggcttgccttcgtcgccgccgactggtgtctccgcctgcacggctggcctattatgccaccgctgttgggcatctacgacttcaccgccggcctgccttcgccgccgccgactggtgtctccgcctacacggctagcctattatgccgccgttgttgggcatccacatcttcaccgaccggcttgccttcgtcgccgccgactggtgtttccgccttcacggctagcctattatatgctgccattgttgggcgtccgtcgactggtgtcctcgcctatacggttggttggtcacaccaccgtacatgggcgtctacgtcttcaccgacaggctgtccttcgccgccgccgactggtgtttccgcctgcacggctggcctattatgccgccgctgttgggcgtctacgacttcaccgccgacctgcctctgccgctactgactagtgttttcgcctatacggttggcggacttcgccgccgttaatggacttcatcatctacaccactggcttggttccactggcgtcgactggtgtttttgtcaccattgatggattgcttcgttcccacatcggctacttttgctgtcaccgagggaatacgacaaagctaagtcatcatttattttattctttatatgatattttgccttttcctttgcctcactacatcaactggttcgtcgttgactagtgagtcgggggctacagatgttatatcatattttttaaacaattttcataatatttatcttgattgcttgcgacatattctgagtacaaaagtgcctatcgagttatggagttccatcttcctatgctttccgtttggtttgccaatggatagttgcctttgggccgattcctagcacctgggggcttgttggatggactgaataacgcaaggtgctaagtattatttggaataaatcaaaagcatagagataagataatttattttctgctcttaataattgcaaaagtacccgagtagtaaactccgacccgtgaaactttgttccattaatgacgaactcatgtcactcatatgcatgtttgggaagtgcttaggccgactcccggtgcttggtggttatgactagtcgggcagagtaatttttctcaagtattatatttatatcagatactagtcatcctatatgtttgttctgcaggatccagatccagatatgcataaaagggatttatggctttaagcttatctcttacgctccatgaatggatcagttagaacatcaccaccgacttgcctcgtccaccgccgattggtgtttccgcctgcacggctgcctattatgtcaccgttgctgggcgtctacgtcttcaccaaccggccgcctcatccgccgccaactggtgtttctgcctgcacggctggcctattatgtcaccgttgttgggcgtctacatcttcaccgaccggccgcctcgtccgccgccgactggtgtttctgcctgcacggttggcctattatgccgccgttgttggacgtttacgtcttcaccgaccggccgcctcgtccgccaccgactggtgtttccgcctgcacggctggcctattatgccgccgttgtttggcgtctacgtcttcaccgaccggccgcttcaccgaccggccgcctcatccgccgctgactggtgtcaccgcctgcacggctggcctgttatgacgccaactgatgctatcttcttcacggctggctacatcgccgtcaccgctaataggcgtcagcatcttcaacacaagctgcctacgtctgctgccgactagtttcttcacttccatggctgcatgattctgctagtgttgattggccttatcgtcttcatcgctgctaccactactgatggacatcatcgtcttccgtcgccgactggttatgccgccgccgactggtgcttttatcttcacaattgcgcgtcttcactaccggtttgcttctgttgccgccgactcgtgttcacttcatcacggatatgcaactttgtcaccatggtggagcaacttcatttttattatcttcggcatcggcaaactctattgcctctacttcgcaagctttgctacttcaccaaccatgacgactacaagagtttcgacacctcggcatacgtcaccaaatatgatgccgtgttattttattacaacaagtggtgttccaatcttcaatatttatcttcactcaagcaatgactac

SEQ ID NO: 54625 - DNA, 572 bp, Oryza sativa
  Clone ID: PAT_MRT4530_56711C.1
tattgttactaatgcagcaacagggcagccaacagggtactctttcatatgctaattttgctgagaagattttttttgctgtttttttttgctgagacagtgatggaacatgtctagtgcaaatcagccattaggtgctgttgtgcttatatcttcaactttgaagtcaacttcacatggtctaaaaaacttgagttatatctctcttcatttaacatgaaacttaaacttcagatgcaactaggaacaaccttatatctgtaccgtcagtagagcttggactgatttcatatggtgttaaatctcacccaggagtacctttggcttggtattcaaatcaaaaggtttttacatgtagaactcacagattggtgatagcagtttatatgtcatatatctccataggaaaaattgtgaatactacatccggcccaaaaaataagcttctggctttaatcgttttatgcaaactgaggaaaatattttgagtaaatataattggcatcgcaggcattaaacttgcgtcgtgtttcattagatttatgatatttagaactcaatacttatgcaat

SEQ ID NO: 54626 - DNA, 479 bp, Oryza sativa
  unsure (1)..(479): unsure at all n locations
  Clone ID: PAT_MRT4530_56712C.1
gacaaagatacaacgtgttgaatggaacaacagatcttttctctgatcgccttaaggggcctatcacattccgcaattcaatcatcggcacttttgcattaggggtttctgtgggctacttcatcgctgaccttgcaatgatcttctggttgtatccttcccttggtggaatggaatacatcgtccatcatactctttctctagttgcaatagcttacacaatgttgtcaggggagggtcagttctacacatacatggttcttatttcagaaacaaccacccctgaaattaacttgagatggtttcttgacacagctggactgaaaaagtcaagtgcttacttggttaatggtattctgatgttcgttgcatggctggttgcaaggatacctttgttcaattacgtattctatcacatctatttgcactacagtcaggtnatgcagatgcatgcttttgggtactacttgacatttatt

SEQ ID NO: 54627 - DNA, 357 bp, Oryza sativa
  unsure (1)..(357): unsure at all n locations
  Clone ID: PAT_MRT4530_56713C.1
cgtcgaacaccttgtgggcgtgctgcatcttcctctctactccgccaccgcgacatcgagcatcaccatcccgccgtctctcggtgtttgataattcatggtataggaattcatccggaagcaccttgacaataagcccatcgtcgaactgctatagtgtgcaactgcagtgcttatatttatcttttcttagggcaaaagataatctctgacattgaagtactatgttgcattcttactttactgtaatttaaaccatgctaatttatatcataacaaaatttgaaccagacaataagtcattgagctnctcagtatctaatcggtttnggcaccaaactgagaagtctgaagtag

SEQ ID NO: 54628 - DNA, 488 bp, Oryza sativa
  Clone ID: PAT_MRT4530_56714C.1
ggaagaaaggaatacattacatttataatagaaaaacacagaccggggcattggcaaacaaatcaaaaattatgaaaccggaaggagtatatgtttatcatgcaatgacatttcagttcttaggtttgcctaatgaaatgaatatacaaccgggctcacggattaaaaaataaattaattaagaaaatggtaggcacaattataccggttaggcctgaagtttttaaatcccaaagtaggggttatttgtgccatcgcccagcagtcggcatgtactaatcattttccatcatctaaaatagtaacaattctgcattttcttctaagcaaagctgttgccaaaacttttgcatttttcttaacttgttgaatctatgctttatattcaggggttgcaacttgcttcagagttatcaccaaggaagcaatatataccatggggaccttccgtcctggataattgttttgaatggaaaacaacaaaattt

SEQ ID NO: 54629 - DNA, 567 bp, Oryza sativa
  Clone ID: PAT_MRT4530_56715C.1
gaggacctcttaggggctagatttggagttttccttgaggtcatcactaccgtgttctccacccaccttggcggcatcggtgaggtcaaagcgccaggagtggcactggaaaggctcacgcggcttcgccgggagacgacaatctttgatgtgtccaaggataccattgatacaaccgtcgctcacatcaagatcaagatgtccaagaataagttctcatcaattcaccgaaagatcgggccaacaacagccttgagtgtcttgagtggagctcagggtttatcaatcttcaaggaggacgtagtcgcgctgaacgtggtagacaaattcgttgctggcaccttagggcggaactccagtccccactgcgcggaggcgttgctagcggcaacctgcgccgagctgctcgtttgcctctcatggcggaagaaggccgtgcgccctgtagcgcccctgccgcctgccggccagccgcaccccgtggcgaaagaggcatcgatggcggaagaggtcggccagcccttgatgaaagcgatggagcgggggaacaatgacgatgggagatga

SEQ ID NO: 54630 - DNA, 290 bp, Oryza sativa
  Clone ID: PAT_MRT4530_56716C.1
gctgtgcggggtggcgcgttgggcgtggaggacgctcgtcggagccagtgcccgccgttgtccccgtcgccgtcgccccaccgccgcggtgtcgaggcgacgactaggagctcggtgataggtgcggtgtataagaggagagtggtagctattactgttgtcttttgtacttaaagctattattatttttttttttaatttttttatttctattattttttttttttttttttatttatatttatttttttttatttttattttttttttttttttatattttttttttt

SEQ ID NO: 54631 - DNA, 219 bp, Oryza sativa
  Clone ID: PAT_MRT4530_56717C.1
acctttgagatcggccacctccttcttcagtgccgccatatcaacccggaattcgttgagctcctccgtacctagggagttgagttaggatggggcagggatggtggcggaggtgtccagctagctcggatggccggcgagcttggccgcgcatggaggacagatgcagaggaggcgcctcaaggggaggggatcgggagaaacggctcgcaggcatag

SEQ ID NO: 54632 - DNA, 2062 bp, Oryza sativa
  Clone ID: PAT_MRT4530_56718C.1
ccccgctgcgggggctcggcgcgatgctgcccaccctccatttatactcctcttctcctctccatcgccgcattgctcgccaccccgacgacgacgacgacgacggcgacggcggaggagtagagacagagagatggccgccgcgtcctccttcaccgccgccgccaagttcttggcgccggtgtccgcgagatccgccggggactacaagccgccgctcccgctcccggcctccgcctccctcaggcccgggaggaagcccgcgccccgcctccgcaccgcgctcgccgtctcctccgacgtgctccccgggaacaaggccgcccccgccgccgccgcccactccgctgtcacgcgggaagaggctttggagctgtacgaggacatggttcttggccgtattttcgaggatatgtgcgcgcaaatgtactaccgtggcaagatgtttggttttgtccatttatacaatgggcaagaagctgtctccactggcttcatcaagctgctcaaccaagctgactgtgttgtcagcacataccgtgaccacgtccatgccctatccaagggtgtccctgcacgttctgtcatggctgagcttttcggtaaggccactggctgctgccgtggacaaggtggttctatgcacatgttctctgaaccccacaacctccttggaggttttgccttcatcggagagggcatccctgttgctactggtgctgcctttgctgctaaataccgccatgaggtgctcaagcagtctagccctgatggacttgatgtaaccctggcattctttggtgatggtacctgtaacaatggccaattctttgagtgcctgaacatggctcagctttggaagcttcctattgtgtttgttgtggagaacaacctatgggcaattgggatgtcgcatcttagggctacttcagacccagagatttataagaagggtccagcgtttggaatgcccggcgtgcatgttgatgggatggatgtcctgaaggtcagggaggtggctaaggaggccattgagagggcaaggagaggtgaaggaccgactcttgtggagtgtgagacttaccggttcagaggacattctcttgctgatccagatgagctcaggaggcctgatgagaaatctcattacgccgcaagggaccccattacagccttgaagaagtacatcatcgaacagaaccttgcaactgaatccgagctgaagagcatcgagaaaaagatcgatgatgttgttgaagaggccgtggagttcgctgacgcaagcccgctccctccccggagccagcttctggaaaacgtgttctcagatcccaagggctttggaattggccctgacgggaagtaccggtgtgaggatcccttgttcacgcaaggcacggcccaagtctgagaggctcaacgagcacgcttatcagttattatgtcatgctttttcttgtctctctctagctctaccctatcctagtttttgtcgaacccatcgtcgtgttaagcgtaatgtaagcacaacctacttcttcatttgtttcattcttagacctcccatatcaatatgctcaactgctgccccagtttttgctcagtgtgttcgatttgctcttcagtagttctattggtttcagaacagctgggcctgtaatcactcactcctatgtctggacatgcaaagatacttctggtttagagtttcagctgagttacagtgattagtttcctgcctgttatactatatttataaacatcatgatggaatgtgagacaatatctgctgtccttgttttacatttggctgccgtgcgccgccgctgttaggaggccgcgccgccgtgagccgtcgctcggccgggccggcctgagctgtgccgtgctcagccgcgccaccccgtggccgcccgtcggttcccgtggaccggtggtggaccgcctcggtggtcccggtccacggtggaccggcgcccttgtgccgctgaccggcaagggtgggcgtgatggagtttggatgggccctgcgacggcctatgcggcttccggattcacctag

SEQ ID NO: 54633 - DNA, 782 bp, Oryza sativa
  Clone ID: PAT_MRT4530_56719C.1
actcctatgggcgattgggaccctcgaggccggccgggaccacaactcatcgcctcgcttcttcttcccactagccaaaagcacaaaccaccgagaaaacgcttctcagataaacatcatcaccatggcggcgtctcttgcctgcgctttcttcttcgacgccgagccggtgggcgagcagggcaggcacgcgctggacgcctgcgcgctctgcaccaagcagctcacgagggacagcgacatcttcatgtacaagggggacacgcccttctgcagcgaggagtgccgctacgagcagatgcagctcgacgcggtgtacgcgaggtcggccggacggaggcagcagcagcagtactccgggagggcggattcgcggcgcgggcaccgggagaccaggaaggtgtccgtggcgagctaatcaagctgcgtcgataatataatgatcagctgagaagaattggcgttgaatccagacgagatttcaagagctaagccacgcatcaacatgcggcgacgaaggagattgatttctccaaggccgcgatgcccgacggcgccggagaagagtctgaggaagttcatcggcaagatgagatctttgccatgtgggtcgctcgggtcgaccttgtcttggctctcagattggcgcccttttgcgggtcgtgtcgcgtttgtgcgccagcgtgcgcgttagagcctgagtgtatcatcactttgtaaatccaaagcagttgggaaggctttaaagtttccaagttcctacaatgcaatttttttagcag

SEQ ID NO: 54634 - DNA, 104 bp, Oryza sativa
  Clone ID: PAT_MRT4530_5671C.1
aacggacacttttactttacgaggtgccacggccggcaaccactgaccactaccatgacgaccgcctacacggtacggctacggctacggctacgactacgcca

SEQ ID NO: 54635 - DNA, 298 bp, Oryza sativa
  Clone ID: PAT_MRT4530_56720C.1
tttgtttaccatctccactactgatctcaggctgttttactaacaagggcgctgtgccacgaggagctgcccctgctgctgtaggagccgccgaggaccctgaccgcgggccgccagtgtcgagggaggaggcgaaagctccgtgtcaagtacacattccaggggatgcacagaaaaggttggaaacgtcagcagcacaaccagagccaccaccactgccacagagacggtagcgactacctaagggtgcgcgagaccaagggggaagaggaatgaaacaacagcaccggagagtgtc

SEQ ID NO: 54636 - DNA, 4509 bp, Oryza sativa
  Clone ID: PAT_MRT4530_56721C.1
ttttttttttttttttttttttttttttttttttttacccagtgtaaatattcagcctggtatatactccatttgacttaccggctgccctttacataaccactcataccaggcaacgggatgtgaaaacagtttgtgttcagggaaaaaaaaaagacaaacatagcctctttcaagaacccctcaaaatcgggtagtttcacttatatttgtaaaatgtttgatcaaccgcatttcgaacaaattacaataaaacaaaaccgtatcaaaattgaaaaactccctgggcagcttgaacatcggtgtgtcagaatagaacttctcaacccggcaaatccaagtctgagtaacgtgaaaattttatggatgctaccccagtagcccagatgccaccattaacttttcatttttgccgattggtggacaggcttgaggggcttccgcaagcttaacgattttatggtatcttcaagatgctcttcaacttaacaacaagtttccagtcatccattgacaaatcgtctctatagttttctttgagaagatcaatagatcgccttgtgatgcgactaacaagttcatcttccatgtcaaaatgcctaccaaaactcttctgctgctcatcaggattgctcccaataatctttatagccaccttctgcccttttgtggccatgtcaacttgcttatgattaatttcaatagatgcaatcttcccaatatcaatatattctttagtgggtatgcatagaggtgtgcccaccttggctattccttcaaggacatcaacacctaaaacaattggatccttcttgttaaaaacacaatttggcataatcttgagaacacaggggaaaacagcttcttcagcgctttctttcttcttttcttccctcagattcttaatgtatgcagtaaattgatcaaaaaggtggtatattatatctgctacaaagatcctcacaccagactcttctgcaagatcacgggcatcaggcatcactttgacatcaaacgccaagatagtagcatattctttcttcctctcaagcataacactggccttcataacatctttcttgtggactggccctatactgaaatcacagaagggaatattcacagcagggctcttcaagaactcagtgagagcttccaatgacccaagggtagatgcctgtacatagacaccttcgccactcttatcaatccgatttctaaccctagtcatctcttccatcacagcatcttttagtctgtccagatcatcatcaggctttaacacataaagagcagtccctgcaattgcatgttcaagaccctgtgctgatattttaactccttgtgcagctctaatcttcttatgatgttggtatgtgcccttaactcgaagctccctcattgggtgtggtgtcaacaaagctctaactgttgtcacaatgggtccctgcatcccacacacaactatttgatctccttcatggagtataccgttgaccaacacaacatcaactgtagtaccatgaccttcaacaaccttgacttccagcacggtacactggacttcatcaacgaaagtaagtctttcttccatcgtcttttgtgcccattgcaccaacagaagaagcagatcaggaatgccttcaccacttattgcactggtaggcactatgttatatgtatcttccatctccttgttcttgtagtacaaagcagtattcacaccttgcatcttgaattgtgtcacaatatcagtaagcctcatattgaactccctcttaacatcttcattttgctgcctcaaagccttcccaataggggcatttgtacactttttccagccataaagacgatcaaccttatttaaggcaacgataaaaactgcatcacggctcttcaagagattcagggattcaattgtttgaggttcaagaccgtgcataatgtcaacaaccaaaatagcaatgtcacacaaacttgaacctctagaacgcagattactgaacgactcgtgaccaggagtgtcaataacaagcaatcctggaaccttaagtgtggcatcagctttaagctcttttgttctctctctaatattttcagttgggaagtacgtagccccaatctgttgggtaatacctccagcttctccttcttgtacattggtccgtctaatacagtctagcagttttgtcttaccagtatcgacatgaccaaggatgcaacaaattggtgaacgaaggtcactgccattcttagtctcatcctctttaataggtcctttctttgaagcgcctctattcctcctagcatttgcactactggattcgccatcttccgtttcacctttattggagtttgcaaccttttttacagtagccactgtagattgtgctttagaattttcctgcttctgaacaggttcagcaaccttcttggcgacagggtttgcctcttcctcctcaaaggcacttgtcttaggcaaattgacatctatatcatcccagctctttgcatcccattcatcttcatcttcctcctcttctggtttcaattcttcgacatcctgatcaggttcggttttctcagattcctccacttgcaactgagattcctgatccactaacacatattcttcctcgtcattgatagtttcgttaacttcttgtggttgttcttcaactacctttgcagtctccagagtcttctgttgaccttttttcttcttggaatcatatataggcctcttctttgtctcagggacagcaccatcggctacttgaagttcactctgctcaaggaattgtctcctcattgcttctaacctctttgcttcctccttctgcttcccagtcaagagcttaccctcctgcttcttcttcagcaacttctccttttctctctccttcttcctcctctttgcttcctcagctttcctctcctcctcctctttcttcaatcgctcctcctcctctttcctcaatcgttcttcctcctcacgcttcttccgttcctcagcttcctgcctcctggcaagtgcctcctgcatctcccgcacgtgcttcgggagcttcttcatgtcaaccttccctttaggagcttctacagccttttcctcttctttcttagcatctgcctccttagctgctgccttcttctccttctccttttccttcttcttcttcttcttcttggctgcagcagattccacctctccttccccagccttaccatcctctgcggtttcagtatcttccttcaccattgccgcagcaggtggcgcctggggcagaacctccttctccttttctgctggcgttgggccctcaccaagctcagcgagaagcttatccaaatcctcctcttcctgagctgtccttccactcttcttttttttcttcttcgatttcttgccttccgcatcatccacactggttgaggcggccacattacccacatctttcaccgcctcaggctcaggctcaggatcgtcgacaggaggtggctggtcctcaaactctgcgaggatcttgtctacgtcctcatcatcgacggtaaagcctcccttctttttcttcttctttgatttctttcctaaggcatcatctgcatcaggggcaggcacctcttccaccggctcagcctcttcggtgggaggagaagtatcgtcgatctcggcgaggagcttgtcaatgtcctcattgtccacagtaaagccgcccttctttttcttcttcttctgaggctttttggaagctgcagctgcagcagcctcgtcgtcgtctgcctcatcagcagcggcggctgggggcggcggggcaggcttatctaggtcgaggtcgtcgtgttccagagggactgggcgagctcccttgtccttcttctttttcttcttcttggctttgctgaagtcgaaatcgaggtcgtcgtcctcggcgtctgatttggcggcggcatcgggctcgacgggggcgggggcaggggcgggggcctcgtcgtcgtcttctccctggtcctcgtcggccgcgagggcgtcgaaggcgctgaaggagctcacggcgccgccgccgcccttcttcttcttcttcttaccggtcaagacgaggttgatgggctcctcgtcgtcgtcgtcgtccccgggcgggggcgggggcgcggggggctcgtagtcgtcgtcgtcgggcagggcggccttggcgcccttcttgcccttcttgccgccgcccttcttgatgggcttgtccttgtcggcggcgggggcgggggcggcgtcctcctgcgggaaggagtactcatcgtcatcgatggcgacgttcttcttgcgacccatcggcggcgagcggggggatcggcggggttgggggttggggggggtgtagggtttggagagtcggcgtgtgtgtgttagggtttgggggcggagatggagatggagatcgaggttcctttcctttgctcctttgctaatgctactcagcaatcggaaggagacgggaaacccacccaaccccc

SEQ ID NO: 54637 - DNA, 592 bp, Oryza sativa
  Clone ID: PAT_MRT4530_56722C.1
atatatatatgtactaactgcatgatacaacacaggtacacaaatacacgtgccagaaaatagcatcaaaaacagacaataatactgatgttatatagcattcacccaaatttacaagcaactacacaggtacacaactgacatagaaaactagcagccaacttgggcctgtctagcttgatcactgaacattacaacatgtcaaacctaacagcaagagcatccagccttggatgcaataccagattcctatattatacatatttagcatggatagaacaaggttacgacttctatgctacgattgtcgcaccagctgatgttgagtatctcagatgatcagataagcgttgaattagatggatggtgagcatggggagaattgaggactagagatatccacagttatagctgcccggggtctacaccactgcaaagcaaagctcgtgttacatcttgcacctgcaagctggagatggagatgtgatgggacatgagcttcttcttccaaagacatgtcaacacatgcagaagatacaaccaatactctgttcttccatccaaggtaaaggacaccatctcgctctcgtcc

SEQ ID NO: 54638 - DNA, 184 bp, Oryza sativa
  Clone ID: PAT_MRT4530_56723C.1
acccccggacccacccacccggccgaattttttctagcgcccgacaaaggagaaacaccggggggggctttattaaaatcgcggggggcgacaaaaaccgacaaggtgcaagaggacgccgggcacaaaacaagggaggaggacaacaacaagccccccacaaacagagagcgccaatcaaggg

SEQ ID NO: 54639 - DNA, 440 bp, Oryza sativa
  Clone ID: PAT_MRT4530_56724C.1
ccggccgggatcctgtctatttcttcctttcttcgtgcaggctgaaacctactcctctgcttctctgtatatccttctctatccttgctgctccttgtctcttcgctgcgatgctactggccgtcttgctcactcctgaatgtatgagagctcatgcttgactggaattgatctggattcaatcgcatctttcgttatcttgacagatgcttaacccatggtgcgacgttgtaatgtggaaaagcggcagagtgcggacccccttcttcatgtttctggtgctcctcctggctgcctggcgcccactgcatgagatcggatgaccaccggattcgatgatcccgaaacagatcacagctctgacttctaccttagtcttggcgagagtattgtggataatgccatcactgtctatatgagacaacttccatagctctcta

SEQ ID NO: 54640 - DNA, 225 bp, Oryza sativa
  Clone ID: PAT_MRT4530_56725C.1
atgggatgtgcaatcctgtttgcccaccgcctccgcctccgccgatccccatccaaccgcgacagcgagcgagcaccgagcaggttgccgtcgttcgtcctgctccatccgcccgcatccatcctggtgagcacatcctctgccaccgccgcctacgccgatccctgtaacaccccgctcgccggcgtaagagatttggccgccgcgagccgccacccgccggat

SEQ ID NO: 54641 - DNA, 222 bp, Oryza sativa
  Clone ID: PAT_MRT4530_56726C.1
gcggtgaccagaactccaacgactgatctgagatgtgatcgtcatgacttctgcatccgaactaatatgccaatatgacaacatgtgcataccgcggactttagacttagatgatcataagcattcaccaaacgtgacgctatgctttggatcaatatttgcccaaactacctcttggttgtgagcgatttttgttgatcaattcttgactggttaagcgaa

SEQ ID NO: 54642 - DNA, 273 bp, Oryza sativa
  Clone ID: PAT_MRT4530_56727C.1
tttgacgcgtgggcgcactcacgttctccatgaaccacgagccaactttggtgaggggacgcctgggtgtaaccatccattcaagaacgcacgaacgttccgccgcctgggtgctcgacctgatgaactccacgggcacggaccgtttgtcgtggttgttctcggcgagctctttgccgtccttgcaggggggggtcttggtcggctcctggtcgtcgattatgtcggacgtctacttctgcgccgccagtgtggtgaccatggtgcacgaca

SEQ ID NO: 54643 - DNA, 982 bp, Oryza sativa
  Clone ID: PAT_MRT4530_56728C.1
ttttttttttttttttttttttttttttttttttttttttttttttttgataatactaaataggcagtttggcctcctttcaagtttgagtttccatcttttggtatcacaaggttgtgcttttcatcgtaggatgatcaaacaggctttaatttgccgaccatgcggcacaatgagaagtcaatttgttgtcaataatataggggatggatatcttcacccctaaaaaagtgtagtttcttctctaagatacagaaacttgccatggatttcctagaagcatataacagcacgtttgaaaagaaggcaaaatttaaaactctttgatgcttttcccccactgcagtggatcgatcatctcgtatgtttctccatctagtagacactgttcaagtagaagaacaagccggccaatgcaagtatcccgacggcgataccgataggcaacgcttgcccgacggcttcgtcctttttcagctgctccttcctagccttgcgggcatcggtggcgttggcgttcttggccaccttaggctcgtacggcttgaaccttctctttggtgctccacaaacggggcagaagtacttgtcgggaagcttgtcgaagggggtcctgtcgctgtagatgtacccgcagtcgcggcagatgtaggcctgcttggacgcgacgccgaagcgcatcgtgatcctcgccgacgccgtcgacgccctggcgccgcgccgcggcggcgccggcgccggcagcgacagcggcgtgcagaacgatgacgaccggagcggcgccgcggcggcggcgggcgcgcgcagcgcctgcagctgcagggcggccatcaccaccgctcaccgcagcacaagaaacaggcgcgtggcgagctcgagatccgaggagagaagaagagaaggtaggaaagcaatgtggggggactggaggaagaagaagcggtggaagagaggggaggataaaaaggagcggaaaatgatg

SEQ ID NO: 54644 - DNA, 509 bp, Oryza sativa
  Clone ID: PAT_MRT4530_56729C.1
cttttctattaaggactggtatgatatcaaggccccgtcggtgttcaatgtgcggaacatcggcaagaccctcgtgtccaggacacagggtacaaaggtatgagcaccgcttccttgttcttggccgttgtataattctctgttgtgtttgcgctaagtgtttgctgcctaacccttcctgtgaacgaagggatctatacgaccttgacattgtcaactcgccatgtgatggattttgcaaattttgtaactttgctatgtgtgtgtgtgcactgcgtatggtaggattgatctatatgctgtactaagggctaagatagcatgggaaatatatgatgtattattagcatgttagttccatttttgttcctgatgagaggttacagatgctggtttggatgagcttagttattccgaatagatttgtcttctggtttagcttgtctagttgtacctcccaattgtttatttcatcaaacgtcaaacagcgtggttcaattgttgagagc

SEQ ID NO: 54645 - DNA, 438 bp, Oryza sativa
  Clone ID: PAT_MRT4530_5672C.1
atggacgcgccgccgccgccgccactccactccatcgacgacgccgacagcggaagccacctcacaggcgtcgactcggcgaccatcgtgctgtcggggcgcgcagcgaggaagccgaggcagccaaggaggaggcggcagagtgggccgcggctgcgccgccgcctccggccggcggcgtcggcgtccctagctgaggacgcgcgcgacgagtgtctgggaggacggtgtcgtcctcttcatggtctccaagccacgctgctcgccctcgccctcgccctcgcatggctgaggggcttccagctccgctcgtcacggatcggcgccgcgaacccaccgaccaccacctcaccgagcctgacggcggcggcggcttccacgcacaggaacagggaagttggcaccgtggacggggagtggatggaaaatgtgatgaag

SEQ ID NO: 54646 - DNA, 234 bp, Oryza sativa
  Clone ID: PAT_MRT4530_56730C.1
ctatggctgaagctctgagtttgtcgaagatgtcatcaactggaagagcagcaggttcttcttgtagcgggttgtgccggctatcgtcttcttctccagcaatacatccacaagaacgttgacctcctttgtcatcggaggtggatttccaactatcgaggccccatttgggtttgcttcatagcgtccttctgcatctgcttgtggtcttggaatcaccgtcactatcgccat

SEQ ID NO: 54647 - DNA, 502 bp, Oryza sativa
  Clone ID: PAT_MRT4530_56731C.1
gcacgagggcatcctcttgtcttggtgccaagccatggattctggtcttctatggctgaagctctgagtttgccaagccatggattctggtcttctatggctgaagctctgagtttgtcgaagatgtcatcaactggaagagcagcaggttcttcttgtagcgggttgtgccggctatcgtcttcttctccagcgatacatccacaagaacgttgacctcctttgtcatcggaggtggatctttagagagcggttgagaaatcaaagcatcgtcaaagaaatctcaacttccaactatcgaggccccatttgggtttgcttcatagcgtccttctgcatctgcttgtggtcttggaatcaccgtcactatcgccatagttgtcctcgttcaggtggagaagcatcgaagtacctgattgccttttctatttcttttcaattccttctttgcaaatttcaggagtctaaggttatttggccatctgttaggggtctttctata

SEQ ID NO: 54648 - DNA, 226 bp, Oryza sativa
  Clone ID: PAT_MRT4530_56732C.1
ggcggttgcgagcgggtcatcggccaggcgcagcgccgtagcccctcccaccggcgagtaggaggctgcccgataggcggcgacggggatagttctaggctatggggagagggctcggcggatcatgagatggcgccgtagcaccgcccggcaaccttgtgggggtgacttgccgccgacgaccgtccagtgccctgcccgcccatcggccgtcgcgccgtgccgc

SEQ ID NO: 54649 - DNA, 1247 bp, Oryza sativa
  Clone ID: PAT_MRT4530_56733C.1
atggcgtcgctcgccgtccccctccgcgcttccgccaccccggccatcgccggcaccggcagacgacccccgccgccgcacaacgccgctcgccgtctcctccgcccccgcctccattccgccgccttccttagaggaagccaagtttccagcgccgccgcacctgcatggcgtcgctcgccgtccccctccgcgcttccgccaccccggccatcgccggcaccggcagcggcggcggatcacgcgccgccgaccccgtcaaggtgtcgtgcgttaggagcaaggttacctgcggttttccttccgttggggcttcgtcttcacttgctagcagcgttgagccggtgagagcaactgctacacaagcaccccttgccacccatcaatcttctagcacggagaagacaaaggttggcatcaatggatttggacggattgggaggttggttctacgaattgcaactaatagagatgacattgaagttgtggctgttaatgatccttttatcgatgctaagtacatggcttatatgttcaagtatgattcgacacatggtccatttaaaggcaccataaaggttgtggatgagtcaaccttggagattaatgggaagaaaatttcagttacaagcaaaagagatccctcagatattccttggggaaactttggagctgaatatgttgttgaatcatctggtcttgcgccccttgccaagattgtccacgaggaatttggcatagctgagggcctcatgacaactgtccatgctacaacagccacccaaaagactgtcgacggtccttcaatgaaagattggaggggaggacggggtgctagtcagaacatcatccctagttctactggcgcagcaaaggctgttggaaaggtccttccagcattaaacgggaaactcactggtatggccttccgagttcctacacctaacgtctctgtagttgacttgacatgccgtcttgagaaaagtgcttcttatgaggatgtgaaagcagctatcaaggaagcctcagaaggttctttgaaaggtattttaggctacacagatgaggacgtcgtttcgaatgatttcattggtgacaccaggtctagcatatttgatgccaaggctggaattggcttaagttcttctttcatgaagctcgtctcttggtacgacaacgagtggggctacagcaaccgggtcttggatttgatcgggcacatggctctcgtcaacgctaagccctga

SEQ ID NO: 54650 - DNA, 243 bp, Oryza sativa
  Clone ID: PAT_MRT4530_56734C.1
atggccaccggggcggctagggcacgactgcaccggcgtggaggcgaccggtggccggcgctgcaggggctcgggcctgttttggtggctcccgtcaacgacggagtgctggggaacgagactagattggatgaagattggaagggagcgcacaggcctacacggatgttgtgcgtgaagctccacaaggagatctatgccgctgccctccccggcggctgcaacgacaacaccaacagctga

SEQ ID NO: 54651 - DNA, 551 bp, Oryza sativa
  Clone ID: PAT_MRT4530_56735C.1
gtggatccccgggctgaggaattcggcacgaggggattatggtcaggtgacggcgactcctccaaagccaacctgaagccagcaacgaggatcttctactctctagccctggctcagggtactctctacatgctatggttcattctcaacgcagggaatgcgatgatggttagggttgtggccagtaaatgcgattttgagaagagttggggtcggaagtcggttgatcagtacctcggtgataccaagttcaagtgcctcaaggacccatcatccatcaaggacatgaacctaatcaagtttgcagcaggtctacttgactcggactccgaggatgactacattacgggagcaaggatgcttgtttccttcattcagaagcaaaagctaccggtgaagttgctgatccgctcctctaggatcaggacacagaagctgatcacaatgctggggtggacagatccagctgaccgggagatcaggatgcttgctgcgataatcgtggggcatgttgctagcaacatcaaactttcacagttcccaggagcact

SEQ ID NO: 54652 - DNA, 1371 bp, Oryza sativa
  Clone ID: PAT_MRT4530_56736C.1
ctccaggaggccgaggggatggggtctcttcttctttctccccctcctcctcctccttctcctctcctgctcctgcgatcctctcccacgcgcttccctgctgctcagttaaaactgcaggcaaacaaactgcccacgatgacctgaatccagaacaggcaactaatccaacgatgccaatcacagtcccatctacaaacccagcaccaattatcatcactgttccttccacaaaccctaccatcacaattccttccttgaatcctctccctacacccattactgccccctcaatggtgaatccttccacctcacctgcacctgcggcatacccgctaccgacgccttcaacctctcctccttctgcatcattaaccaacccaacatcaaacccaatgacgcctgctatcagcatgccacctcctgctctcaccacaactccacccactgccccaggtctttctgggcagcaactatggtgtgtggccaaggctgactcagcagatattgcacttcagaatgcactggactacgcatgcggcattggaggagcagattgcttagcaatacaaccatcaggcacttgttattatccaaataccttaggtgcgcatgcatcctatgcttttaacagctattaccagaggagccctgcaacctccagctgcgattttggggggacggcaattcttgtcaatgtcaatcccagctcaggaaagctgtgttttggcatcgtcaatgtcgttaccatcaagctccgtgtctgggtacaatcctgcattgacaactcctacggcatcatccactattactcctactacgttatctggttcaggtccatcagtgctgaacccggatggctcaggctccgccagtagttctgagtttggttcagacattccagccacgagcaattcttggcgttcaatctcccccaatggctggtccttggcagcttcgttttcaatgcttgcatgggcatacatgatgaaaggaacaattttggaaacagagtgattaaaacgatgtaaagagctagggaattcactcggccaagttgtatggcgcgcaggttgggccggaactaggaaatacttcctccatttcatattataagactttctaacattgtccacattctaatgaattttgatatatatgtgtgtcttcatataaaaaattatataaaaaaagacagatggtataaagtcttgtaacctgaaccggtgagagggtgatagtagtttctaaactaggcttgatagatgcccggtcactagctgttgtagtgcgtgcgagggccgaggggacccttcttccttgagtgaccgaagaaagaaagagagaaaaaaaatgcctctttttgacttt

SEQ ID NO: 54653 - DNA, 1119 bp, Oryza sativa
  Clone ID: PAT_MRT4530_56737C.1
atgttatcctctctcctccccttcttcctcctccgtccctccctcttatctctctttctctttctctcctctttctcttccccttcggccggcggcgggtggcgacaactggagcggtggtggtgggctttagtgacgacggcgggcgggagcaatgttggggggctggagcgacgtcggcgagtgggagctgctattgacctcaacgtgttgcttcgtcttggctcgtccgcgtccgttattgcacgaatggacaatagcgccccaagaagctcgtattgcagtgttgcttcatctcgtgtaaagccgagacgaagcaacactgcaacaggagcttcttggggtgctattatccattcctgcaatagcggatgccgacgagctgagacgaagcaacaacacgttaagattcatgtggcaaccatagaaatgacaactgcaatctgcattcttagatttctactgttgagtttgaactgtgaaggcaaaaactataaatcaaacaacatatacagagagaacattgactttttattgagaacattacctctgaaagtatcagctagtgatactctgtttgccaaggtcatcaccaactcaactaaagagcaggtgtatacacagtgtcgtggcgacactgatattagtacctgtgggacaagagcaacaatatggtgtaacttgcgttatgagggatatcctttcttcacgggccctccaatgttggaccaactcatctatcaagctacagtcaagcctaaaggaacaaatcataagaaccatacaactattctaatagtggctatagtggtgccgagcgttgtggtaatcatagtagtcctagcaccactatttcttttgaggaagaaacatgtactgaagaaacgaacaaagctctcgagtgtagaactatctgggagcaaaaatattgaaggctttgttgattctagaggtgaaaaagatgcagaactaactgagagcaaggaaattgaaggctttggtgattctggagatgaaaatgatgcagaactaactaggagcaaacagattggagactttggtgattctggaggtgaaaaagacgcagatccaactaggagtaaagagagaaggtcctag

SEQ ID NO: 54654 - DNA, 1480 bp, Oryza sativa
  Clone ID: PAT_MRT4530_56738C.1
cagcttaaagccacgcacccaccaccaacccagtacgaacatacaccatccttctcccctcttctcttctcttcacgcctccctcctctcctcttccctctccggcgacctcctcctccggcgtccagctcggccgcagcggcggcggcgacgacgaagccggccacaccgccgccattctcatggcagacaagatctccacggttgtgctcaacgttgacctcgaatgcgatcgatgctacaagaagatcagaagagtcctttgcaggatccaagataaggcgaacatcaagacgatctcgtacgacgagaagaacaatgcggtgatggtgtcggggccgttcgacgccgacaaggtgtgcaagaagctgtgctgcaaggccggcaggatcatcaaggacatgcaggtcaagggcaaggagaacaagggcggcaaggacgccgccggcgacaaggcgaagccggcggagaaggacggcggcggcgggaaggcggagaagaaggacgccgccggcggtgacaaggcggagaagaaggacggtggtggcaagccggagaaggaggcggcgaaggcggacaaggccgccgccgctgccgcgaagccggagaagaaggtcaagttcgacgtcgacgacgcgccgccgccggccgcggcgacggcgaagcccggcaaggtgcagcccttcccggccggcatgacacaggccgacctcgccccgctcctcgagaagctcaagatcgccaagcagcagcagcagcagcagcagcaggccggccccgaacccccgcgcggcgagccgatcgcgccgccgatgatgatgccggcggcgcagggcgtcgccgtgccgtccatctggccggcgcccgccggctccctctcgtgctacagctacaacccagcagcctacgaccagtcgtcatattacggcggcggcggctacggctacggcggcggcgcgttccaggcgcccgccgggtactacggcgtggcaccgccgccggcggcgccctacgaccaccagggatggtactacggcaaccggcagccgtactaccaccagcagcaatgctacgaggaccccaacgccggcgggtgcagcgtcatgtgatggccatctcgccatcgccatcgccatggacgacgggagcaatcagtgcgtgtgatcactctcgctcacactcactcatcactagctcatggccagtggtaaaaaaaaagaagaagaaaatatttcttttttttttgggtgtcgccttcttcttgtttattatgcctgtgcctttttttgtttatttagggtgttgagttgtgcatgtgaacagttgagttgtgatgttcttggtgtctagttggatcttcttccctttatgactatctgataaatgacaatgagaaccataatatactagtagtaagcagtacaaaaaaaaaaaaaaaaaaaaaaaaaaaaaaaaaaaaaactcgagactagttctctcc

SEQ ID NO: 54655 - DNA, 165 bp, Oryza sativa
  unsure (1)..(165): unsure at all n locations
  Clone ID: PAT_MRT4530_56739C.1
cgaaaaaagttaaatatccagtaacggaaaccctaatccccaaatcacaaatcgaattccgattcgntatttaatgtggtgtggtnntcttctncaattcgaatgtcctccnttcgctccggncccnccccattcgatcgtgntcgtnaaccnacngtggtttcc

SEQ ID NO: 54656 - DNA, 468 bp, Oryza sativa
  Clone ID: PAT_MRT4530_5673C.1
gaataagatgagcgccgggcaacatcttatattgctttatgatcacttacatctgatcgggcatgagaattctacaatcctagtcagaattgctgaagtttctactgatcaatatgtctaccagttgctataataacatcgcatcccttgttgtgcacatcattatgatgctgctgagcgaatgattttgcgtgctctgatacctttgtttatgcagttgcctccagtaatatgttttaaccttgacgtccatccgaacgatttggaatttatacatcactttcagctgatattcggacgttatttaataacccatcactctctttgaatagaatcccacaactgccactgatttgtggtgattcaattgatcttgaatacatggttggttcgactgggcgatctgatcatcctgtgtgtgcgaaccttatgtactttgatgcaaacattgtggggataacagttaca

SEQ ID NO: 54657 - DNA, 714 bp, Oryza sativa
  Clone ID: PAT_MRT4530_56740C.1
gcacgagggcagttgcctctggaagaccgaagcgaacccggctcctcacatgccgcacacctcgccacgaaacgccggaaaccccctccgccgccgccgcctcctcctcctcctaccagatggcggcggcctcgccggagagcaggcctcctcgctcgctcttcgacctccccgcggacttcttcgattcttcttccctcctcggatcccacccttcctcggccccctctgcggcggaaccgtccgagtccatccggccggcggcggccccgcctctatcgcagccgtcggaggctccggggttgaggtggacatgcaacacctgcgcctctgaattcgagtcgctgcaggaacagcgcgagcacttcaagtctgatctccatcgcctcaacgtcaagctgagcattgctggtaaaactattatcaaggaagatgacttagacaaagcagatcccgattctctgttcgatgatttggaggtatctagtgtatctggatcagaggatgaacttgaaaatgggcctgcatcagatcgtggtctctcagccaaagacaagggagaattcaggaagaaactttattttcgctgtcattctggtgacacagtttctatctggagatgcatactgttgaaagaacatgaagagccagttttcaatagcaagtctggtcagacagaaagtcatggatctacaccatttgtacaagaggatg

SEQ ID NO: 54658 - DNA, 615 bp, Oryza sativa
  Clone ID: PAT_MRT4530_56741C.1
atgggctctcgatcaccgcgcgacgacggacgccgcgaggtggcgagggccgcgggagtagcagccgctctcatcgccgcctcgctgttctgcctcttcatcgctttggtcctccagtcgacgtcgacgtccggcggtggcggtgacggcggtggtgtccgggaagaatgcggccgcgccgcgtactcggcggccgtcaccgtgctcagcgggctgcacccctcgaacgacctgctgcatatcgggacgctcttcccggtgttcaacctcaccgtccacgtcgaggtgccccccggcgggaaggccggcggcgtgtgcctcggcgggcactcggtggcggccgtcgtgtcgtacggcggcgcgttcctcggcgagggctcggtggggcgcgtctgcgtggagccgcagcagcaggagggcgacgtcgcggcgacggcgtggggcagggacgtgtggatgccgtgggtcctgaggaggcggctggcccaggagatgaagcgaggcgaggcggagctggaggtcgccgtgccgatgcgtgggggcgatgtgcttgtttgcaaggccaagatcgggggtgacctgtcgccgtgcacgttggaggaggcgtcaaattag

SEQ ID NO: 54659 - DNA, 1500 bp, Oryza sativa
  Clone ID: PAT_MRT4530_56742C.1
ctcatttcatccccttcttccttcccctttcctagctattccacctgcacgcgcgtacgattccgatccagccatggcagtgtagatcgaaagagatcaagtagaagatttggtaagatgcttgagaggtagatagctacctagagaaggctgatcagcatcagcctgagagagatgaaggagaaggaagtgctagttgagattgttgaggatgatgagctgaagagatcgattggtagaaatcagctggacctcaacgaggaagttatggatgtcgagagcgaggagggagaagtcggcgatgatgaagatgacgaagatgaggaggatgacgacgacgacgatgatggtggtagcaccaccgatgttgccggaagcaggagctccagcaacaacagcagcaccaataacgtttcagagagcaaattgaagggcgacaaggatagcggtggcggcaggttggaggggatcaacggcggagagcagagggtgccatcggtgcggcagtacaaccggtcgaagctgcctcggctccggtggacaccggacctccacatggcctttgtccatgccgttgagaggctcggtggccaagagagagcaactcctaagttggtgcttcagatgatgaatgttagggggctcagcattgctcatgtaaaaagccacttgcagatgtatagaagcaagaagttggatcacgagggtcgccagatcagaggagccatcgcctcagtgttctctccaatggatttccatctgatgagaggcgatcgacgcttccacgacatgctcctccagcgagccgccgcgctctcctcctccaggcaggagcacggcggtttcttctcctcgagaagcggcggcggcggcggcggcctaccgccggaggccagccggctgtacggactcctccaacaccggcagtctccggcgatagcgacgatgcaaacattagacttcaagaacagcagtttcaggaaccaagagtggtcgttcagcttcaaccaccagcggaaggagacgatgaatccgtcgtcgtcgtcgtcgaccaccgcggcgatcaggcggtggccttcagccgccggcgcggtcgccgtcgtcgccggcgagcgacaaagactagcggagagattcggctactacaccgggaacggtggcgcgtcgtcgacgtctctgccgctcatcacgagggccgccatggcggcgccgccgccgatgtttgcggcggccgtggcgccgccgggacgtgatcaccatcgtcttccgtttggatggcacgccggcggcggcggcggcggcggcggtaataagaacaggtcgtcgtcggatcccgtggtgatcgatgaagccctagattcccgccgcctcgagcatcagcagaagcatgtagaacaaccaaggatgactccgacgacgacgaccacaccggccggcaagcggccaccggagtggtcaccaccggacctgcagctcaccttgtctccgacgaccgccccc

SEQ ID NO: 54660 - DNA, 302 bp, Oryza sativa
  Clone ID: PAT_MRT4530_56743C.1
atggccagatctgcgtcgccgcctccaccgagtaagaggtggccgggagcagcgccgccctccccacgcaaggtggcagcggatctggtggtggggtatgcaggcggcggcggatctggcggtggtggcacccctccatcgaggggcgggtggccggtcggggcggtctctgccgcgtcgaggggcggttggtcccggtcgacgggcatcccactacagcttgatgggatcaggagctcgcgcgtgttgtcgctcccggtcgcgctctgcctccctcccgcccccctctcggggccttccag

SEQ ID NO: 54661 - DNA, 1072 bp, Oryza sativa
  Clone ID: PAT_MRT4530_56744C.1
tttgcaggtgaccgcagggactacaaggacgaccaatgtgcatggagatgagctgatcatgacaacaaccagagcattcaatcaacaatcatgtcacgtgaaacactgattcgatgcattatgaactctatcatcataatactaggatttgaatcatctagttacattatttttttgatgatacaaatagggatgaattgaatatttcttcctcttaagtcgcatcgccttaccgtcataacgtagatggtgttgtggattcatgatctatcgccctacacgcggtatagactaatttattatgcaatcggccaatatattttatcagatttcgtaattaatattattatttttattttaatttaacatgtaattcaagtctaatttggatttatattatatattagagtggccagtaaagattgatatctgaataattaacccgatgaacgaattattatagtctatgtagttatggattaaatatgttatcattatatatgggatggaaataaacttgatcgatgatttgcattcccatttttactcatattcagataagttataactttatatgctatttttttagtataaaacgtagggtaatatacctgaatatgaattataaaaaaataatatttgattaggagaagattattgatatattgtagtctgatattatagagttgtatggtgatgtatattatgtttatttaagttggtagttgaggtgactatgtccttaattttcgttccgttgtctcggcgcaggcttccggctggaaacatgagaatttataatcaatgccacattatagcgaacagattagtcattactacaaataaactaacatatcctaacaggttcttcttctgttagtatagtagtttacgagtgatgtataaatggtgatagaggattgcgaattgatatgttgtataatgtctttattcttacgtaattatacttgttattattatatgttgtatccttcgtactatgccaccgtgaggagtagattactgataaaaattgattcacctagtcatgatcttatttattatcgtgtat

SEQ ID NO: 54662 - DNA, 373 bp, Oryza sativa
  Clone ID: PAT_MRT4530_56745C.1
ttttttttttttaacataaacattataggcgtattgtgcagccgctagtaaaaaaagcatcataggtgccggttcccaattggctattccaaccggcacctattggtcggcactaatacaagcaaccggcacctataggtttgcacgagccaaaaaaaagagccggctcgaatcgagccgaactaataatcaccttcactgcgccatgccccacatctagttgtttgaaatccccaaatccccacatcacagatcatccacaaatcacatttgaaatccacaaatcaccacatcacagatcatccacaaatcacagatcgaaatatattaaaaaaatcatccataaatgaaaaaatatcttaaaagaatctac

SEQ ID NO: 54663 - DNA, 2730 bp, Oryza sativa
  Clone ID: PAT_MRT4530_56746C.1
tcagaagcacttgtcgccgtcgtcatcccccgccgcggccggcctcgccgccgcggaggggccgccgccgccgcctaccgacgacgacttggaccgccccgacgaggtgccccccgacgccctcgccttcctccgccgctgcttcggcgccgcccccgcggcggcttctccctcgcagttgttctcccccacctccgtctttcgctgccgccgcgaccacccgacgccatcgtagcgactccctttgccatcccccgcgcgcatgggccggtccagctcttgccctcagccgccgcctccaactgggttctccacatcctcgccgctttcggtgtcccgcgccctgatcttgaacctggtccgctgcggcaagtgagcacagcattaagagacatgggagcagccccaatcgctggagaggagcagggcgccggcgataacacagctgggcgcggtgacggagtcgctggcccagccgatgagctcgaagtacttcacctccgtcgggttgccgatctacaacgccggtaccttcacgctcggatcgaaaatttgtgagacgtatcggaggcccttcagaaggcccttcatcttaaccggttccacaggcggctgcccgcccgcggtgctcttcacgacatcgtctagacctattgcatcagtcagtatctgcttgtttctagcctctatgacactagccacaatgaacacagatagaggtatctgctcttcctttttagccgcctgtaagtttttctgttcgaattttccacactgctttaaggcattttcatcttttgtgtttgcttgagatgtactgttatcactctccaacatagaaaagagacctggattgtactccatagaccacatgagctcccaaaggtacattgtgtctacaaaagagaactcccttcggaaaagaaccatcagcatacggaaggcaaataagtattcccctccatcaagattttcttgacaataaccgatgtccttgtcaacccatgaataaactgcaagaatgtcccacaacctggccaagttctcttggctctcataatagactagttgacgatctgtacgattaacatcaagaccaatctggtgcagagttagcttccattgaattacttcctttggtaggggtgtgtcactagcttgttgttctgcatcaactgagttaggatccctgggcttgaatcgcgtcttggcggcgtcttcgcggcactcggggcggatggggtagaccgtgtccggatcgatgagcatgtccggatcgttgtagcagcacgccatgaacatcatcctgttcatcttgaccgcccaaatcgagccgcggccaaagaggcaggagggatcgagacgagaagacgccggccgctgctggtgatcagcagatgccgacactggcacgatgttgaaaataggaaccccatcaggtgtgcaggaaccaacaccaccttcttcaagctcggcgaatgcctcagaaaatacacgggacatcacatccgcagtcactgggtgctctactgaatagtagaatcttaacatcgttaggttgtcccaggaaaagccattatctatcagaatcttagcaagctggcagcatgaatcatccaggtcagagtattgtgcgctccaggcactaaaagcttcgcttgatgctggcaatgaccctccagcctcctgttctctggttgggactccatcatcattagtgggactggggacatacaatattggttttatctccacgtatgctctggctataaggtccgatgcaactaggagcccagcatgaaatgctttgtacatgtagaactctcttgacttgctcccttcttccttgagctgattctcgattctgctcaaaactgctactagatctgtcttcaggccttctgaagtaccacagggatcctgaatccaacaaccaatggagaacaactttttgccagtctttgagatgcataggtctatatttgtgcaagcatcaacagttgtaactggactcaaggtctcttgtttcttttcgacatcactgtgtgcaatagctccatctacttcatacaaataactagaattctcttgggcaatagcactatcaccaacggtgccaaaagaatttggcttgtgttcaagatgaaattttaacgggtgaagaattcctactggagcgatggaatcaggcgagtggagtataacttcaaaatcatcaagaacaattcttgcattacggaatagagggcagtcaagagttagtgtttcatattcgccaccttcaccacagacattgattccataactcctagtgggatatagaaaaacaaaaggagaaattacaagcttgacgattatagctactatgccccttcttatcatttcatcaagaagcaaagtctgatcctgcttccacaaatacgccagcgataccaggcccaaccttgagcagacactctcaacacgaagcctctgataatcagacgcaatggcgcctgaagacactgcagtgatggatgggatttgccttttaacctcgctcaagagcgcaaacatatcctccacttcatcgcctgtggtaacattatatttaagaccctgctccctgaagcctccagccacatcaacaataggcatagcaatcagcgaatttgacagaataccagcaacgaatggccacagcccagcgctagaagcagatgtagctgtcgagctcgtcgacggcgtcat

SEQ ID NO: 54664 - DNA, 773 bp, Oryza sativa
  unsure (1)..(773): unsure at all n locations
  Clone ID: PAT_MRT4530_56747C.1
gccgcaccgtccgccgcgccctgctccgtcctgctccgccgcgcgcagccgcctacacaaacctcgctccgccccaaatccagtaggagaagaagaagaaggggggaatccagtagcgttttgaccggaagaagaaattgaacaaaacgagctccaaccctaggaggtgcgaggcggcggcggcggagatggaggtggtggcgctcgtcagcggcggcaaggacagctgcttcgccatgatgcgatgcctggactatggccacaagattgttgcgctggccaacctcatccccgaagatgacgccgtcgacgagctcgacagctacatgtatcaaactgttgggcaccagattgtcgtgagttatgcgaaatgcatgggcttgcctctgttccggaggcgcatccgtggatcctcaagggagcagggtcttaaatataatgttaccacaggcgatgaagtggaggatatgtttgcgctcttgagcgaggttaaaaggcaaatcccatccatcactgcagtgtcttcaggcgccattgcgtctgattatcagaggcnttcgtgttgagagtgtctgctcaaggttgggcctggtatcgctggcgtatttgtggaagcaggatcagactttgcttcttgatgaaatgataagaaagggcatagtagctataatcgtcaaggtttgccgcatggggctcaaaccttctgctcacttagggaaagaactggctgaacttaagtgtcatctgctccaactgaatgagagtatggaatc

SEQ ID NO: 54665 - DNA, 792 bp, Oryza sativa
  unsure (1)..(792): unsure at all n locations
  Clone ID: PAT_MRT4530_56748C.1
aaaaattctggacagcttcaatcagaatgggctgcactaaacctaaaatcaggaccgattccgcggcttcttccttgtatgctctacttgctctttgtcgttgtcggtatcatcagctctctccctcttcttttttctctttttctcagtggctacagaatcaccagcactaactattatccctttcacaactgtcttcacctcttcctcttccggatgattctttttgttccttttcttctccgggctggcaaatctttgctcgggagcaccaccgttttgtttcacatcccttgcattctcttgctgactctcatgcttcttcttcttcctgttcttcttgctcgtctccttgtccgtttcttcttccgcgacgagatcagcagcgaaggccacttgttgtgcctcctgctcctgcttcacatgagtggctgcttggtgatggtcctctgaacgcttcctcttcttcttgtcggaggcggaggcagtatccccacggtggtagtagttgagtaggtcgaggcggaagcggtggtggtttttggtggcgtcggcggcggtgtggaggtaggtggcggcgtcggaggaggggaggttggaggcggcggagtcggcgaagaggtcgaggatgcgggcggccttggcgagcgagcagggcttggaggagaggacggcgccggtgatcgccctcatcgcctcgccaccggccaaccaccgtctctctctctctctctcttgtttggtttggttgagcagagggattaccggcggctcgaggtnccattcgccttg

SEQ ID NO: 54666 - DNA, 718 bp, Oryza sativa
  Clone ID: PAT_MRT4530_56749C.1
ggctagcaactaatctacaggaaccttgcttatgaattctatgtagaatattgtatagaagcatacaactttcaacatacccatgacatataaccacatagtgcttctcttacctggctataaggtccgatgcaactaggagcccagcatgaaatgctttgtacatgtagaactctcttgacttgctcctttgtaactagaacttccacatatgcatggcctaaaccaacctgaactagtggcaattcaactgtactacgtgaaggaacacccagagggcatttttgttcagtaataaagctcacataaacttcattggccaatccaaattccttcatgcttgaaatgaagaggtgaacatacagaacattcatccaacctaacccttcttccttgagctgattctcgattctgctcaaaactgctactagatctgtcttcaggccttctgaagtaccacagggatcctgaatccaacaaccaatggagaacaactttttgccagtctttgagatgcataggtctatatttgtgcaagcatcaacagttgtaactggactcaaggtctcttgtttcttttcgacatcactgtgtgcaatagctccatctacttcatacaaataactagaattctcttgggcaatagcactatcaccaacggtgccaaaagaaattggcttgtgttcaagatgaaattttaacgggtgaagaattctac

SEQ ID NO: 54667 - DNA, 323 bp, Oryza sativa
  Clone ID: PAT_MRT4530_5674C.1
tgtttttttttttttggcacctagcgacacaagggaactagccggatatatcccaagtactgcatgactacgtatgtttcacaaatgcgtcgaaacactggaaactgagactggccgattctctgaaaaggagattatgctcacaacgggtgaccaaatgaagtagatgctgaaattgaacgcctaaagagaagataaggcagactgttggtaaaaccatacgagggtgggtggcctgggagaacctggctagaggtaatccacgacacccaatagcctaatcttgaaccggggcggcatgcctttaacaaggcttttaagcc

SEQ ID NO: 54668 - DNA, 464 bp, Oryza sativa
  unsure (1)..(464): unsure at all n locations
  Clone ID: PAT_MRT4530_56750C.1
aaaagaaaaaattttagaaaaaactcactgnatcgcctccgcctctcgccgccntcgccgcgatnaagctggacgtntccnccntggaaaanangttccccgcccacgccgccggggggganganaanagggggctcttcngcgccggngccnacctgcccnccatggaactccccacctgccccncccacttcnacgggttccnnaaaganaccnaggaaatgctgaancccnanaanggaacgaacacncncncnttcatcttccanaanggngtnctcntcccgccgantccctntccttcatggggggatacatatcttcccnaactntgaggaaaattattgaaataaatccntncctgcttggaacaatgcnagangtgctgcngattgttcattttggcntangaacttngggcntccaattccccactccntgaacncncgaaccaaccgnaagat

SEQ ID NO: 54669 - DNA, 672 bp, Oryza sativa
  Clone ID: PAT_MRT4530_56751C.1
tagtggatccccgggctgcaggaatcggccgaggcaagccggccggaaagcaaacacgccttcgccttcgattcgattcttctccactccggccatggcgtccgccgcgtcctcctcctcgtcgtcgactcaattcgacgatgcggcggcgaggcgtcagcagcagctgcagcagcagcggaagccgccgttgctgatgctgctcccgctcatctacgccccggtgctccccctcattaggattgggttgcggcacaacccggtgtggagggatcgcctcttctacggcgtcctcgccggcgcgttcgcccacggcacctacctcatatcggagctatatgacgtagagagcaagtgaatcatatctctccaagtataaagtcaagggtatccatcggcagattttgacttgattgtaagtcatcaactgttaatgagagctgtccggtttttcaggttgataaaatggaccatgtatctatcatttttgttaatccatttaggcttttatggttgctggaatgatagaatatttgagcacacataataattctgactctgaagcaacatgtccggcatttttttccaatttgatgcacttgtgttttcctgcttatattgatttgtcataaaaaaaaaaaaaaaaaaaaaaaaaaaactcaagggggggcc

SEQ ID NO: 54670 - DNA, 224 bp, Oryza sativa
  Clone ID: PAT_MRT4530_56752C.1
atgagttgctcggtcaattcatgccctttggatgcgggccaggaggccaggacgacgaaggctgaggtgaaagaaagtgagcgagccgtccctaaatcgcagagccatgatcgatcgccgattcaccggcgatcgatcgagacgccgagacggacggggattgaaggcacgtacacagcttgcagggcttgcagccagctgcaatgcaagcggatcaagatctg

SEQ ID NO: 54671 - DNA, 275 bp, Oryza sativa
  Clone ID: PAT_MRT4530_56753C.1
cacactatgacgttcgctctatgccaaccctcaggctcaagagatcgtcctaagcacataatcctcttccaaggatacctcgaaatatcagctttcttgataggcctacagatcacctgtaggtagcttccatgaaagcctaattacctgcattaatgtacaaaaccaactgtaaccaccaattcctattctagacaggggccaaacaagtgctataaaaatacaatgattcatgcaaacattacatcagggagaatgcaaattgtccttaacta

SEQ ID NO: 54672 - DNA, 349 bp, Oryza sativa
  Clone ID: PAT_MRT4530_56754C.1
atggtaaacaatccaaatgttatgaagaaggcagtggacgagcttgatgtcgttgtcggtaaggaaagacttgtcgaggaatccgacattcagaacctcacatacctcaaggcatgtatccgggaggcgttccgcattcacccctaccacccgttcaatccaccccatgttgccatatctgacacgatcatcgccggatacttgataccaaaggatagccatgtcgccacgtgcgatgggttagctggccgcctccaggcgctcacctacccgcttttatggcgacctgagcggttgcaccacgccgtatttaatgtggcgtgcagtgcactcaaccgatctgtgacag

SEQ ID NO: 54673 - DNA, 3201 bp, Oryza sativa
  Clone ID: PAT_MRT4530_56755C.1
atgacaaagacgcagccgcaactagtggagtcggagccggtgaagaagctccaacgcttgccaccagtgtttagtcgtgtgttggagcttccattcccaagggataccaatgttcgtaagctctttaccaccaacgctgacctcttttttgtgccacatggtgtcggtggtgaacctgatgttgttaaggtacacattgtgagactcgagcgctgggatatgactagggtggtggtgcacattggacctggggagccagacttaaggaatgatctagtctatgacaagtggcgcttccccctagctgagacatccattctatcgatggttatggcagggatggatgcaagcggtgatggtgggaatgaggggatcccaatgtggcccaacattgataaaagaggaggaggaggaggaggaggcggcggattcgggcttcttgctggtgcaagctacattcctaccaagttttcaaggcctcgaaattctcagaaagttgaaaagtgtgtgttggataaggtgaaagcctctaagttcaagagtgccagagattatgactcgattccgatcgaggggcaattcatctcggttgccaacctgaaggagcggatttttgagtccaagcatcttgggagaggcacagattttgacctcatgatttcaaatgcgcagaccgacgaagaatatgctgatgaagctactatgataccaaagaacacatcggtgttgattcgtcggataccaggaagaccaaggaagcctattgtaacagaaccagaagagacaaaagccatggaaggtagggtagaagaaaccatgccttctggtagtgcttttcttgctgatgcatctatgaaatatcctgaagaatctgagtgggatgacgagtttggcaatgatttatatgtttctgattcagtcccttcacagctcggtagccaggcggttgatgcatctgaaaataaagttgatgaagatagtaaaataaaagcacttattgatacatctgcactcgactatagtcaaattcctgatgggtatggtggtggaagaggctatggaagagggatgggtggaagaatgatgggtggtcgtggttttggtcatttcattcaacattgcccaacaaatggtgatgctagatttgacatgaaaaggatgaaacctccaactggcattccaaaatctatgttgatggcaaccccagatggctcatatgcactaccaagtggggctggtgctgtcttgaagccaaatgaagctgcttttgagaaggagatagagggattacccacaacccgctcacttggtgatcttccaccagagttacgttgcccattgtgtaaagaagtaatgaaggatgctgttctaactagtaaatgctgctttaggagtttctgtgataaatgcattagggactacattataaacaagtcaatgtgtgtctgtggtgccacaagcatattagcagacgatcttctccccaataaaactctaagagaaaccatcagccggatattagaggcaccaccaactagcagtacagaaaatgtgggaagcatggtgcaagtacaggatatggagtcagctattcctgtacagcccaaggttaggtctccagctgtttctgctgcttcaaaggaagaaccaaaaagaacacctgcacctgtagaagagtctccagatgttgagagccatagcgaagtgaaaactacaaatgttgatatgagttcttcagataagaaggtccccgcattaccagatgttgttgaaggaaccatggagtctaaaattctgaaagaaaaaacaccagaagcaacacctgttgtgaaagagtcacaggaaaaaatgcctgttgtgggcgaacaagtcgtaaagaaaaagaagaagaagaaggtgcgcgcaccaggaaatgctgaggactggaaaccctatcaggactttggagctgaaaattttgctggaatgcctatgggtccggcaggaggcttcaacccttactggggaggggggatgccattgccaatggattacatgggtgcgccatttcctggtcccatgccatacatgggttatccaccaggtcctttcgacccttttggtgggggagtcctcccacaagatccatttatgcccccaggatacatgatgccagcagttcctagggacctttctgaattagcagttaacagtatgggaatgaatatgggtccaccggttgttagcagggatgaatttgagctccgaaagcctgataataggaggagacgtgaaatggagcgattcaatgaaagggagagggagcgtggacattcccgcgagagagaaagagaaagggagagggagagggagagggagagggagagggaaagggaaagggaaagagagagggacagagaccaaaatcgagatcgcgatcgagaccaagagcgggatcgggatcgggagcgagacagggaaagagaatctcgaagggaagcgagggaatcatccggagccaataacgatagtactacctcaatgaggccgaaggctaggtcaaggtcgtcgcagccggcggacaggtcggcgccgcctccgccggcgagccccgaccgccactcccggcgctccccgcaccgctcctccggctccggcaagaagcgctcctcctccgaccgctacgacgacctgcccctcccgccgcctccgccgcccgcgtcgcgccacgaggcggccgagcacgcccacgcgaagaatacggcggcggcggccgacgcgcggtccaaggccaagggcagcgtcttctcccgcatcagcttccccggcggcgacggcaacccttccgacgccaagcgcagccgcaggtcctcctccgacaagcccccggcgtcctcttcttcctcctccaagaaagcacgtgccgctgtggcggaggacaacgacggccgccaccaccgccgccaccaccgtgaggcggccgccgcggcggaagagaggcggaggcccgcggccggagactactacggcgaggaggaggaggacgacgagagcgaggaggagcagcatttcaagcggcgcccctcgtcgtcgtccaggcgggagcgggagcatcaggaggcgcaggaggagccgcggcggtccagggagcgccgcggcggcggcagcgacggcaaccaccaccacaaccatggcggtggcggcggccacaagcgccggtga

SEQ ID NO: 54674 - DNA, 333 bp, Oryza sativa
  Clone ID: PAT_MRT4530_56756C.1
atgtttgaggtggctgccggtggcgaagaagagggtagccacgaccaacaacgaagagggaggtcgcttgggtatggtgctgcagcagagttcgagctcaccttggggaggctggaggcagcggccagtgagggagagatgctagaagttaaggcagctggcgatggagccgagctcgcctgtggagggcatcggctagaacaacaaactttagggaggtggtggtggcggtggcggtggatgtatgcgaactcgaggctctcctactcacgaagctccactgcccgacctagaccaagggtagccgccaatggcatcaccatcgcctggtga

SEQ ID NO: 54675 - DNA, 383 bp, Oryza sativa
  Clone ID: PAT_MRT4530_56757C.1
cccccaaacactaattcagggggcaaaggggaaaaaattccggggggagaaaaacaaaataaaagttggggttgccccccactaaaaaggaaaaggggggagcgcatgcatgcccatgcccagaggcgaaaaacacgatttgggggaacaaccccaaggggcacacttgcacccccccccgcaggggaacccggtcccttccccaagggaaaggaaggaaggccgggagccggggaaaacattccataatcgttttgggggccaaaaagggggcgggcaaaaagggcggaaattttgcaacggggtttcgctgggctaagccccccacaaacagagcgcccaaaatcgggactcaaaacaaaaagaattggggagggggggca

SEQ ID NO: 54676 - DNA, 883 bp, Oryza sativa
  Clone ID: PAT_MRT4530_56758C.1
ccgaaaagagaatctccttgtagtttcttgttgtgtgcaagaagtaagagaggaattagcttggtagccgtgacaaagacgcagccgcaactagtggagtcggagccggtgaagaagctccaacgcttgccaccagtgtttagtcgtgtgttggagcttccattcccaagggataccactgttcgtaagctctttaccaccaacgctgacctcttttttgtgcctcatggtgtcggtggtgaacctgatgttgttaaggtacacattgtgagactcgagcgctgggatatgacgagggtggtggtgcacattggacctggggagccagacttaaggaatgatctagtctatgacaagtggcgcttccccctagctgagacatccattctatcgatggttatggcagggtatgtgaatggtcaactcattgtggttgtgcccaggatggatgcaagcggtgatggtgggaatgaggggatcccaatgtggcccaacattgataaaagaggaggaggaggaggaggaggcggcggattcgggcttcttgctggtgcaagctacattcctaccaagtagcaccatcatttgtggtaacggtgcaactactatagtatactagtagagttttgccaataaggtcttccaccaaatccatctttatgcccaaactaagtagcaccctccaccatctttgttttctgggtttaaagatggatagaaccctctttttttttgtttggtttggttcagatcgtttcagttcattaaagtttggccaaaatatctatgcttggtccagtcagtgtcattgtaacaatcagttggtaccatgggcaagcaatgtgtaacaaaaataataatataagtttgcaacttcgagcgt

SEQ ID NO: 54677 - DNA, 1033 bp, Oryza sativa
  Clone ID: PAT_MRT4530_56759C.1
cggttcaggatctaccggctctcctctccggctccatgcaccactacccaacttttgccgccaacacatctttgtttcgatcgaccgatcgatcagctctagctcagccgcagcaatggccatgcaccctctcgcccaggggcacccccaggcgtggccatggggtgtagccatgtacaccaacctgcactaccaccaccactacgagagggagcacctgttcgagaagccgctgacgccgagcgacgtcggcaagctcaacaggctggtgatccccaagcagcacgccgagaggtacttcccgctcggcggcggcgactccggtgagaagggcctcctcctctccttcgaggacgagtccggcaagccatggcggttccgctactcctactggaccagcagccagagctacgtgctcaccaagggctggagccgctacgtcaaggagaagcgcctcgacgccggcgacgtcgtccacttcgagcgcgtccgcggcctcggcgccgccgaccgcctcttcatcggctgcaggcgccgcggcgagagcgcgcccgcgccgccgcccgccgttcgcgtcacgccgcagccgcctgccctcaacggcggcgagcagcagccgtggagcccaatgtgttacagcacgtcgggctcgtcctacgaccctaccagccctgccaattcatatgcctaccatcgctccgtagaccaagatcacagcgacatactacacgcaggagagtcgcagagagaagcagacgccaagagcagcagcgcggcgtcggcgccgccgccgtcgaggcggctcaggctgttcggcgttaacctcgactgcggcccggagccggaggcggatcaggcgacggcaatgtacggctacatgcaccaccagagcccctacgccgcagtgtctacagtgccaaattactgtgacccacacacccttggctactgggactaccagaacctgacccacaaaactggatgcagccatgcaggggcccaactcaaaaaccggacctacaagacgctatga

SEQ ID NO: 54678 - DNA, 562 bp, Oryza sativa
  Clone ID: PAT_MRT4530_5675C.1
atggacgcgccgccgccgccgccactccactccatcgacgacgccgacagcggaagccacctcacaggcgtcgactcggcgaccatcgtgctgtcggggcgcgcagcgaggaagccgaggcagccaaggaggaggcggcagagtgggccgcggctgcgccgccgcctccggccggcggcgtcggcgtccctagctgaggacgcgcgcgacgagccgctgggtgactacgtcttcggcaagcgcagtgtctgggaggacggtgtcgtcctcttcatggtctccaagccacgctgctcgccctcgccctcgccctcgcatggctgaggggcttccagctccgctcgtcacggatcggcgccgcgaacgtgcggtcggagcgagacggcgtcagcaccgagttggaggccgcgagcctgacggcggcggcggcttccacgcacaggaacagggaagttggcaccgtggacggggagtggatggaaaatgtgatgaagtagcatgcatccaatttcctcctccacctccagctgtgcttggcgccgccaccaccggccagatccat

SEQ ID NO: 54679 - DNA, 577 bp, Oryza sativa
  Clone ID: PAT_MRT4530_56760C.1
attttccatgctctcttagaaatttcggatgatgtaaacaaagggaaaattatgaatctgagaagtgcaaagaaatggaaaactattgaaccactcgtaaagtcttacttgcagaattctcttgatctgcttagtcaacttactgacaaccaaatacttgcatttgtcttgactcgactgagagcatccgcagttcttttttctgcatatccatcaacatcaaggaggctcctcaagatcttaattcgtttgtgggccagtggagatcataacttgtctctgtcctcatttcttatgatacgggaagtggcttcgctgttaccagaatgtttggatctctgcttaaataaatcttataatacataccttgctagttccaagcttgtgaatgaaggaaatataaagcacattgattttttaatggactgtctagtggagctctattctcttgatgttcagaaatcatgtgagagggcaactacctctataggacaactgaattctattctcaggcaggcttgtaaaacaaaagaaaaggaagacctcaagaaggtagataactggcaatatattaact

SEQ ID NO: 54680 - DNA, 2746 bp, Oryza sativa
  Clone ID: PAT_MRT4530_56761C.1
cccacgcgtccgcaactccgccggagcgccggcgctaccgtcttctcgaggaggaagaagaagaagaagaagaagaagagagagagagaggagaacacctgaaaccctaaccctagcgaggcaagaggggaggggatggcgaagaagctcgggaagaaggcgcgcaagttcgcgcgcaagcacctccagtccgccgccaagcgtaaccgcaagcagcgctcgcagttcgcccgccgccctcgcagaggtgggagcggtcgcgggaacgagcgcgatggcgatggcgatgacgagatgccgcagcgagcaatcgataacgtcatgaacaacggtgatgctgcagctttggttaatggcctagagttcccggaagatgaatgtgaattaaacagtgatctgtctgatagtgatggttatctttcagaggactctgaatgtctatattattctgacagtgaggatggcaatgctgtcaatgattgttttgtccaagatggtttagatggcgagaatgataagatgaatacagagataaaaaaacaaaagaagaagttgaacaagttgatggacaaggaccctgagtttgtaaactaccttgaaaaatggcaatcagagttgaagagtgatggaagtaaagaggattctgatgaagatgagatggactctgtggataatgatgctgactccagtgatgaaaatctttcaaatgataagatactgacaaggaagactataagtgaatggtgccagttagttgcaaaggaacctaaagcaccttctctacgcagcctattaaatgcttaccgggatgcttgtcgatttggtgtttccaagagcccttctgtgcagagaattcaaagtactgaagtgtttcatcagataataacatttgtcctttccgaagcagacaacattttccatgctctcttagaaatttcggatgatgtaaacaaagggaaaattatgaatctgagaagtgcaaagaaatggaaaactattgaaccactcgtaaagtcttacttgcagaattctcttgatctgcttagtcaacttactgacaaccaaatacttgcatttgtcttgactcgactgagagcatccgcagttcttttttctgcatatccatcaacatcaaggaggctcctcaagcacttgtttgactgctatgctgtagagatgaggagaaatgatggttctattcgctggtgccttgttatatggacattgtgtttgtatgatagctgcatgcttttacttaactcatttaagccatctatatctgttaatgcttttgccagcttcaaaacaatcttaattcgtttgtgggccagtggagatcataacttgtctctgtcctcatttcttatgatacgggaagtggcttcgctgttaccagaatgtttggatctctgcttaaataaatcttataatacataccttgctagttccaagcttgtgaatgaaggaaatataaagcacattgattttttaatggactgtctagtggagctctattctcttgatgttcagaaatcatgtgagagggcaactacctctataggacaactgaattctattctcaggcaggcttgtaaaacaaaagaaaaggaagacctcaggaaggtagataactggcaatatattaactgtgtaaacctatgggttaggtttctttgttgtaactacaaggactacaatatgcatccattactttcttcagttgttcaaataataagaggagtggctcacttattcccaggcacacgttacttaccattgagactgaggcttgtgcagatgctgaatgagctttctagttgcagtcagatgttctttccaattccatctttgttatttgattgcctagaatttagagatacctctcagaaagaacaaggaaaaaaagcaaaggtcaacttttcatcactattgaaggtgccaaagaatatgctgaagtcaagagacttccacgaggagtgcattctttcagctattgatgttctgtctgcacattttgcccaatggtgctatcatgtctcttttccagaagtagccaccattccactgatcctcctgaaaagattacatgagcagacaacaattgaatcacttcgtcgtcctattaaacgactgatagaccaggtagacgagaacaagaacattgtagaaaggaagagagacggggtctcattttcacctaatgatacaacatcagttgagagcttcgttcaggaccttcaggcagagaagagcggtgcaaaaatttcacagttttacaaaattgtaccaaaaaaactaagtggtctgtatccaaacatcccccggctgtttgcaggtagaaaaagaagtgctatgaaatgcgaacacacttttttggctaccggattatcggaagaaggatgctgggagcatgaatgtcgcacgccatatcggtcaactcatttttctctgggagatatttatgaatctgagttgatcacctcttatgacatcaacaatggcattgctcgagttgttgaaaccggtgaagtgaatgagcctcttgctgagcaaagttttgagcgtgaatgttaccgtttattgatgcattgggcaatgagcctcttgcttagcaaagttttgagcgtgaatgttactatttgttgatgcattactgtggaggttgagactgttcttcctgacgaaaggattttgtgatctacttttgcacatgacttatgatttgccagacaattattcgattagc

SEQ ID NO: 54681 - DNA, 341 bp, Oryza sativa
  Clone ID: PAT_MRT4530_56762C.1
agcacaggaccggggcggcaccggcggaggttgcttcaatgaccatccctaatcgcgcagcgcatgcggagcccgagctaccggaaagcagtccgtaccggagctcagtcgcccttgatggtagccgatcacgcgtcgcgcgggcggcgtaccctgaaggacatcctgcagacgagatccgtcgagaggatgcagcagaacacaaacctcggcgtcgtggaagcgcttgacaaccctaactggaaccaaggaaccggagttgacctactgagggagagtagagaactcgaaaatgggaacatagcatgggaagagggaaaaccaaatgctgttatccacaa

SEQ ID NO: 54682 - DNA, 390 bp, Oryza sativa
  Clone ID: PAT_MRT4530_56763C.1
tttgttttttttattttttgggttttttttttttttttttttttttttttttttttttttttggggcggggaattccccatatatattaatccccttaaaaataaagaaggcatcccccattttgggtccccagcctttttttaaaattttttttacacaggggggagaacccccccccctttggggaccgggggaccgaccttacccataggcgggggggggaccacacaaaacggggggacccatgcatgagctggggggaattttatgggggaccaatcattcatatggaggggggaccagggggctaattatagctggggcttggcggcaatgggaagggcccccgggaccacccggttgaccttgtttttgggggccttgagccc

SEQ ID NO: 54683 - DNA, 148 bp, Oryza sativa
  Clone ID: PAT_MRT4530_56764C.1
gcttgctgctccggtgctggccctttcttctttcttctccgaccttgcgcctaccttaggctgaagattgattacatttttggacatgacgcgcaattgactgtgcttgttatgaagatatatttaggatgtcttcgttgacgattga

SEQ ID NO: 54684 - DNA, 1428 bp, Oryza sativa
  Clone ID: PAT_MRT4530_56765C.1
ttttttttttttttttttgccagagaataaactgcataaatgtagagcatttagctgaacatttacatgatggtcatgtcaaattgcactcacttcacacaagtgtcttaaacagaaggaagcaagttggttaagtaggaacaggaaaaccccaaaagatcagcacagcaagacattgagagaaagagacgatgatacaagctcagaagatcatattcttcttcacagcaggtcactgaatgtgtcaaagcagctccaaaaaagaaggtcaacactcagcagctgttcttttccgtccagaggttattagagatgaagagaggtcagatgtcttcagtactctcagtctcttaactgaagaaacaaacatcccccatggcacatctccaacaagcaccttgtcgccttcataatcctcataaaccaaagtgtactccccagttccatctagcaagccagatattgccacatcttcctgctggcagtcctttgctccagcagtgagggggtctctttgggctgcaagaaggcctcggaatagcttgtcaaccgctaaagaaagcttctcatagctatcaaaagcattcagatcgatctttctaccaatagggacaccatccatgtttatctttatgaatggagctctcttgatctcttctgcttttgcagccttctttccattctgcagttcaagagatgctttgctggatgtagccagatttcttctgaatgttcgaaccggaggccaaccaacaacaggagtactaggagatcttgtctggaagcagccattattgttggatgcaagtgcattattccctgtagctggtggtggatgtgcctcttcttcctctggggaccccttgtttttgtttgccttgccttgcgagtgggagacgagtgtggagtagcccagggagagcatggagctcttgtcaccatcatcatcatcagcagcagcagctgctgcaatggagtgcttcgtcgtcgtccccttgtccctgcacgccgctcgccatcctcctccggggagcccaaggctgagctccagcgtcttctcctcctcctcctgttcatcgccatggcgatggtgatcgcttggctcccccatccagcttccgccgagacggcctctgctgatcttcttcatgctctccgacgcctcccccatcacccgctctctagatgtacagctcgcccaaatccaagaacaaatcaagaaagcagaaactagctagctgagctgctgctgctgctggttgctgtcttggctgcaatgcaagagggagaggtgtggaacagagagctagaaaaggtgtgggaatggtagtagtagctgcagctgcaatgcgagcaacggcacacggcaatgtgatgctccgatgcgagtagcgtctagctgagcctgagctgagctgagatgccgcc

SEQ ID NO: 54685 - DNA, 427 bp, Oryza sativa
  unsure (1)..(427): unsure at all n locations
  Clone ID: PAT_MRT4530_56766C.1
cttcatcggctcatggggtntgattcagcaagcccgttgttacggcggagcagagcatttgacgatggatatgacagttttgaatcccatggtgccngtatcaaacagngtatccagaagaaagaatttgtgagatacttatgtagccttttgattcctaccaagcaggataggaaggatcagcaattttgtgattatgtacaagaaatggacaccttgcctgcaagttattatatttttttgtctttcagaagattttgggattttaattctgaagttctttggttagtcattcttcaatcaaggtacagtaattcgttattcttgttgtaaagttgtgtatatttggtgggataagattgtataacagttattgccagatgtttgttaatacatggtgtttnttaaaaaaaaaaaaaaaaaaaaa

SEQ ID NO: 54686 - DNA, 279 bp, Oryza sativa
  Clone ID: PAT_MRT4530_56767C.1
atggctgacatccggagctctggacccggtggcggcgattttcggggctcggttgaggccggtgggaagggtagagatgacctcggtgacttctggatgggcgcgtcttctagcccttcggtgatagtgccatcgatggcgtcgacttctccacggcgatgggaggtggccagtcgagggccacctggtgaccgcgactcagctcaagcatgggcttcggcgggcggcgacgatggcagccacagagacgtcattgacatcacagccggcctccggtga

SEQ ID NO: 54687 - DNA, 403 bp, Oryza sativa
  Clone ID: PAT_MRT4530_56768C.1
gtttggttcccttcgcctaagcgaacgaaccagggccgggttctcatcgggacgaccgcaccaccggagcccgagaagacggaggagcaggagctcctccacccccttcaagagccagtggagggagacgtcagtggcggcggcggggcagacaggacgtgcgggatcgcgacgtgggcgctgattcgtgtccatcgttggagaggcggcgctgccgacagcgagtgtgaccgggcccagagcggcgctggggccagaaggcccgttggcggtggaggtccgggactacatgcggtggtacacgctgtacgcgaggacggggagcaccgagtccgcgcacacgatggcgacaaccatcgtggagatgaccaagaacccggtcacggtgacgctcatcgtggcc

SEQ ID NO: 54688 - DNA, 279 bp, Oryza sativa
  Clone ID: PAT_MRT4530_56769C.1
atggatggtgaaaatgatgacgaaaagaccgacgcgttggccggggagaacggcctcgccgagcgcgatgaggcaggtcatcgtcggtccatgtcgtcgcggcagccaacagcacggcggctctcgcccaatgacgacaagaagaccgagacggagtcgtcggcaaagaatgccgcggcgacggacaaacctacaaagaggtgtcgcactcttgcagcggcggcggacggggttagtcatgccctctacaggccctccttcacgtccaactcggggtag

SEQ ID NO: 54689 - DNA, 299 bp, Oryza sativa
  unsure (1)..(299): unsure at all n locations
  Clone ID: PAT_MRT4530_5676C.1
accaaaaccccnccgacaccgagcccctcctactngacctcgccgcaaatnctccgacgctcctncgtcgntagggcataaccgtccgnctctcgtcggnatccgcatctcccggggaagggaagggaagggaagggtaggaaggaaggtnagggcggatatntcngcggcgtnatcaccccncgagtnggtnggnctncagcagtttccggnggctacccanaccaagctgcaacgagctnctcggcaagctcaagnaggagaatgtaagcacattnncaattctggtgatnnggaag

SEQ ID NO: 54690 - DNA, 336 bp, Oryza sativa
  Clone ID: PAT_MRT4530_56770C.1
atggctgacatccggagctctggacccggtggcggcgattttcggggctcggttgaggccggtgggaagggtagagatgacctcggtgacttctggatgggcgcgtcttctagcccttcggtgatagtgccatcgatggcgtcgacttctccacggcgatgggaggtaccatggggcggatctagcggcgggtggtgcttggttggtgggggcgtgagcgtcgagggccacctggtgaccgcgactcagctcaagcatgggcttcggcgggcggcgacgatggcagccacagagacgtttgcagcgagctccctcttcaccgacgcagctcaatga

SEQ ID NO: 54691 - DNA, 250 bp, Oryza sativa
  Clone ID: PAT_MRT4530_56771C.1
atgtctttcgtgattagtctcacacttctcattatagtaaaagatgctataactgataataatttgattagctcctggtttggaatggtacattcctggttggagatagaactgtgcagccggggtggctgttcagaatggttgggcctatacaacagggtatgttgtatagcgttggattaatattgtttaattattactaactgttttattaaattctcaaatgtttgctaaatgctgcttttgcaaa

SEQ ID NO: 54692 - DNA, 457 bp, Oryza sativa
  Clone ID: PAT_MRT4530_56772C.1
ttggcaaatcagaaagaaagcactagtggaccttgcactgtaatttatgtagtctgtccatttcccgaaccttctgctgtcctagagacactggtagaatgttctgttgctcttgggtcggtaatgttatccccagagagagaaaggaaatcattcctatattctcaggttgccaaagccctaaactgcaatgcttctgttgatgaatcatcagcatctaatgttgtgatgctctctggtttcagtatacctaagcttgtcttgcagattgttactgttgaaactttattgagactccataagccaaacaatgagcttgctgttttgaaggacatggcattcactgtgtacaacaaggctcgccgaattccaaaggccattagcacaagtgacatgtttcagtcacctgcgtacatgggcaggtctcagtccaccatgatgcatgctacatctcctg

SEQ ID NO: 54693 - DNA, 371 bp, Oryza sativa
  Clone ID: PAT_MRT4530_56773C.1
ggggggaagcccggcaaaaaacccttgctttgaattctgacccaaaaccccccggacccggggtttttttgggggaagccccgcccaaaacctcgcaaaagtcccgaacccctaaccctagcccccccccctggcaaccctgggtccccaatgcccccccccgaaaattttcaaattcgaaggcccctgccgggttcccccgctgaaaaaccatatttccccccccattcccgggaggggccccctccattcacagccaatgggcccgccctgccccggctggggtttttcaaagcaaaaaccctcccaatgtacccgggggccccccccccctcaggggtgtttccccccctccagaacccatacccccc

SEQ ID NO: 54694 - DNA, 996 bp, Oryza sativa
  Clone ID: PAT_MRT4530_56774C.1
atggggagggaaggagaggagttagaaaggaggaagaggaagggattatgggggagggaaggagaggagttagaggagaggaggaggaggaagatgaagagatgggatgaagagataagtgatgatagtatgatgatgggtggtgaggtgagggcgatcgagtcgaggctgcctccgggtttcaggttccatcccagcgacgaggagctagtcggctactaccttcggaacaagcagcagcagcagcagcagcagacggcggccacctccatgctcgtcgaggttgacctccatgcctgcgagccatgggacctaccagaggtggcgaaggttggttcggatgagtggtatttcttcagctggagggagaggaagtacgcgacggggtggcgcaggaacagagcgagcaagcaagggtactggaaggccaccgggaaagacaagcccatccttcatccgacggtggccggcgccaggaagacgttggttttctactccggtcgcgcccccaacggccgcaagaccgcctgggtcatgcacgagttccgcctcctccatcatcatcatcatccaaacccaaatattcagaatatgcagcagcaggagggggatgactgggtgctgtgcagggtgttccgtaaggggaacaacagcaatggacaacctctagccacttcttcgccacctgctcatcacctggtggagtcactcatcagctcacctgcaccaactatcatgagcgatcacgatcggctcttcaccatccagctgccgcatcaccaacattgtgatgagcagtactttttcttagatgacgatgaacagcaccagcagcagctgctagatctttcagtgctccaagctccaacctcgttcgagtctgagcaagctccaggccacggtggcatggagattaatatcgcagagatggagagcttcgacacgacctgtgctgcgctgcaagacgcgagcgattactgcatgcagctctattaa

SEQ ID NO: 54695 - DNA, 162 bp, Oryza sativa
  Clone ID: PAT_MRT4530_56775C.1
atgggtcagcggctcattgagccgacctaccgtggtccagggccatgcgggcggtctactgctggtccacgataccggcggcctgggtcggcaacggctggtgcgacaaggcgggcgctcggcggcggcatgcggcagcggctggcgcccgacagtggctag

SEQ ID NO: 54696 - DNA, 1680 bp, Oryza sativa
  Clone ID: PAT_MRT4530_56776C.1
ccattcacctccacctcctccgtcctcccccgctccggagaaaaaaaaacctccgctatttatactcttcgttctcaacatctctactatatcaaattctacgcacaagactgtagtgcaccagaattttgctaccaatggagctcccaagaatggccagtcgtcgtcttcctctgccactagtagctcaactcgttgtcttgctcggcttggcttgcgggctccggtcgtcgtcggcggcggcggcggcggcgagtggccttgccggtgaacgggttacatatctgcccgggcagccgccggtggacttcgacatgtactccggctacgtcacggtggacaagcgggcggggcggtcgctgttctactggctgcaggaggcgccggcggcggcgcagccggcgccgctcgtgctgtggctgaacggcgggcccggctgctcctccgtcgcgtacggcgcgtcggaggagctcggcgccttccgcatccgccccgacggcgccaccctcttcctcaacgactaccggtggaacaaagtggcgaacatcttgttcttggactcgccggccggcgtcggattctcatacaccaacaccacctccgacctctacgattccggagacaagagaactgctcatgattcctataagtttctggtgaaatggttcgagaagttcccgcagtataaataccgagatttctacatcgccggggagagctacgcagggcactatgttcctcagttgtcccagcttgtgtaccgtaacaacaaaggcgtcaaggagcccctgatcaacttcaaaggcttcatggtggggaacgccgtgacggacgactaccacgactacatcggcacgttcgagtactggtggaaccacgggatcatctccgacggcacgtaccggctgctgaacgcgtcgtgcgtgcacgactccggcgagcaccccggcaccggcgtgcctcgccgcgctcaacgcctccacggtggagcagggcgacatcgacatgtacagcctctacacgcccacctgcaacgagacctccacctcgtcggcggcggcgaggcagcggcggctcaagcaaggccactatccgtggatgacagggtcgtatgatccgtgcacggagagatactcaacggagtactacaaccggccggaagtgcagagggcgctccacgccaacgtcactggcataaactacacatgggcgacgtgcagtgacatcctcaacgacaactggagagattcgccaaggtccgtgcttcctatctaccatgagcttattgcagctggcctaagaatatgggtcttcagtggagacacggacgctgtcgtccccttgacagcaaccagatactccatcgatgctctcggccttccaactactgttagttggtacccttggtatgatgccatgaaggttggtgggtggagccaagtgtacaagggcttgagcttggtaaccgtccgaggcgcagggcacgaagtgccgctacaccggccgcgccaggcgctcatactctttaagcacttcttgcagggcaagcccatgcccgatgcgcctacaaaagtacaaaatgaagcctagatttgttaatctttattgtaattgaaatatttgtagcaataaaatggaaaaaaagcaataaaaatcattccaatcaaacacaccacacac

SEQ ID NO: 54697 - DNA, 437 bp, Oryza sativa
  Clone ID: PAT_MRT4530_56777C.1
tattttagtgatgactatgattctgatgcaggcgagaaaagctctgagacttctataaatcacacgttggtaaaaggtctttccatccgccttgaggcgttaagtgtagaacagttaatcgaacgagctcggccactgcattgaccagtatgcatacatgcacaccttgctatcgactggtacaatggggtacaacctttgatgactgatgccagaacaatagggttctataaaggcaactcgtgcacagagaattggctaggttagagctagaagagctatatcgcaggggaacttgagccggtaccatctgacgatcaatctagcaaatggaaaggatagcgggatagctctgatcgtgagatctgtagcacaccaatggtggttgttatgaacaactgtttggaacacgatgaggatgatcagtggaaaggtat

SEQ ID NO: 54698 - DNA, 514 bp, Oryza sativa
  Clone ID: PAT_MRT4530_56778C.1
ccggccgggggcggcggcatcggcaggcgagggagaggaggaggtcgacgggaggcgattcggacggttcttggcggagccacttcgtgaggccggtccggtctgcggcggtaggcagcctcctcgtctcagctccatgcggcatggccaccgagatgacgggcgcccgcgcaagccggtcctccagggacagggagtcctcgatttgattctataggcctgaggaattggtgggattcgtttaggtgggcactgacctgtggaggtgctgtcactcataccacttcatggtgatgaagccttgctgatgttggttattcctgtgtggtgaattgttgtttggtcagtgttgatgtcccttgttagatatttttcccaacgttgtactcctaaaacagcaagttcattgtgtccaatttttattgaactgtagattgtcgtgtcacatctgcaggaagtaaatacttgggattctttgttcttgtggctgaaaaaaaaaaaaaaaaaagcggcc

SEQ ID NO: 54699 - DNA, 484 bp, Oryza sativa
  unsure (1)..(484): unsure at all n locations
  Clone ID: PAT_MRT4530_56779C.1
gggcgaangggnaccgctcgggccggccgggcaagccctcccctgccccgccggatccggtggggccggactcccttcacgaatcctcctccgcacggcgtggccgccgccgccggcgcaggacgactgaatcaagatgccggctaatggcgatggccctgccaaacggagcgcagcagctgccgcacagcttgcgcaggcgcagaaccactggcgggggcgggggcgctgctagagggggcaccagcacaatgccacagttctacactgaacaggcggctgggtgcaggatgccccccagcgctgggctgatcatgagcatctggcctgttcgcgggcgtggcccgtctccgtgttttcggcttgctctaccggacctcctccgactaccgggaccatgctattatccctgcctggcagggtcagtcatctgacgcgctccttcggcgaggtccttcccccgcgtatcgtgtcgctattcgat

SEQ ID NO: 54700 - DNA, 3022 bp, Oryza sativa
  Clone ID: PAT_MRT4530_5677C.1
ttacaatagacctttgttgttttcagacgtcgacccagatgaagtcgtcgccgtcgccggcgatgatcgtctgagcagcctccctgacgacttgatctgccgcatcctctctttcctgcccacccgggaagccgcgctcacgtcccagctgtcgcggcggtggcggcgagtgtggcccgcggacgtcgccgcgctcaacctggactggacttgccgatgcgccagctagttgtagttcgccgctctcgccagccgccagggaggccctcctccggttcccgaccaccggcatcccctccttctccctcgagatcgaccaaccatgcagctcctgcaggcctgctctctcgccgtcggccatgaccatctcgaggtcctcgacatcaacggcgtcgacgacctggaagccctcgacgtgtcggcgcccaaacctccggtgcctgaacctgaacgtccgctcctgcttccgccgtctccgcgccgagtatcgaggccgcccccgtttcctttcccccagataggccggcccattccgtcaccgttcgctccacccatcatcccagcccaagtgcccaaccgccgtgacggcccgtttcccccaccacccgccaatccgacgcccccgccgcgtcccccctccaggcggcgcgcctcgcccggcacggcacgtagcagcgcgcggccgccggggcgaggtagttgtaggggcacgtgagctccgtgtgctcctcctcctccgcctccgccaccgtcgtcgccgccgccgcctcgccgccgcagatgcagcacgactcggcgtttgggtccttccagaagttgatcgtcgccgccgtcgacgacgccgccgccgcggcgttcacgtccatctcctcctcctccccctcccaacccaaaatttttccccttccctttttttttcccatccctttggttcccccccccccccccgcgccaaaaccccaatctcctcgcccctccgccgccgatcgcggcggcgcggcgcgcgatgccgatcgagatcgactgggaggaggtgatgccgaccaccaccaccgcctcctcctcccacggcgacgatgtcgaggtccgcttcgtctcgacctccacgcggtcgtcggtggcgcagcggctgcggccgcggggggcgaggacggaggaggaggcggagatcgtgaggatgagggacgacgagctgcggagggagatggcgttcgcgggccgcctccggccccggttcgaggggatcctctgcgacggcggggaggggaaccgccgccgccgcgcgctgctcgaggccgaggcgcgccgccgggggatcggccctgccgccgcgaaggatggagatgaccgtcactctacctcacgcgatgtattcagtttcgatattgaagatcagcttggggaagatgcatctcgcaggttctgtggtaaaccatggcccgtttcttctacaaaggagaactatggtcagctaggtattgaaacacggagaagttcaaggcaaattgaacagcggaaacccatttcagtggataagatgtactcgagcaaaccatgttcttcaactttatctgggcacaaactgagagttcatgccattgatcctgatgagaaagctgatgatgaaaaatctgaaccaagtacaagatactctttcagaaattatattaagaatattgcaatacttgttattgttcatgaaatttcgaagatagagatatcaagaacctttaatccttccaacgagaaatgtaacgaaacctttgtatctttgattgatctagagttcatacatgcacagttatgtgtccagcaaggaggaaggaaaaacatcagtcgtgtctctctgattttcaaaaggtgggttcaagacgtagttctcttggatgatgaagatgttcagcctgagggtcaagtagactgtaggatgcatgacagaaggaacgagaccatgatttactacccatcaagagatgatccagaagctgtagagcttagcagctcagatattaaatgtcttgatcctggggtatatttatcatcaccagtgataaacttctacattcagtacatgaagaggaccaaactgcatgatgatgattgcagagaaaaattctacatatttaacacatatttctatagcaagcttgaagaggctttattggggaagggcacactggagcttgattatcatctgctttccttccaaagaaaataccttgaagcagaatggtgccatttacggaagaatccccctcccgatatttcaatttcagagacaatatgggatgatcttccaagcaatatacagaaagaaaaagttcaggttccacagcagaagaatgagtatgactgtggtatcttcatgctttattatattgaacggtttataaggctagcaccagaaagattcactcgagataatcttagcatgtttagtcgtagttggttccagcctgaagatgcttctgatctaagacagagaatacgagaactgctgttggaagaatttgaaagtgccaggctggatgaagctttgtcggaggctgacacatctgaccgatccgataatgaagaagatgccacaaagagcgcagaatcagaacaagcagcagcagcagcagcccctggcaatggtagttcagaaatgatcgtagagggtggagacactggcataagtaatgaagacatcaagggggtcgcggcatcaaaagaagcaagctctagcatctgcagaagcgctgacaatctcgcgggctgtgttcttttggaagaagctacattgtcggatagcgtgatgaaggatgaagaagacactacaaaagcagatcctgttagctcacaagatgaacaagaagttgcagttttatcccctggtgcatggaaaaacagtgaagagaacacacataaacagccacagccagatatatgttgcgacagctccgacagtgagatggacgatgtgaagatcattgaagatccatatcaaagaactaacaagcaaaattgtcgcatcttttga

SEQ ID NO: 54701 - DNA, 501 bp, Oryza sativa
  Clone ID: PAT_MRT4530_56780C.1
ccactagaagtaaatgtacgagagatcgctacaattgactggttgagaaccaatgagtaggtgtctctcgatcatttgaagtcgtggtgtgaggaccgctgcgttattgatgtagtcgtacctcaaccatctgaggttgcggtgcgagagattgctacgtactggttcgaggactagcgaacgtgtagaatcatctctcgaacaccaatggaagttgcggtgtgagagattgctacgtactggttcgaggaccagcgaatgtgtagaattatctctcgaacaccaatggaggttgcggtgcgagagattgctacgtactggttcgaggaccagcgaacgtgtagaattatctctcgaacaccaatgggggtgctagagttggtttattacatgtgcgtctcatgtggccagcatgactcacgcacccaacttatagcatatccggatgtccgttcacaatcatgtcgggtgatcaagtcgatgacgttcgcgagaattatc
